United States Patent Application Publication US 2008/0114160 A1 - sequence listing, part 66

SEQ ID NO: 23845 - DNA, 22679 bp, Oryza sativa
  unsure (1)..(22679): unsure at all n locations
taagttatcccaataatgtgctaatgtttctaagcatggctaagcaatcacatctaatatctagctgaaccaatatgtaaagctcaactagtcaagttataataacccaaggtatcaaggaataaagtaaccaaaaacaaaagggctataacatataataggttaattccacccaatgacattcgaaaataaatgcaatagttgaatagaaacaatagctttaaacgggatcaacatgctcaaagggttgtttgggatctgtgtgacttgccttgctggccttggaactcttcaaactcttctcctgtgaaaacggactctccggaaacgacggaatctaaacagaaaagagcaaaatcaccaaaacagcacataaacaagcatgaacagttttattaaacggaatctcgtcctcgagattcggaagaactggcgaacagatgcggatgagctgacttcaattcatcttctcgttcccaagttgactcttcttccgagtgattactccattggactttgcaaaaacggataacccgattcctggttcttctctcatctatttccaagatacggattggtctctcaacataggtcagatcctcttggtcttttatctgttcaagattagcttcttcggtaggtacccttaaacactttttcaattgcgaaacatggaacacattatggactcctgccaaagattgaggtaactccaactgataagcaacctctcctcttctactgacgatcttataaggtcccacaaaacgcggtgccaattttcctttggtgtgaaaacgatgaactcctcgaagaggcgtgacacgaagatacacataatctccttcttcaaaactcaaatctctacggcgattatcggcataactcttatgtcgagactgagccactcgcaatctttcttgaatgatctttaccttttcttctgcttcccttaggatatccgtcccgaaaacctgacgttctcccgtttgatcccacaaaagcggagtgcggcacttccgaccatacagtgcttcgtaaggagccatctgaagactagcttgataactgttgttgtacgaaaattctgcataaggtagattcttatcccaacttccaccgaagtctaaagcacaagctctcaacatatcttccaaaatctgattcaccctttctgtttgtccgtctgtctgcggatgataagcagtactaaagttcagtttagaacccatctcttcctgaagcttcttccaaaaatttgaagtaaactgactgcctcgatcagacactatcttcttagggacgccatgcaaacacacaatccttgccatatacaattccgctaagcgactttcggaataagttgtctttaccggaatgaaatgtgccactttggtaagtctgtcgactattacccaaatagagtcatggcctgatgacgttctgggtaaaccagtgataaaatccataccgatttcttcccacttccattcaggaatcttcaaaggctgcagcaaaccggcaggtttctgatgttctgccttgactcgctgacaaacatcacatactgctacgtattctgcgatttcacgcttcatacttgcccaccaaaatctttccttgagatcctggtacatcttagtactaccagggtgaatagagtataaagtgtcgtgagcttctttcagaattgcatcttttaaatctttgttgtcggggacgcagattctctcacccaaccatacagttccgtgctcatcctccaagaaaccgatagcttttcctcttctcatattcttcttgatctcttgaatatcgggatcattaatttgggcttctctaacttgatcaattagagtgggcttcgcttctaaggctgcaacaaaacctctactgacaattcccaaatttaatctttcanattccttgcataattccaatgacaactgtcgtccttccgtagcattgcaatagcctttcctgctaagagcgtctactacaacattagcctttcccaggtgataatgaattcccatgtcataatcctttaattaattccaaccatctcctttgtctcatgttcagatccggctgagtaaagatatactttaaactcttgtgatcggtatatacctctgtacgagtaccgaaaagataatgacgccaaattttcaacgcatgaactactgcagctaactcaagatcatgagtagggtagttcttttcatgcggacgtaactgacgagatgcataggcaaccaccttcccatcttgcatcagaacacaacctaacccaaacttagatgcatcgcaatacacttgaaaacccttctttggatcaggcaaaatcaaaatgggtgctgatattaagcgacttttcaactcttgaaaactctgctcacattcttctgaccacttgtacttcacatctttctgaaacaatcgtgtcatgggcttagcaatcttggaaaaattctctataaacctccgataatatcctgcaagacctaggaaactgcgaatctctgaaactgtctttggttgtttccagttggttacggattccacattactaggatcaacggcaactcctctagctgagatgacgtgaccaaggaacttcacttcagacaaccaaaattcacacttgctaaacttagcatacagttgatgttctcgtagcttctctagtgcaaggcgaagatgttcttcatgctcttctttggttcgagagtagataagaatatcatcaataaagaccaccacgaacttgtctaggtattccataaacaccttattcatcaagttcatgaagaaagcgggggcattggtaagtccaaaagacataacagtacattcgaacaatccatacctagtggtaaaagctgtcttaggtatatcttcctctttgattctcaactggtgataccctgatcgaagatctatcttggagaaaacagtggcacctttaagctgatcaaacaaatcatcaattctgggtagcggatacttattcttgatagtcacatcgtttagggcacgatagtccacacacatcctctgggtatgatctttcttttccacaaaaataaccggagctccccatggagatgaacttggtctgatgtatcctttctgaagcaaatcatctacttgccgcttgacttctgccaactcattggctgccattctataaggtctcttatggatcggagttgttcctggtaccaaatctattctgaactctatatcccttttaggcggcataccaggcaaatcatcggggaacacatcgggatactcccggactataggaatcttttccagaattatttggttcagtcttgaccttaaaaactcagaagacaatgcatgaacagtcacaactcgaccatcattgctggtgagagttacttttctgttagcacagtctatcacacctttatgtctggctaaccagtccatccctaggatgacatcaaggtctttggattctaacaagataagattggccagaaatggtactcctttaatttctattctgacagaggggctacgttgcaaagagagtgcttgactacttggggtactaaccatcaaaggacgtctaagatcttctacttccatcccatgatttcctgcaaaactcatagataagaatgaatgtgtagcaccagaatcgtaaagcactgttgcaggaactgagttaacaaggaacgtacccaaaatcacatctggagcatcttgtgcttctgcagcagcgacatgattgacacgagcctttgatgctggtgcggtagagttgctctgggtagggacaaccttcacgcgtctgggcttcggacacttgtcagcataatgtcctgggtctccatagttgaaacacaccacgggcttgctgctttgctccctcttggcaggttgttgctgtgctggagctgcaacaggacgtggagcttgattgcggatgttgttgccagcattgttgttgaagaactaacgcttcggacgaacaacagacgaagaacctccctgtggcatggactggggtcctaaagtaagacgcggcttctgattattcccctgttgtgtcttgaattgagcaatccggcgtttcttctgctccatgcgattgtacttgtcctcctgacgaatagccttatccactaacttctggaaatcatgataatctccagtcatgagtgggtaagaaagctcatcattaagtccttccaagaacttctcctggcgctcttcatcattgcgcacatcttccggagcataacgagccaaacgattgaactcgtgcaaatactccgtaacagagcgagatccctgggtgagcgacctgaattccttcttcttgagagacaccactcccgatggtatatgcgtcttccggaaagcagcggtgaattcaagccaagtgataggttccgcagtagtcctattcaggcggaaatgatcccaccattcagaggcagggccatgcaactgatgggatgcaaatgagaccttctcctgatcagtgcattgaagcaaatccaacttcttctctatggcatgcaaccaatcaccagcttcaacaggattagcggtgctagagaaagtaggcggccttacacgaagaaattctgctaacttgttctggggaggtgcatggttatttccttggttttgctggttctggagttgctgcatcatcatgttcattagctgtgtctgttgagcaagaacttgggcaagtgtgggattctctccattgttgttgttattggggttgttggggccattcccattgctgcgagtattcaccatctggtatgggcagggcacaagaagagaaaccgggggaaactacttaggacagagaattactttaacttttattgatcttaagtgagtttcattattacaaactgaagactctcacaccactaaactcaccaacttcctaacactcaaaagcaaacaaacgcatgcacttacatcccaccactgatgtaaatcacatgcaagacacacaaccaaacttaaaacaagcaaactaacacaacgatctaagacaacggttcgacaaggctttctaggtcttccgagcatcggagttgattgaaggctcgttcggctcgtcttcatcagcttgagttgctccccactcaatcttggaatgagtgcgcttcgattcttctccttcatcatcacttacattgacgactggaggatgatagcgatactccgtgtcggccaactgatcactgtagcgatcgcggagctctcctatggcgatccttgccacctcctgacatgcatggatgtagtttcttcctccagcttcgaacatcactgaggggatatcttcactattactgttcaaagtgactttgactcggcacttctcttcgtgacgatcatgagtaatctgggcataaaaaggggcagtcccaaatcctatggcaaaggacattgtacgcaactcctggacaaaaccctcaacaccaaacaggtactcaggcttgtagcgcggcatctaaagacaagtgaaaggagggagttaagacatttatccaattaatagcacaagtttttggattaatttgaataaagttagaaaatcaaagtaaaaggtaagtaaataaagtagaccaagcttgcaagataagttgaaatagttggaaacaaggttacaatttttgtacttttgaacaataggtttcaaaagaaataaaagaaagttataaaatcgacatactaaatttattttattgcagcaagattaaataaaacaacattgtaaaacttttgctggtaaatgagccattagtacagtaatagatgtacagtactaataacactggaataaattttgaatgagaaccattaaaagagattatgaagtgcatgtgccattagtttggtttaattaaaagagaaagggaggagaacagttctacttttccaatatttttagagggcttctatggataaccatttggcataacctagggtcaaggggctctgataccaacttgtcaggcccggaatttctatccaaaattccaaacgcttacatgtgtgtgaaccctcgtccaggaatcagccgaggcacacaataacaaattgatattagagtacaattattactctaattaataagcgaataaaatgtcattacagaggtagatagttcctctcaatcaataaagatctaagcagcggaaaataaaataaacggcgcggacggctccactccacaagcagcttgaccaaggctacacctaatcctccacaccatcagcatcattgtagaactcttcctctgatgaatgattgcaaggtgagtatatgacatactcagcaagccacgcagcaaatatgcaagtgcacaggataacaaaggatggcatagtagggtttcatttgcaaaagcagcatttagcaaacatttcagaatttaataaaacagttaagtaataattaaacaatattaatccaacgctatacaacataccctgttgtataggcccaaccattctgaacaaccatcctggctgcacagttctatctccaaaccaggaatataccattccaaaccaggagctaatcaaattattaccaattatagcatcatttactatgatgagaagtgtgagactaatcacgaaagacattgttagacctgcccataaccgcgggcacggctattcgaatagttttactctgatcagaggtgtaccactgtacccacaagacacaaccccacatcatgtcaccatgtgcctcaataccaccacggtacctcggaaaggagttgtgacaataccccttgcataacacaatccactgcagcgcaccttcctggatcataatcacccccttaaaaacaaggcatggactccccagcgacccccgtgggcttatctccgccacttctcagtctggtgccccgcaatgaaccatgctatacaaaagataaagccgttgcccacgctggcttgtggttggcacggttaatgtttcacaaccgaaactcgtgaaccggtccttaattgtcatgagcacgactctcaaaaccatgtgctcacaacccaccattatcaagttttagttggcaagtaattaattaaccaatcacgattgaccatcgtgaactatcattaagccatcattaaagaatagtgagtcataagttatcccaataatgtgctaatgtttctaagcatggctaagcaatcacatctaatatctagctgaaccaatatgtaaagctcaactagtcaagttataataacccaaggtatcaaggaataaagtaaccaaaaacaaaagggctataacaaagaataggttaattccacccaatgacattcgaaaataaatgcaatagttgaatagaaacaatagctttaaacgggatcaacatgctcaaagggttgtttgggatctgtgtgacttgccttgctggccttggaactcttcaaactcttctcctgtgaaaacggactctccggaaacgacggaatctaaacagaaaagagcaaaatcaccaaaacagcacataaacaagcatgaacagtacatgtggattttttaacatgtagatctcaattttagaaaaaattagagacttgaaccaactaaaacggagctaagatgaattagttatgaatttttgaagattaaatcggattaaaacacttaaattgattttaattgaattatgacgcaataatgaattatttttgaaaaggaaaaggaggattattgcgtcagcgggctagggtttcggtggaccgggcgcacgggcgacggttcacgcgaacggacggccgagatcgatccatccaaaacggacggccgagatcgatcgttctacgaccggctcacggaagagggcgacgatgacgtcagcgatgacgtcaccaccggcggcggcggctcggcggctcgggcttgcatgctcgccggcgaacggcggcgcttcggcacgaacggagagcaccaaagggtagagcgcgacgcggcgaactcaccgatgaccaaaggagcggcggaagaccaagggacggcgacggcgacgacgaagaaacggcggcggtcttcgggtcgacggcggcgatggtgctccggcgatcttcggcggcggcgaaggagcggacgagaacggcggcgacttggcgatcacgacggtggccttcccgagcgatgacgacgaccgagacggcggcggcgcacagctggagcgacggcggcgacggcggcgctaggttgcacagcgctagagctcttccggcgacaagaggcgaaggcgagagtggcggcaggtagagaagagctcgggggtccttttaaaggggctaggaggcgacggcgaaggcccatggcggctggcgacgagaaggaaggtttagggttcggaggagagagacgaatccgattcgaactcgaatcaaacacattccaaaccgatttagccgatgtttccaaaggagaaaaggtagaggagatcccaaagattgtttcccctcaatcaatttcaccggaaacgaaaaggaatggccggattttggaaaggaacggcggcggcgcgaaactagggtgggccccacctgtcagcgggcggacgcgcgcgcgcgcgacggcggactgggccgacttgggccgaggagagagagagcggttttgggccgactttcggcccaaagccaaaagaagactttttaaaacctttttcaatttaaattattcatgaaatgcaattccatttattaaaaatacttccttagctcaaataaatcccagaaaaatctaggaattatagaattaagcaaagtatttaatgaaattttatctggccccattttatattggaatttattaattaaaattagatcttctcttcaagacttttaaaattatttctaaaaattccaattaaacaacaatttatatattttgaattttcagggtgtgacagtagtcttgtgtgtttgctgtgaaattgacaggcttcacaccgctgaaccatgtcgcaggcgtctttgagcgcggttggccagaaaaacccttgtcgaaaggcttttccgaccaatgtctgaccgccggcgtgtgacccgcagatcccttcatgtatatccaggaggagatgtttgccatcgtcgaacgatatgcatttgagaagtactccgtttggcgcctttttgtatagatcgttgctgatcatacagtaaatcttggcttgtcgggttatcctctcagcttctgcgtcgtcctcgggcagctcatcactactcaggaacttgatgagcggggtccaccattcttatgtggtctcgatgtcggcaatgacgtgttccgcctctgtagcccccgagatgatgtctggggaacagccgtgctatctgcgtcatttgcttctttcaccgatggttttgtcaagacgtccagaaaagtgccaagttccagtggctctcgtctggatgcgtgccgtgctaggtcgtctagttcgatgttgtgcttacggtatacgtgtcggacctcaatcccatcaaaccttttctccagcttcctgacttccgcgaggtacttggataactcggggctagagcacttgtagtctttgtgcacctggttcgcgactagttctgaatcccctttcacgattagttgcttgactcctagtgcagctgctgctcttatcccggcaagtagtccttcatactcggctgtgttgttggtcgccctgaagttgaggtggattgcatgcttgaactgatctcacaaaggtgatgtcaagatgaaccctgcccctgctccttggctgttgagtgcgccgtcgaatgccattgtccatgtttcgctgtccgtttgactgtccgacctgttctcaagcatagtccagtcagctaaaaaatcagcgaggacctgggacttaatagctgttcgtggcacaaagtggacatcaaactggcttagctcgactacccatttcgcaatgcggccaacaacgtctttgtttctcacgactctccaagagggaaggaggaaacaactgtgactctgtgggcttgaaagtagtggcgtagctttcttgatgtcatgattaccgcataaagcagcttttggatctgtgggtatcttgttttcgcgtcgtggagagctgcgctgacgtagtaaaccagtctttgcaccttcgctctctcgacaatgatgatagtactctcagaatatggcgtggcagcgatatagaggaataactcttcattaggttggggggcaacaagtacagggggatctgacaggtagcgcttgagtgcaatgaacgcatcttcggcttcctgtgtccacacaaatttgtcttgtttcttcagcagggtgaagaaaggttgtcctcgctcccccatcctagcgacgaatctgctcagtgccgccatgcatccagttagcttctggacttccttgagtcttgtgggtgacttcatgttctcgattgccttgatcttctcgggattttcttcgatccctcttccagagacgaggaatccgaggagcttgcccgatggtactccgaacgttcacttctccgggttgagcatgaggcgataccgtcggaggttgtcgaacgtttcccggaggtcatcgatcaatgagtcgcttgtttttgtcttgaaaacaatgtcatcgacgtaggcctcaacattgtgtccaagtaggtcattgagtgccccttgaaccgtgcgctggaaagtgtttcctgcggttatcagtccgaatggcatcttgacgtagcagaatacgccgaacggcgtgattaatgttgtcttctcctcgtcctcttttgccatgctgatctggtggtagccagagtaagcgtcaagaaaacttaacaactcacaaccagctgttgagtccaccaattggtctatccgaggaagaggaaagtgatccttgggacacgccttgttgaggtcggtgaaatcgacacacatcctccatttcccgttggccttgcgcaccatgactgggttggctagccactctggatgaagaacttctctgatgaaactagctttgagaagcttgtcgagctcttctcgtatggcttgtttctagtctggtgcaaatctccgcagtttttgttttactggcttggcatcgggtcgcaccatgagtttgtgctcaatcacctcgctggggactcccggcatgtcggacggctgccaagcgaacacgtctgcattgtcgcagaggaaggtgatgagcgcgagttcctatttcttatccagtgacggcccgatcttgacattcttgtcggggttggcactggagagcggaacgatcttgattgcgccgtctggcttcggcgttttgttggtttttcttactttcttgggcggctcagttgtggcgggcgggttgggagtgtgctcgaccatgtcgaggctccgcttgtcgcactgcactaccagcttcgtgtttccctgaatagtaattgttcccttcggcccaggcatcttgagcacttgatgcgcgtagtgagatgcagccatgaacttcgcgagtgcattcctcccgatgatggcgttatatgttgtgtcaaactcagcaacatcaaaggtgatctgctctgttcggaagttatttgcttggccgaaagtcacaggtagcgtgatcttgcccaacggcttggacgatgactgaggagtaattccatggaaggtttgatcagtgggcgtcaactcgcttcgtgggatccccatcgcgtccaaggtgctggcgaagagtaggtcgatggagctgccgccgtcgatgagaacccatgcgaccttgatgttccgaatagtgggctcgaccacgatcggatatcgtcctggagtgacaggagtcttggggtggtctgcctctaagaattcgatcttctgctacgccgtggaacctccgaagatgttcgaaacatgaaggtcggagtctaggttggctgagtctgagtcctgagtagccgcttctgcggcgttctcgactacacgtactcgcttgcctttctccaacgctagttgctttgtgagtgcatttttgaagacgaaacaagtctccagagagtgcttgtctgacttgtgtatgggacaccatattttcttcgtgtcatcgccttgtgggtccgggtgtttgggtgggtcagcatattctgctgtgaggacctccgtttgagccttccgtttcccactcctgcgactctttttcttgcttgactcaggcgtgtccttggctggtttattctctctccctgtcttcagtttgtcattcttgcgcctcaaggcgtcatccacgtgagcgcatcgatcgacaatctcgaataacttgcgagcagttgtgatccgtcttgtcgccagttcctgggttgtgtagcgatctcggacaccagacttaaaagcgcggattatagaagcatcggtgatcttggggatcgtatttctgcactcattaaagcgccgaataaagtccctcaatgattcacccgaattctgcgtcaacgcgtgttagtcgtcctcgatcgcgtggcgcttgtatgttccttggaagttagtgacgaactgctgccacagatctgcccatgaagaaatcgagtaggacgggaggtgaactagccatgaacgtgcagatcccttcaatgccgccgacaaataatttaccaatgcgttgtcgtctactccggcaacgtagagtactgtggaatagacctgtagaaactcctcagggtcggtgcttccgtcgtatttctctatcgctcccggtcgaaatttctcaggccatcgaacatctcgtagagaacgagtgaaagctctgcacccgccgccaggggcggtgggttgtcgacgatcatgtgctcgtcgtggatgtctgtccgatgatgaagatgacgaagatgacgaggatgatgacgagccacttggttccggggcagggttctgaggacgacgctcgggttcttgcgagcctcgtcgtcgtccatcgttgttttctcggcgtcgatctccatcgtcgtcgtcgtcgcggcgtcgacctcgacttgtatcgcccggcagccgctgctcgtgattagcatgttctcgacggttgtggcgatcatcacggtctcggtcctcgctcggacgtcctccttgctcttcgttctcgcgatgtcgcgaagagacgcgatgtcgggaacggttttcattatcttgagtgcgtcgtgcttctcggcagccattcagatggtcacggaaatcactgttgccgtgaggtggagggtagcttgacgaggcggagtccgctattcaggtaattctccgttagcatcgccgatcggcggttgttttggcggtaccctggtagcggcctcctcgaacgcgttattgagattaatcactgattcccatagtcgttccgccctgttaacgaccaaatttggtaatctgagtatcaaagataaagatcagatcgaagcggaatctaaatccaagattgtttcggaaacagagcaagaatcggctgaagtccgaatcggctgtgatcaggatcggcagagtccaagttggacagggttagccgattgagctggatccgacaatatgacgaagaatacgttgtcaggttgagttaataagcttcatgatgattgccacgcatggatagagtcctgagaaggcaattgtatctattaattaggatattttatgtaatttccttagagatatgtttgggcaaaagtctgccgcaaagacttatggtatcttagagtttgttagagataagtgtcgtgtccgatatggacatattttgtaatctcggatataaatagaccccgaaccccatgtaatcaacaacacacgttcaatacaacctcggcgcatcgccacccttttacttttgttttgtttcgacgagttcttgctttcgggttgagctgcatcagtttcgatcttcaacaagaggtaaaacttgttatggcggcttgcgttctcaggattagtgcttccatctttatgatactctaatcttgtttatgtaattcgtcgagttatcatatatcttatataatctctgacaatatcgctatctaatctccaatcggctaacgtttgttaccagaaggcagccgattaggttaaataccgacgttgacttagattatataagatatctaccactctatgaaacatccaacggcttgattgtctagatattgtccttcttttcatacttatagctgtatcagttgagtttgatcttataagtcgtgattagaatcctaatctctagcctgcttttggttgccgattagggtagcatcggggtttcagccgatcttaccttatttttatgcttgattgacatgttaaatatgccctttatgttaagatcttgtcgcatttaagtatattaggctgtttgtttggtatattctacttgccttaatatcttaatatagagtggtaccggagtattagccgatacatgctagatctatctgatcggctatgctatgaacatatatggtctcgttgttaatatatatttcgatctaagtgatttatactgtctcggcatggcgaccgatctatcccaatcacttgacttaagtatatatcgacataaggattatatattgttaatatctacagctgatcgagtagatttagttctttcttacatattaataactgccgatcgatgcacatatgacatcggctcaaagataaatgatatgtcatcggcaactagccgatcggctatcatttatagatttaaccgcggtttctttgtctttatttcttattgattgcaggatcaaatcaactggcatgctcatacatctaaagacaagcttttagacctgcactggagttaagcagatctcctaggcctcgtgtttttacatcaacacgcccactgatcgagatcagcgttcaggacaggatcaaaaggggtttccctcagtatcgcgttgagggttctgatgtgttgggctggtgtaatcaattgatcttccgtttctgcgccgcctctagatgtgctggtcccatcgatagcgtacacgtcgcgtggtgtacttgttgatgatgaggcttggtcttcgagcagatgtaggacatatggctcgaggggatcgatatcgattgccccgatgagtcgatctgaaatagtcgccgctccttgttccttgtccgcatctctagaagagattcgtgactgctggaccttaggaggtgacgtcctcatggcgctgagaaggaccttgcagcttgagaggtcgtgagtctttgccttgtgaatgggacaatagacatcacgagttggagaagtacattgaattccacgctctttgcaggcacggatttcagcttgtacgtcgaagaaaaccgaacaagcttgcaaggtgtgccttctggtcttgtggataggacaccaggtccttgtcgcctcggaagttatccttgttggctcatgcttcttatcaggaggacaagatttggccgcgttaggatccttctcaggcccagatgttgtcgatgttccgttctctgcttctgcgggaggatctttcgacatagagtcgaccggggtcgtaaccacgccgttctcgctcccggtaattgatgggccagtcgagatcggcatcgtggtgtagaccgggaagacaatttcgtcgacttgagtccacaccagcatcgttgaagttgaagctccttggttgatgccggggttgacgctatcgtcgagaaggcttgaagtcatagtagtagaaccttgagcaccaagtttccctacctggcgcgccactgtcgacgggggatacccgtagaccggatatagagggtattggggtccgttggtacgaggatctacgtaatacgacatcaagcaagtagaagacaaggattatactagttcaggccccttagtaggtaatagcccttgtcggtgacatggggctgggggtatcgtgactagaggcttgggtagccgcggtcacccacgtggcctgaccccctcgggggggtcgggcccgaggatgacatggccacccctccctctatctccccgatgggtcggaccgctcctgtttcggccccgagggatgggcgccccgaccccctgtggttttggcgccacgtgtgtgggttaggtgagcgcagcggggctcacctaaccgcatttatagtaggttggacgagtgcaccacgccgcatttaatgcggcgcagcgcacgcttatccggtccgtgaccggtcgcggtgtgtgaccggtcacagaccggtcagatcgcgggttaggtggcaacaggcggcctatcacacgcctcgccccgtcccgtcggaatgatgagagcttcctggctctcgtccctagccggagctggcgtgctaactcctggagttggtatgtcagtcccggtcagatccattccaggcttcagcgcaagtatggcaaggaagtcgctggccattaaatgaaggttgaaatggacgtccaccgggaaggcaggcgagcggggcaggaggcgtgtgctctgcttgtcagacgttacttccggctgtagactagccctcattgtaaaaagcatgtttcccttcttaggcagggaggggcccatgtggtgacccgggaccagagaaaaaggaggcccaggcctaggagaaaaaaggagggaaggagggggaatgggcgggagagcctgaactctctctcgctctccggctctctggattccttcacgcacagatccaccagaacacaggagtagggtgttacgcttctcagcggcccgaacctatctacgtcgcccgtgtcttgtgcatttcctctctcgctgacgttcttcagatcgagggcgaagaacctcacttagtgcccccggccgaaccggcaaaggggggcctgcgcggtctcccggtgaggagccccacgctccatcatctggcgcgccaggtagggggcgcgcgtgtctttctaagccctcgtcctctttcgtatgcgccaagcttctccggctcagcccaatggccgaacgggcagtggcgcacagcctctctccgaacgctagcggtgacgacgaggagcagaacccgtgccgtcgggctcgcaccccaccgtccccctctcgccgaaatcttgggcggggggaagcgctcggggaggtcgaaggatccgcgacttcgcctcccgcgggcgacgggggaggacggcgagacggggcgcgtcgccgcctcgtctacgacgatggcggcacgccccagggcgcgctccaggctgcgggcgcgctcctgcgtcacccgcccatcgtccccgatccagagactccagcccgacgttggctggatgacgtggccgacttggtcatgacggcgcagcagcgcctaagcgcctgcgggcggtcctccgccaccgaggcctctggcgcagccgccgccggctccatgtcgtcgaggcagagggcgcggcgagcggcggccgttacccgccgttcgtccgccattccctcgccaacgcctccgacccaagaagatgtgtgtggggggccggatgcccgcctcgatatcgagcgccggcgcgacgctcgtcgcgccgcccacgcaacggagggcgcttcctcgtccggagcgccacttcggtccgggcacgggggccggccccccgtgtccccggttggtggtgccggctgtcgagcctttgtggcgagccttcggaacgtccgttggcccccaaggttccggcccaccatcaccgaaaaatacgacggaagcgtcaaccccgccgagtttctccagatctacacgaccgggatcgaggccgccgggggtgacgacagggtcatggcgaatttcttccccatggccctgaagggtcaggcgcggggttggctaatgaacttgccacccgcgtcggtctactcttgggaggatttgtgccagcagttcaccacgaacttccagggcatatatccgcacccaggcgaagaagcggacttgcatgcggtacagcgaagggacgatgagtctcttcgctcgtacattcagcggttctgtcaagtccgcaacaccataccctgcattcccgcacacgcggtgatctacgctttcagggggggcgtgcggcacaaccgcatgctcgagaagatcgcctccaaggagccccagaccaccgcgcagctttttgagctcgcggaccgtgtggctcgcaaggaggaggcctggacctggaactcctccggttctggtgtggcagctccggccgcccctgggtccgccgctcggtcagggcggcgggacaggaggaggaagaaggggtcggcccgttccgacgacgagggtcatgtcctcgccgtcgagggcgcttcgcgggccccccgaaaggggaggcctgcgagcgacaaaaagaaggaggccggcgctcccagcagggagcgcccgaccggcaagtggtgtaccgtgcacaacacctccctccacgacctcgcggactgccgcgcggtcaaaagtttggctgagcggacgaggaagtgggaggaggagaagaggcaggagtgccgtgagggcaagaccccggcggctcccgccggcaaccggcgaggtgaggccaagcagaaggccaccgccgaggacattgacgatggcgacgatgacctggggttccaggagcctgaggccaccgtcgccaccgtcgatgggggagcgtgcgctcacgcttctcgccggagcctcaaggccatgaagcgagagctcctggccgcggcccctacccatgaggcgacgcggcgggcgcggtagtcggaggttgccctcaccttcgaccacaccgaccacccgccgtgcgttgcccggggaggacagatcgcgatggtggtttcccccaccgtttgcaatgtgaagttggggcgtgtcctcatagatgggggtgcagccctcaacatcctttcccccgcagcctttgacgccatcaaggccccggggatggtgctccggccgtcccagccgatcatcggtgtgacgccggggcacacctggccgctgggtcatatcgacctcccggtcaccttcggtggttccgccaacttccgcacggagcgggtggacttcgatgtggcggacctcagtctgccctacaacgcggtcctggggaggcccacgttggtgaagttcatggcggcggtccactacgcctatctccagatgaagatgccgggccctggtggccccatcaccgtccatggcgacctcaaagtcgcgcttgcttgtatggagcagcgcgcggaccacctcgccgcggcgtccaagcccgcgggtggcgacgagaggctcgccacctccgtcccggccgccccaaggcagcggatggtcacgtgcgacgaggtcccggtcaaggaggttgccctgggcgacggcccgtccaagaccacacgaatcggtggtcttctggacgacaaataggaagacgcgctcgtctccttcctgcgggcaaacgccgacgtcttcgcttggagaccggcggacatgcccggagtccccagggaggtgattgagcaccgtctcgccgtgcggtcgggcgcaaggccggtctggcagaaagtgcggcggcaggccccggaacgtcaagccttcatccgcgaggaggtagcgcgacttctggaggtcggtttcatccgtgaggtcatccatccggagtggctggcgaacccggtcgtcgttcccaaggcgaacggcaagcttcggatgtgcatcgactacaccgaccttaacaaggcatgtcctaaggacccttaccccctgccacgcatagatcagattgtcgactccaccgcggggtgcgaccttttgtgttttctagatgcatactctggttatcatcagattcgcatggctagggaggatgaggaaaaaactgcattcattacccccataggaacttattgttatacgacaatgcctttcgggttaaagaatgcaggtcctacttttcaacgtactactcgaatttctttgggtagccagataggacgcaatgttgaggcctatgttgatgacttggttgtgaagacgcgcaaccaagagaccttactctcggatctagcggaaactttcgaaagtctccgctccgcccgcataaagctgaaccccgataagtgcgtgttcggcgtgcctgcaggcaagcttctcgggttcttggtctctgcccgaggcatcgaggccaaccccgagaagatacgagctatagagcggatgcgcccccccagcaagcttagggatgtgcagtgcgtcaccggctgcatggccgccctaagtcggttcatatcgaggctgggagagaaggcactacccctatttaagctcctcaaacgctccgggccgtttacctggatggaggaggctgagcgggccttcactcagttgaaggcgtacctcagttctcccccagtcctggtcgccccggagccagatgagccgttgctactctacctggcggcaaccccgcaggtggtcagcgcggcgttggtcgtggagcgcgacgaggaaaaccctcactccgcgcatccccaccctgcgtcgactcgacccgggagagagcagggaggagaggcccccgagccgaacggcggcccaaggcccccgacggccggagctggccctccgcctgcttgtccgatggtgccaggcgcccccgacccccaggatggccccggggccactgcgggaaggccgcgcctgtcgccctctgacctcgaggtcgtcggcacagaagccgagtgcgccccgcgtggcctctcggacgaagagcgccctggagatgcggcccctggcgaagaggatcggccccgccgaaaggtgcagcggcccgtctacttcgttagcgaggccctccgggacgccaagacccgataccctcaggcccagaagatgctttacgctattctgatggcttcgaggaagttgcgccattatttccaggcgcatcgggtcacggtggttacgtcttaccccctcggccaaatcttgcataaccgagagggtattggacgggtggtgagatgggcaatcgaactctctgaattcgatttgcgctttgaaccacgccacgcgatcaagagccaggccctcgccgactttgtggcggagtggagcccagctcccgagcccgtctccgcccccgaggccagctcgggcccctcgcagctgcctcacaccgcctactgggtgatgcagttcgacggctccctgtctcttcagggcgccggtgcgggggtcacgttgacctcgccgagcggagacgtcctcagatacctggtccgcctcgactttcgggcgaccaacaatatggcggagtacgagggactccttgcgggactcagagtggcagctggactggggatccgccgcctcctggtgttaggcgactcccagttggtcgttaaccaggtctgtaaggagtaccagtgctctgacccgcagatggacgcttacgtgcgccaggtgcggcgtatggagcgccatttcgacgggatagagcttcggcacgtgcccagacgggataacgcggtcgccgacgaactcttaaggctcgcttcctcgcgagcccagaccccaccgggcgcctttgaagaaaggcttgcccagccatcggcgcgacccgaccccctaggggagacggacgcgcctgaacggcccccgaggcccgtcggagtccaggcctcgggacccgaggggagcgctcccagctcccctagattgattgcttggatcactgagatccagggcgtacctcgcagataagactctacccgagccccccaaagggagtgaacgcgtccggcgcatctccaagcgttacgtgttggtgaaagggcccctctatcggcgcgtggctaaggaagtcctcttgaagtgcattcctcggaacaaaggggttgagcttctcgccgatgtccatgaaggcgagtggggagcccattccgcttcacgcaccttggttggcaaggcctttcgccagggtttctattggccgatggctctcaacgatgcggtcgacctggtccgacggtgcagggcgtgccagttccacgccaggcaaacccatcagccggcccaggccctgcagaccatacctctttcgtggccgtttgctgtcagggggctcgatatcctgggtccgttcaggcgggccccgggcgggttcgagtatctgtatgtcgctgtcgacaagttcactaagtggcccgaggcttatccggtcatcaagatcgataagcactccgcgcttaaattcatcaggggcatcactgctcggtttggggtgcctaaccgtatcattacggataacggcacccagttcactagtgagctcttcgcctcccccgcccaccccagaagcaatggccaagtgaagcgcgccaacgcggaaatcctcaagggcctcaaaaccaagaccttcaacgtcctcaagaagcacggcgactcgtggatcgaggagctgccagcggtgctctgggcgaaccgaaccacgccaagcagagcaaccggggaaacgcatttcttcctcgtctacggcgcggaagcggtcctcccatctgagctcaccctgaggtcccctcgggtcaccatgtattgcgaggctgatagatcagcttcgccgagacaacctcgactatt

SEQ ID NO: 23846 - DNA, 991 bp, Oryza sativa
cctgcagcccgaaggaccgcggcacagaccatcctcgtctcgcacacacaacaaactgaactgacgcagaaatttcctctttacttgattgcagattaaatcagtctatacaagaagggggcccgaaggcctcggaagaagaaggaaaagttattaagattggcgggggcctgggggctcactccgacgcgcccgggtcgccggcctcgtcgtcgctgtcgtccgcactgtcgtcaccgccctcctcgtcggagtcgagcgcgaacgcgagccgaggggccgtaccctcgaagctgtggacgatgtggtcgacggcgtcccggacctgcgcgcgcgcgccgtcctcggttccgggagggaactcttccagtgctgcccacggggagaagtcagggtccctggcctggtagcttgccagtacgagctccaccgccccccgggcgaggtccctcgaggatgacttgatcgtctcctcgagctcctcggggagccgctcgagggccccggccatctctgagaggcgctgggcgaggcccccctggttggcggcgtacttcgcgtaccgcccgccccagaggcccgcctgccgcccggcgcggtctagacgggagacggcgtcccgaagcatgccgggccctacctcgctcgccaagcggagggcctcgacctccccggcggacgagtccagcgcgccctgcagctcagcgatggtgtgttcggcggctgcgaggcgggcggctaggtcgccgtggcccgcggccgccccgccgctgtgcgctctcgcgtccagctccttcgcccgcgcctcgagctcagcggcccgctgatccagtgcggccctctcggcgcgggcgccttccagattgcggcgcgcctgctcctcccgcgctgcctcgcggaggaacaggctgtccgctagccactgcgccgcggcctcggcctcctcgagagctcgcccccgctcggtgagcgcgtcctcgcggaggcggag

SEQ ID NO: 23847 - DNA, 2828 bp, Oryza sativa
gccaggtccctacgacgggcctcgagctgtgaggcgtgccggcggtgtgccttgcggcccgcctccaccatggcctccaccgagcgccgcccctcctcgacgcgcgcccacgccgcgtcgagctccgcccgctcctcctgcagggcctccatctgggcacttaacccgtccagcaccgtgctgttcgcggcggccaaggcctgcaggaggggctccgcgctcagtggggcagcggaagacagaggggagagccgcctcggtatgggtgccgcgcggctcggcccgccgattgacgtgccggactcgggggcgtcccccgaagctggctcgtcccaagcgtcacccgaggggtcgggcccgagcggcgcgcccgcagcctcgtcgtggttggcctcggaaatcgtcatcgcctcgggcggagtcgggtcgggggtgtggcaggctgcctggcgtgcgcgcgccgcctctgcctcccggacggactccccggcccggcggagtctggcctcctcccgagcggcctcctcagcctggcgaacccggacggcctcctgggcagcctcctcagcttcccggaggcggtccgcggcttcccgccggtcagcttcccgcctccgggcctccgcggtcgccgtctcctcggcctcagaccggccggacttggaatggcgggggggcgcgacgggatctcactgaggcagaagaaaaaccagaagacaaaaagaaacgggtgagtgaaaactcgccttgggagatgggagaatgaatacggccgcggtgggcgcggggacgaacctgcggggaggtcggctaaacgaccacctcggcggcgagatgaggttcccccggcatggcacgatcccccccatcttgcggggccgtttcttctttcgctccccctcgggctgcggcgtcggcacggcaccctccgggcgcctgctgctggcacgcaccgccccgccccctcggggaggagatgggggaggggtaccctcctgcttcctcttcccccgggcgtcggcagggcggctgccccccgggcccccgtcgcggggcccagaagcacgaccccctcccggggtagattgttcccccctgcggctcccgcccacgccatcgtggcctcggggggcccgctcccccgacgccccgaccgcctgcatgatggccagaatcttggcgcgctctggatcgcagcagagggggaggaccccttgagggatgagggatgcctccacggagctgagattcagcacccgttggaccaccatcctgaagtcctcagggtcccagtcccatttgcgcccctggtgggtcctcatgtagtcctcgggcccggtgtactcccaggcgcctcgggcgcgccgctggagcggcgcgatccggcgacgaacgtagtcgccgaacaccatggcccccgtgagcccctgggatcgcagacccgccaggcggtcaagaacggcgtcgtagccgtctcccagatctaccgccgcccgccagctggaggcctgcgccgggggctggctcggaagtcggaggtgcgcttcgtcggcgagggggtgtagaaccaatcgctcttccagtcgtcccactttttgcggaggacgtagggaatgtagcggttcagcacctgcccccgcggctggaagtagcagccaccgactaccgtcggcggcgacaccggctgtacggtgaagaaccaccggaacagccggagaaatgggcgcaccccgataaacatctcgcacaggtgcgcgaagatggccaacgtcattatcgcgttgggggtgaggtgcgccatctggagatcataaaactccagaatatccatgaaaaaaatagagaatggcgggaccagccccgccattgcgaaagagaggaagaagacggaccgccccgggtagtgtggcgccgggcgtccctcgcccagcgcgaccacctcccggccggtggcagattccggcatgaatcggcgcggcagcctggcctgcctctcgctcacgatgcgggaaggcggcagcacgctaccgtcgagcggtgcggagccccgtgccatgacgccggcggaggaggagcttgagagcgagcgagtgcggcaagggtagggcacaggaaacgaagagttagagcacaagtggcgaaggcaaggggaagagtggcgagaggaaagaaacgaatccctttctcggcgtctttacacccttgccaacgctatgcccggctcctcgcttcccgtgcccactacctcgccccctcgtttctcgcgcccacgcctccactaaccccactcgcccgtttgcggcgcacgcggcaaatgtgcggccgtggcggttgagatggggcagattgtgcgcgcattaactacggttgccaaccgtgaaaagcgccatcatcatgtctccaggcgaaacgaaccggctcatcccgattcgcgcgctgctcgagtaatgtagcggtcttaaagaggccgctcattattgtcggtcggttttcccttgccgatgcgcgcgatttgcgaccgctgggtttctgtccgcctgtagggaccggccccacctgtcaccgggcctaaggagtggcgtcacgcccgagcgcttccctcgaggggggcgatcgccctggcgtaacgccgggggctactgtcggtgacatggggccggaggtatcgtgactagaggcttgggtagccgcggtcacccacttggcctgaccccctcgggggggtcgggcccgaggatgacgtggccacccctccctctgtctccccgaggggtcggaccgctcccgtttcggccccgagggctggggcgccccgaccccctgtggtt

SEQ ID NO: 23848 - DNA, 3025 bp, Oryza sativa
aaaaaggaggcccaggcctaggagaaaaaaggagggaaggagggggaatgggcgggagagcctgaactctctctcgctctccggctctctggattccttcacgcacagatccaccagaacacaggagtagggtgttacgcttctcagcggcccgaacctgtctacgtcgctcgtgtcttgtgcatttcctctctcgctgacgttcttcagatcaagggcgaagaacctcacgtagcgcccccggccgaaccggcaaaggggggcctgcgcggtctcccggtgaggagccccacgctccgtcagccctaatccagttggtatgggattatatgatggacaccacagattacaaagggaataacagaactcgatgataccgacgagaccatagtcgagttggtccgactagatctcccggcgacttgactcctgtaggctccggctccgtaggctgtgatgggtgtgttggcggtgagattcgatgccttaggtcccgcccagggggtcccttatataccgcaggtcagttgatctccaagtaggactcggagatatcggagtcctcacgatatggtaaaaacccagcctcatccaagtaggactccttccaaacgtagattctgcttctatcgcgggatagatttccttaatgtattcggaaactattcgtacacgcgcgggtataccgtatcggtacccatcgtatatccgaggatagacggtataccttatccataaccctgacaaactctgtatatatctatgattatacatggtagcaaactaaaataataaaataataaagctgcactaaaataataagtgttcttttaaaataataaagatgcacattgaaacattagaaactcatataaaaagcgttcgaattgcagaagtggtgtgtgaatataaattttcccttccgctcacagaagaatagaaaaaaaagaaaaagttattaattgaaatctctattttattataaaaattaaagatgtttttacctgtactttagtaaatcatccgtctatgagtcgatttttaagttggttcgcttttgaaaatacaaatccgtattttagttagttttcaagctcgttcgtttttggaaatacaaatgaagtcgtataagaaatcttttaaaaaaaaacttacatgctaacttgacacgatcaaactcctaattacagcttataattttctaaaaagatatatatatatatatatatcctatttctataataaattttactttacctaagctaataataaaattaaaatagctttcacccacgggcgggacattttttctaaggaaaagagaggaaaaggcaacccctttcctcgcgcgcgaccgctggctggcggcggagccgacctcacctcgccggagtttaatcccccctccattcttcctcgtcctgattgccaacgacggcggagagctcgccggtgcccgacgtaccgacggctcgatcagtccttcccatcctctgttagcctcgcgtgacgcccgcctgcggtggggggaagaacctcgccgtcgcacgcgatggcggggacgccacccgatggcggaggagataggccgtgggagtcgtaccacaccgcctacaccaacgccaaagctggtgagtgtgcatttcccctcttcccgtcgcgtaagattgttgccagtagggggtagggttttgggcattagggggtctgcatcgcgcaaatcactggtacaaataaatccaaaagattaaggtagagagaacacgaattagatggagctttacttaggaagttatattacatgtttaggtgaatatgtgatatctgtggaaacaacatggaaccccagtgtgcaaagcatggctttggtctttattctcttgttattctgccttaggaatggagggagttgacaaagagaaggtgcagaaggtaatctacgaaatgagcaagggttcaaaatattttgaaaatgaacagaggaaagaggcaattaccaaacaaaaaatcgaccatctgcgtgcacaatgtgcaaagctgactgacaatgacatatcacattttcagaaggtaaagagtatttttttttaatgctggcctttgtctgtcgggtgctactttgttaattttaatgccatatttgaatcctaatttttgcagcatgcttaattttcaggtcgccgaacataaaattttggagctggaagcttcacgggatctttcaaagatatggcttcacaccgacatggatgccttttatgctactgtcgagatattggaaaatccatccttgaagggaaaaccattggcagtgggtagcatgtctatgatagctactgccagttatgaggttagcatactaggatttatgacatcttgacatgtgtaaggaattttttaatcactaaatagtgttggtgctattgtataccattttgttttggtccctattgaaatgattactgaagaatcgctgatcatgttgtgtaaaattagctttctttaagcattgtagactggatggacctgagttggtgttgcaatttatttatttattgaaagcacaatcaacatcccctgctatatagtgtagtacgtaatcaatttacttattcaggcacggaagtttggagttcgtgcagcaatgcctggttttattggctgtaaattatgtcctgagttggtttttgtccgtccaaattttgagagatacacttattatagtgaattgacaagaaaaggtttgtacattattactgtttattgaattaccatgaaatttttttagcgtatcgtaattgtattaatttatcgcttactttgtagttttccaaaggtacgatcccaactttgttgcaacaagcctagatgaagcatatctcaatattacaaaagtctgcttcgatagaggcattactggtgaggaggtaattatcatgacttcctggtgaattacttatgactaatgaaataaatatggtttgatttgtatttgatggcttacattatttttctacaatccagt

SEQ ID NO: 23849 - DNA, 22574 bp, Oryza sativa
  unsure (1)..(22574): unsure at all n locations
cccatattcttgtctttttgctaggtttgctctgatatcaacaagcctaatggacagttcattttgccgaatgaccaagaagctgtgacaacatttgtatcaacactacctataagaaaggtactcctgtttttagtagtgaagaatggaccttgtttctagaagtattttgttgttctaatagttcttgtttccttcatatatatatattcattcgtacattgttaaaccactaaatattctaaccagtgcgcatattctttccacagtagtccttcaaaacaatagcatttgggcattccccatttatggacaccactttttacttctttaattgagatggagttttctttactactaagtgctttgcctctttggacattcatgaaaaaggtgaaggctgattttttatttgaagatctttgtatgcagataggtggtataggcaaagtaacagaacaaatgttacgtcaggttcttggtatcagtacatgccaggagatgctgcaaaaggcttctttcttatgtgctcttttttctgaatcctcagctggttcgtatgttagtaacacttgttagttccattgcaagttttcagaagctatattatacctatcccaagcagacaccacaattcaatttcttgaaccaaacaccattctgtgcctgcttaatttgatcctttggacgttctccagatttctttatttcggttggtcttggactaggcggtactgaaactcctgagcaaagactaaggaaaagtataagttgcgagcgaactttcagggcaacagatgattgttctatgcttttcgagaaattaggtaaacatccttactaagttattgttctagctatgaggcctgttgattgtagatttcaaaccttgaagctactttgaaatttcatatgctattgttactaagtaactaggttgtcttacagaagagacttgcaatcttattcgaacagaagcatttttcctattttaatggtatatttgtcaataggccaagagcatattattttgcgcaataatttgagacacgtcatgattattcgagagcttgagtagaaagtagttgtttgaaattagtcaattatgctgcaacaagctgtttacatttgatgaggaaatataatttctggtgagtggtagttttggttgggatagcaaactatgcaaggtggaacttgttaggcagctttgactgcatacctgagatctggtgttcaatcttgatagtgctggggaccactggtccgggattgaaggatcccaacgctctatgaatatgagctatttcatgtgtcaattattctacatttctacatatgagatactagaagccaagttgactggaaacaggcaactaaccagggtttggtatttcagaattctgaaatcttaaattttggataaggtacagaaaaaaaaaagagtattatcagaacatgtgtgtgtacataggaaaagaactggtgccactataactatgtgtgtttgatatgataaattcctaaagtaactgcaaaaataatatacttgtatgtaaagcatttaaatgcgttaaaagattatgtaatgattttcaggccttaccacatgctatgtgctaaatctgtaaatgtttctccatgcgtgactcacacccaccatattattatttatttgcagatagtctcgcagacaatttggccgatgatatgcaaaaagaatgcctgaagggaaggacactaacactcaaactaaagactgccgcttttgaggttttcatcttccatttgtataacattaactagtctccagtaattataggacttagatcaccaggagtttttgttcatggctcattagattgatcaaccatctaaaccaggtcaggacaagagcagtaaccacacaaaactatatcaactccaaggaagacatcctgatctacgctaggaaattgcttaaggctgaactgcctctttctttgagattgatgggtaagcatgagcttccatagtatttgatactgttattggatgatgcccaagttgatctagctgtgttgacagcgtaggcatgtgattatgccatggtgcatgcttcttttttgaccttatctggaatgtaatgaacataaaagacatggggcaggagttttctttgagcagtatatggattaatgttgtgctccttaaaattagcgaatgaattctcctcctttgatgcattaggtagagttcctgccctttttttattaaaaaaataatataaaaggcacactatgtactgatttttattttactatgttcatatttttgatgtatctggatgtattgcattttatatattttttaatatgtttgctcttgtttcccaatggagtgagtaacagtcatgccaatacaattcaacagggttgcggatgtcccaacttcgcgatgagaaggatgattcatctacccaaacccaaaagacactagatagatttttccgcacgcctgacaactcaaatgtcattggagcaaacagtccaagcatcggtaataccacaggaggggataactattgcactaatgtgatgaccaaggtcgattatttagagcatgattccatggatgatcaggcattgtttttgcatgaaaagaacttatttgttccagaaggaaggagctcagacaattataataatgatgctgcatcaagcaatccacttatgtgtgatggtgttggtggaaaagaattggatgatgactcctccagttcgaaggtatgtgcttttgtctaattattccattgacaaagggataatattgattcaacaccttttaagtgtttctttactgagtgtttccatgcttaatgaaagacagaaagctaacctttttccccttgcagggtacacatactgtaaagtttgatggccagctcaccagctctaacgcaactacttcatcgagtaaacctgatcagcttttctggataaatggctacatttgttccatttgtggatttgaactacctccaggttttgaggaggagagacaagaacattcagatttccacttggctgaaatgcttcagcaggaagaggcagtggacagcacaggccccctctcgaaagagaggtatgtatctattgccacacgctcatagatatccctatgttatttcttgatctgctttagttcagtgacgtaataaatattatttaacgagatgtaaatcctgaagtgttttactgggattattactgtgggtgagttgccttttgccatggttatttgaaaataaattagctgagatgaagaatttcatgggtatgaaccttttttttccctgtggagctgttatcatgtagacatcagatgaatttcatgggtatgaaccttttgtgtattcagcaggttagctgaaaggccatgctctagcacacccacaccaaagaagaagctcaagtcttcaaaagaaggaaaacacatacctattgatgctttctttcacaaggttaacaagaacttgtaacatactgtagctacctattcaggcactctttttaatcctacagagcgatttgcccacttgaaaaactgctgtacatgtaacttcattccatgttcttttcagactagcatgtaaattgtaaatatataactcaagaatcctgttaaattaatttcataatttattcaaatgtcatacgattctgcacgagattttttttctgacataaagaagctctaccttatagccatttcattgatagaaatgataagttacgaagttggcacgattaaggggaaaatgagaaaaggaggaggaaaggaagaaagagagagaggggggcacgggaatgtacaaaagttgaaaaaaggactgtacattagcctcgtctgattagttcagaccagaggctgattttcgttttgatttagttgttggcccggcaactcggatggtccggagaaccgatgatttattgctctgtgtttgaccacccatattgctgtctttcccaaattctgttgtccatcgacttccatagtgcgtgagcggaccgcacgttgcaaatcacatggtagcaggtcgccactcctccgtgacaataatataagtctggtctccgacatgctactttgactatctatactatataaaagtgagacgttttaaatacaaggagctgtgtatcatgacaaattgcttaatgatgactgtagtaatatcactttgtatatgatcgatctttcttctattaatacttcatgtatataatgtgacttgtctctatactaaacatattcatattctgagactgagggagtaacacatgtctaaaaataacctgtcgagctggatgatattatctgcagtctttatcatcaggcaaattttttgaccatgttggctttaggatactccatataatttatccataaaaggcaacgaaaggaaacatattgaaagcaaaatatttgacagggagaagaggaaatatcttatctgaagtctgaactggttgctatcaagcacacaagcagccaaatctctcccagtgaacgtgtttactgtgttatcctgggaaaaaacaaagaggagaaaaattctcaaaaaaaaaaaaggtgaggtgaacggtagcaatgcacagcggcgtcaatggctgctgcccgcttcggctccccgccgccgccgctgtccacggccgccggatcccgccgctgctgcccccacggggggcgtggccgggttgtatcgccgcgccggcgctgcacaggaagcccggccgcggcggcggcggcgcgctctccagctgcaggcgagcatcgcatcatgtccgtctcttccccctcactcgcagttctgttattaatttagtagtttctgctagaacttgctactgcgatccactgatcctctcctgctgctcgatttttttttttttttgtattctcgtttttaccttttttttttttttgggcactgggttctgaattctgttaatatgcgcacggattgctgcgttagaatcatagtgtgtgtgtgcgcgcgcgcgcgaataatccatatcgccgggtttctcaattgacatccttagctggctaaaaatcgccgggtttctcaattgacatccttagctggctaaaaatcatggacataggataatgcaatgataagtactaatttctgtcgtggcaattggtctgtaataacggcttttcgacaagtatttagcaactaaaattcaaccttgaattttattttcctgttagaactgtaaaattaaatcacacgtggtagtttgcttggatgtaaaatcaagtatatttatgatacatcgcatccttttttctgtaactactgtaacgttctatgagctagaaaatattgcttaacctcctgtcattgataactctgaacatgctataattaacattgtctaatttttaatgccattataaatccttttcaaaccttcatattctcaaacttgcattagtagtgttagtgcactaaaatgctaggttcttttgcttgtattcctctaagtgggtttgaactttgaaatttaagcatcaagtgtgtggcaggagaagttacaggttgctgcactgccatccaaagctacactcgagtttgaacatggtaattttgtaattattcaactgtttcatcttatatattgcagtggagtccaagtcatgcccatattttctgatttgaatgcagccttgaaagattctagtatctaagtatgttgccaaaaaatacatatactcaggtgtctcacttcgaagtgcatatattgttcctgaagatgttcaagctgcagggttccagattgatgctgatgaactagcatctattgttgaaagtcgcgacactaaaaagttgactgtgcatggccaattaaatgggatcgcagacaaattaggaacatcattaaccaatggtatagttacagacaaggacctcttgaatcaaaggcaggacatatatggagtaaataagtttgctgagaccgagattcgcagcttttgggagtttgtatgggaagcactggaagacacaacccttataattcttagtgcgtgtgctattttctctttggttgttggcataaccacagaaggatggccacaaggagcccatgatggcgttggcattgttgcaagtatcctccttgttgtttctgttaccggaacaagtaactatcagcagtccttgcaattcagggaccttgacaaggagaaaaggaaaattcttgttcaagtcacaaggaatggcttgagacaaagagtactgatagatgaccttcttcctggtgatgctgtccatcttgctgttggagatcaggttcctgcagatggcctatttatttctgggttttctgtgttggtcgatgagtctagtctaactggggagagtgaacctgtttttgtaaacgaagataacccttatcttttatcagggacgaaagtgcttgatgggtcctgcaaaatgctggttacagcagttgggatgagaacacaatggggcaaattaatggctgttcttactgatggtggggatgatgaaactccacttcaaaccagacttaatggagttgcgaatactattgggaaaattggtctattttttgctgtattgactttcattgtcctctcacaagggataattggccagaaataccttgacgggcttcttttgagttggtccggagatgatgtgctagagatattggatcattttgctgttgcagttacaattgttgttgttgctgtacctgagggattgccattggcagtcactttgagccttgcatttgcaatgaagaaaatgatgaatgacaaggcacttgttcgacagttggctgcctgtgaaaccatgggctctgccacagtcatttgcagtgacaagacaggaacactgacaacaaaccgcatgactgttgtaaaagcctgcatctgtgggaataccatacaagttaacaatccacagactccaaacatgtcttccaatttcccagaagttgctgtagaaactcttctggagtccatatttaacaacaccagtggcgaagtggtgactaaccaagatgggaagtatcaaatactaggcacccctactgagacagctttgttggagtttgcactgttgctagacggagattgcaaagaaaagcaactgggaagtaagattgttaaagtggaaccttttaattcaaccaaaaagaggatgagtaccattcttgagcttcctggtggaggatatcgtgcacattgtaaaggtgcttcagaaatagtattggctgcatgtgataagtttattgatgaaagaggttgtattgtcccccttgatgataaaacttccagtaagctcaatgatataatcaaagccttttctagtgaagcgctcagaacactttgccttgcttatagggaaatggaagaagggttttctactcaagagcaaataccgttacaaggatacacttgcatcggcattgttggtattaaagatcctgttcgtccaggtgtcaggcagtctgtggcaacttgccggtcagctggcatttcagtgagaatgattacaggagacaatattgatacagcaaaagcaattgctcgggaatgtggcatacttaccaaggatggcattgcaattgagggtgctgagtttagagagaaaagtgctgaagaactccatgatttgattccaaaaatgcaggttttttatacacctaataattttaaattttggttctgtaagtgtttatccatctggggagctctcatgtgataattctggtaactgaaggtactagcccgttcttccccacttgataagcatacacttgtgaagcacttgcgcaccgcattcaatgaagttgttgctgtgactggtgatggcactaatgatgcacctgcgctgcgtgaggcagatattggacttgccatgggcattgcagggactgaggtaataaactagtaacaccactgagtcatgagtacaagcacttaaaatctcttcatctgcaaatgtttatgtaaaaacttcactggttaactcaactggacctgaattggacatcgcatctagatatccttattaactgtattaactaaattgtgaaggatacctatgtagttaaatttctataagaaatatgctgtgagcctttcttttgtatattatcagtattctagttttctatttccaatgctatttaccatatcactggtccattggcttgtatttacttgtaatgctccatttgctgtaaaacccctttgatggcacaaaagtatatctgtaaattctattgtcgaagtcctctgaggttctcagaggatgtagctcctacattctgatgatgcacagctcatcgatatataaaatagagacaatccattatctctataaaataatagaagtcgttgccaacatgagatagctatgaaaagttgctggatgatggaagtagtgtggaactgtacctataaggctgtaataggcaatcttgatttaacttgctacatgttggtttactgctttttgtttggcaaataacatttctttttggaatttggaaatgaaatgaaaataataatctggttcgtggtttgtgcttttccattctgatcataaattcaatatcctctataatgttaatttgaccaagcgcgccagtttgtggtacaaactacaaacatccctgaggcttgtataaattgttttatgcaggtggcaaaagagagtgctgatgttgtaattctggatgacaacttctccacgattgttactgttgccaaatggggacgctctgtttatgtgaacatccaaaaatttgtgcagttccagcttactgttaatgttgttgcattactagttaacttcacttctgcatgtttcacaggtaaatcctctttataattctattaacttaatcagatctctatctcatcatttacatttctcttcatgccaggggatgctccacttacagctgtacaacttctttgggtcaacatgatcatggataccctaggggcgcttgcactagccaccgaaccacctaacaataacttgatgaagaaagcaccggtaggaaggaaagggaagttcatcacaaatgtgatgtggaggaacattgtggggcagtcgttataccaattcgctgtcatgtggtatctacaaactcaagggaaacacttgtttgggctggaaggctaccatgctgatattgtactaaatacaatcatattcaacacttttgtcttctgccaggtatgttagcacttgcaaaataccattcttttgtactggtaaatttaggagcaaaaattatctctttaatatggaagagatatatcagacaagaggatctgtgtgtgtttgtgtgtgtgtgtaactttatccttgcattgccatatctttttaatatgttccagttttcattaattgcatgctttgtaggtgttcaatgaaataagctcaagagagatggaggacatcaacgttctgaggggcatggcagggaactccattttccttggtgtcctcaccggcaccatcttcttccagttcatcctagtccagttcctgggcgatttcgctaacaccacacctctgacccagcaacagtggctcatcagcatactcttcggcttccttgggatgcccattgctgctgccatcaagttgattgctgtagaacctcatgaaaaagccgatacacgtagaacgccgtaaaccacacacaccaggataagacattcaatcaattttgtgcaccaataatccaagtatacctccactctatgatcaaagattggcagcattttgcgaagaaaatttgatgcaatggagttcctgttgggtttggccaatctaaccagccacgaaactgatgagataagagagccaattagtggttctgggaatatgtagaagtgattttttttgaggtattattttgtacacgctgatctagtattatgaaaatgtaaagccaactggcatagttgcgtagagtgtaaacagatgagattgtacataaatacaagactgacatttgatgatagcaacaacgatcatattcttaagagaatttgattcattctaaaacatcagttgcccagtgaaaacatttcaagtgtttcactacacattgttagtactaaaaatttactggtccatggtacagatcgaacttcctttcgtcaggctaagtatgaaagttggtacttctcacatttgcaagaacaatagttaattattgacaactagatactnnnnnnnnnnnnnnnnnnnnnnnncccttcaataccccattgcctaccttttacctaccacttcatagtacttattgataaggtgcactttggtcctttaccctcatcactgaattatcaattttgttgatgaagggagtagggttttttttttctcggggagaatcagcaattgccatcccaaatcagccataagtagggatggcaatcataaaggattgcatgtttatccgtgggtaaaaactctactagtattaggatttggtatgtcttcaaatttatgctccggtcaaaacttatgtctgatgggtaaataggtatggtctccacttcatctattttctcatcaaacataaccaatatgtggatcttactactcacaaatatttcaatatacacttatcaaaatctaatttctatggtgtactacgatatagtcattttacattaaactcatgtttaacttggtaaaacaatattttagttgttagttaattcatggatgaatttattaactagatgatttttctattgtttctaccatatacatatgattgaggagtaaaccgcatacccgcatgtatatgatgcctgtgggtaatgggtatgggcaaggttttatgcccatcatggtaatgggccgtgggcaaaaaaattatctcgtgggcattggtttgggtgtgcatctcccgtacctgccatgtctaattgacattcctagccaaaaggccatgataacgcaatatctagcgttataaacaacaaacagaatatagcaccaatgtgttttgtctggataaattccttccgtgccactaaaaatttacttgatcccttatttacccctcattatctccaatgacacgtggataagaaattggggcatctttgtttgccctatggcttataagccaatgccaaattatgaattgtaagacttgattttaaagttgatgttttttcaatataatatttttttcagttttggcttttaagttgctaaagatacatacacaaaagttttactcacaatacattttttgatcgttaataagccgttacggcttataatcagccgtaagtaccaattgggacccaaatgtttccggtggtaactaagagattgccttttgttttttttaatttggacgtgacggtctgacttgggccataggatgtggtctttcttcttaaatttacttaataaaaatgtgaattgtggattttgtatacaccagacaatatcatttagaggttgcatatttgatggattgatttattttcagggtgacatggctcattagcccctttctatttaaagtaatatttaattgcataatagttgtactttccataatctttataatgaagataatacttaattacctctagtgactgtggatggcattacctcttggataaaattgatggctcgtattaaagcggactactaattttccatttatattgatatatgcatttgttatttaggatgactcttatgtactcccagatgtacatactccctcttccatattggatctaataggatccaattaggacctgcttagccggtgggaaattttttttgaaattcctaattttcagccgaacagggaataaaccaagtaaaaaaaaaggagaatagctactttagtccctaaagtttctctataggatcagtttattccctaactttttaaatggtccaaagaaatcttaacctttgtcataaggcctagaatagtccttgggtccactaaaatcatcatatgaatatgccatgtcatcattcatgcaaatctatgatgaattgtccaatatacccttacgtatatcatagaaaaataaatataaggtgaattagacataaccataggaaaaaaaatacttcttttttcacccttttgaggtatatttttgctcttacatgtaccatatattttttttaacttttttcttttgttttttattttcctatgcgtaagggtgaattggacaaatcatatagattttgcatagaaatgtgacatggcatgtccacgtggcgattttggtgggaccaagaactatattagcccacatgacaaatttaaaggacttgtttggacaatataaaagattaaggactaaaataacccaggagcaaaactttatgaaccatattagctattctcccaaaaaaaaattaagttgaaaaatatccatgcatgtcggcatggaattggttgcacccctgtatgtccgaatttgaaatgtagtatttgtgcacctccctgtagcatggaaattcatgacttatatactgttttattttatgttttattttagattaggtatatacttattttttaggaaccagtatatactatatctctgtttggaagagtatatactttttatttgatgatccagtatatactaaaagctggtttgagaagtatatgctacttaatttaagactattagtatataccgttatctttagagtctattagtatctgccacttgttctagatttatagtatatactacttttctaaatttgtagtatagtatatactgattttctttttgtttaatgagcatatactgttctatcttgagaaatgcccaggggtcttccggctagctccataaggtggtgggctagacgacctgggttcaaagcctcacccctcctaattatttgatattaggtcctttcctaatattctagttttatatactgtgatatctttttttcagtatgtaaagagtcagtatatattgcattcctcattgaagatctctttgtttggtcagtatgtagctctctgcttttggtcttttgcggcttcagatacgtggagtaatttgtttgaatttcctcattccaaatggcgaccgttctacaagaaaatattaaaatattatatcagcatccgtaagaaaatatttgacgcatcaatacatgtaatacgacatagaaagacatagaaagccttaatctctgcatcctcgctgacatatcagttagtagggatcagagaggcagagactagtagtatataccatgctgacatatcagttagtagggatcagagaggcagagactagtagtatataccagtgtttctagagaacaagtataaatcacttgttctagattcatagtatataccacttatctaaatttgtagtgtatactgaattttttgttgaaggagtatatactgttccttttttttggggaatacatactattcttttctctcttttttttcagtatgttactactttttcggtataaaaaagccagtatgtgctgctatattgaaaaagtccagcatatctatggaaaattcagtatatacttctgtgtaacaaagttcagtatatacttgaccatagaaaaattcagcatatagcactccatagaaaataaaaatcagcatatacccctctattgaaaagttcagtatatttatagaaaatgcaatatatactagtctaacaaagtgatcagtacatacccctccaaagaaaaatacagtatttactactccatataaatgcagtatgtacagagcatgccgccatccagcatattgttctagcacgccgccatccagcacattgtgacgagatcgatatggtcgcagcagttggcatcgatcgttgccgcggcccctgcgtttgttgatgcatgtgaaatcaaataaaatatgatgcatcaattatgattgacacaatcacctgaccggaattactgctgcacgggcagcacggcctgtatgccagccgatggatcgatgccgtcgtgtcctggacgctggccgggaagcggcgcgatggatgacgatggcgccggaagcgcctgtttctaccagacaaatcctggtagtctcgttggatgatgatcatcagttggagggggctcgccgttgccgatgctgtaaaagctagtggtgtgggtgtctccagcgccgcttgttgccatggttgtatgatttcagggagccgatggattgtgtcgtcatcgcctccggcttgccgatgggctgcactgtggacaccaatctagtcgtcatgactcatgacgtggccgtggactggttgtcgatcgaatcgtcgccgtcgatgccgagttgccgacggatcacgctgccgaaaatcctcgatggatctagaagaaaaggagaaaacaggatggacataccagaatcaatcacctgggaattgatcaagccacccgcaggtggacgaactgcattgccgccgaggccgtatgattcgatggatcacgtcggcgtcagcgcgtcgcctccaaattgaccgatctgttatttgcagtccggtttagcagtaagtcggaaagagatatttatgctagcatcctggtatggttacggttaatgcgggatacaagtattacgaagattttttttcgtccgcaaaaactttaatgggtccgtacgtggatccgttagcaggttcgatcggtggtgtctgctgatggacggtggatgagagcaggagtacgtacacctgggtgtatagaattattttcctttgttatttttcaaataatgatatatacaatttatttttagtactcccttctttcaaattactcgtcattctagcattcaaattactggacatctggaagctaagattgcttgagcaaatggatggaagcattcctacggcatgagtcaattataattactactaggtaaactctgttgtatattaccttagtcctaaaattcagcatttttttgcctatgaatctagaaacacagttatccagttatccagattcataactaaaaatgcttatattctagtacggagcaagtaactctgaagttactgtcgtaaaagtgacgtttgggaccttgggtatataacccgacacaatggataaatgaaatcaagaagtaacaaacactatccctgtctcgtactccttggtagaacttagaatttgataaattttgttacagaatatgaaaactttgtggttttagccgttgggcatcacgcgaaatgacttttggaggaaaacactatgtaactatggttgtttgccaacagacatcacgtctattattttagtatttacatgttgatgacatgtgagagagcctacgttttacatggcgtgaccaaaatgcccctgcattgaaacaacatattgctatacctacaaggctacaactagtacaccaacgattgaacacactgcaaagtgaacatagctcaactgattaggttccttatggtgaaacaagcccacctaggttcaagacctaggcttaacatgggtgctcgtatttatatctatttattcttttggtgataggcatcgtgtccatcgacgttgagacatcatgatgacttcatcaatctcaagatatgccgacccaatccttcgaagatgttcatagaggtagcgcgtgcgatgtgcctatgtgcgttcatagagatgagtgttctaaaaaacacattaaactttaatcgcaatcatggcactttgaaacttacaaaatcatgatgtcctatagcaaaatgtgccttagaactgttttgcgacagccacagataatgaacgattgtgcaagttgagggccacagatcttctgaggtgaaaagttcaaaaaacggactaagttttaatagcatattatttcgtcctgccgatgtcaatatacagtggaaacataagtactactactgtacaaggatatcgccagtgcttcgcctacatcgcgctgcatattgtggctccaaaggcaaactgatttactaagtgaaataagacagtaactgttcaaataaacagaggaattccactcaaatagacatttccaggctagctgtatgacatattacttaccaagttagtaacttcctaaagcaacagccaacacatcttgatcttacagtagtatgtacatgatcagacgtcagagagaattgatcttatcaaagctttggcactctccagttgctgcctcgattcctcgctgtcaactagatcgtccatgacatgcttgtcaatctcaaagaagttctcacgaagtgaatcatgagcaagatgcagcttctccgatgccgaggagtcactcccaagcaacctgacacagacaaagcgtgtcaagcccaagacaacaccgtactccgctctctgcagcgccaacttgagggtggacaggaagacgccagccacagaatcaagaattttcgggctccctttcttcagaagaattaccatcatttctgctagttttctggatgactgtgagtcctcactggcctgctcgctttgatcatcatctctaggtttttcatcatcaagcagctcattcttggccaatgcaaccacccatagtggcaagcaagacccaccaaagtcacacatgttaccctcagcctgtggcccaatcaaccagcggcatccaagacccattatgacaactggtagccactgctttacgacagaaactaaactgagagcaaatttggagcctgcagcagactcaacagagggtacaagatcaagaagattattggcaagaaagaaggcttcctctgggggactctgtgactcaattgagtttgctaggaccaaatgaagcagcttggctgcatatgtgaaggaactccgtataagcatcaatatgtctttcagatcattccctttgaaagatgagctctgctcctgatgcatttttatggctgatgatgcatattttgtgaaggacaatgcaaaattgagacatcctactttattatcactgatcaacttgatggttattgtgtcaacgataaacttgagaattgaagtgccaagcatgtatacattaactgtccctctcaatgcattccctgcacaagatacataacccactcatttacaaggtatatcatgtgataatgccagatagataacatactgattttggtgactacaagttgaaagttttaaagttaattacataactactttctctagcatgctttcgaaaatcatatcaatattccgttaataaataaagtttcagatcaaagaggttttctgcatcaaaagttgtaaatatctgtgcaggtataccttcaggaactccatgatggtgtttctgccgtgcagatttcttattctgcttcaacttcaatgagtttgtggaaccagtaacagattcatttaggagtttgtcaaaacaattcagcagatggtccagtgagtgattgatggttgttgactgaaacaagagatcaaacttatgagaatggcaacatgttaattgttaaatgaaaaaaaaatgttgaacacattcacaataatctacataaccgtagcaaaaatagcttaagtgcaaccaacaaatatcggttccagttaccatcaatgtttgaccagatggctagtgtttgagttcatcaacatttctgtgacaactatacagtgaggtggaactgactgttttatcaacatttttgtgccaattatcaaagaaagtgggcatggtggaatcgtgggggttaactcacctcagaggtgctgatatcagtttggtcaatatcctgaagagcgctgtgtgtagccaaactcaaataagccaaaagaggtgtggcatttaaagagtcaaactgcaggcactgctcaatgtacacttgacaaatgaccttcagagatgaaaatgcgacgtctgaataagaagattgtagaaaggcaactctcttttcttcatctttcagtatgtcattaatctgccatgatgcacctgcaacaatatcaaagtcttcactggatgacccgtttccaatatcatgaccagactttgctggtgttttcttaagtgattttcctttcttcctctttgaagtagcaacgggacagataggaggttctatatcataaatctcagcaaaacaagacactttagattgcagaatatttgtcagtgcttcaaacatttcgtcagaccagccacttgaaaaaaccaacttatgtgctgctagcactgcttcttggcaaccttgttgcgtggaaacccctgcagcgttcatgactacattcatgcattcatcgtgcaaagcagatagatcatcaggtgatacaactggagccatactgagtagagcagaccgggctcccacagaaatttctgttttaaagagtagcttcaactttgcatttgcaaagaattctcttaaggaagctaaactagagcgctcctcagataagcttttaattagattggctgaagcaataacaagaccatcagtctgttcagagttcattcctgttggtgccagtgccagagtaatagagactttgatcagttcaacaagggatcttgggggagacccttcagataaagcaaattcacaaaaccttgctccagctgtgggtgacctctttataagtgcaatgcagcgagcacacgcttctttcagtggcaattttgttggaaaatatgaagggatgagaagctttgtgattttctgtgcgacacgggggtggtcatttgagagtgaagacagcaaagtacccaatccaacaacctgaaacaaaaggcatacatctagtttgtttgttcaaagtctcaaactgaagaaaataaagatccaaaggttacttaagttacagaatcaattatcacatgcatatgtaatgaagaagtacgtaatgtaccttattaaactggaaagatcgaagatcacgtatagccaaaagaagatcaactgcagaagatctgaccgataaagcaggatcagagaccatgtcacttaatcttggaagtagaactttcagtatttcatgactttgcggattgtcaagtaagtatatcagaccatttatggttgacacccgaacctcagtgcaagaatctttggatatgtcatcaacaattttacttaaaaattttgaaatagttagggaaggaataacttcccaaaactggttaagaatacgacagagtccttcaatcgcaaccgttcgtatttctggacaatcgtccatgagaagtttgtctagcaagaagtattgcttctctagtagaggatcattgacatcctttgtcacatccgggtcttcaagggggaacaaatctaatagaaggtgcaaagaattatggcgtacattggagtttgcaacctgccaaacagtaatgacttcagataaaaacggaaacgtttaaagcataaactgttctatatatttcttatttgttgatgcatacatgtcataacttcaggttgtgaaaccaaaaagtaaaacaaactattgagcatgcttttctaaggaagagcattcaaatcaaagcaacacataaatcatagttttcattcacaaatcacaaagaataaaattggacagcattcagaaaagattttgagctgtaacatattgacattatgtacatgatattaatatccatcgatctaatgtttgcgcgaatcaattattttatcaacatttggatggggaaagaacatagaaccacaatactgagcaatttcatttgtacagacacttaataactgactctactatgagttgtgaccacgtggaagttcaaccaaaagaaagtgataaaacaataatatcatatgttgtttagcactcatgttgataattggacaatctacttctttttgtaagccataaatttgtcaaacacaaagaccaaatagggaaagaaaagttggaaacaataaactagcgcaagtaaatcatagtccacagcgttgatgtctagagaataagggggagtagttagtgttttagtactgaatgttgaagagacaggaaagaaagacaggaaagaaagacaggaaagaaagagaatcagcgataaatgttacatgcatgctttatctctatctctatctctactacttaaaaaataagagatgtttccttcgtccgtcaaaacaaaaaaaatagcaaaaaaaatataaaaaaagtccgactcctaccgattccctctcagaaaaggaaatcgtccgtcaaaaaaaaagcgaaaaagataaaaaaaagtccgactcctaccgattctttctcaggaaggggaaaaaaatcctgactctagattcacccttaaaaacaaaaaataaaattgatgtaccggattgaaaatctgtttccaaaaacggaacctaccgattgagagcattccatttttatatgattttaatttttgggtctgtacttttgcatttgagtccatgtaatttttatatttacatttgagtccctacaatcttgaaataagatacttgagatcgtttttgattgaaaaataataaaagggaaagaacaaaggcagaaaggtgcataaaaataaaaaaagaaaaaccacacaataaaataaaataaagaaaaaacaaagaaaaacaacaacaacaacaacaaaagtctgtttatcctaagtggcgaaaaaaaaccgtagatccgattcctatagaaggcaaaataaaagtggtgaaaaaatgctagatctgattcctttaaaaactgaaaaaaaaaagtctgattcctgtaaaggcgaaaaaaaatccgaaaaaacatctaaaaaaagttcgtccgattctataagaagaaaaaatggttcgtaaaaaataaaaaatgcgcgcgagaaaaaatggaaagggcaaaactaattccgatttctaatcagtatatatctcttcgctatgtctaatctaatctaactatttaaaaagagaaaatgcacgacaaaataaaaacggttcaaataaacatgtgagaaaagtcagaaaaaagcgcaaaaaaaacacactaaaaaggttttgcatcttccataaaaaataaaaaaacacgcgagaaaaattatttccatcgtcggtaaaaaaattttaaaaaaaacatgcgaggaaaaaaaatgttagaaaaaacgcgccatttctaaaaaatggtttgaaaaaaccgcgcaagataaaaatatcgtctactaaaaaacaaatcactctgaaaaatctgtcagaaaaaacactaaattgatggacgcttgagccggataggatccatcgattttttgtcatctactacacggtttttatttcgtcatatattctcctgtattggaaaaaaacaaaaaagaacattcgaaaaaaacaagcaaaaaaagcgtgagaaaataattgttagaaaaaaaaacatgcaaaaaacacacgagaaaagaaaagaaaaaagggagaaaaatacggttttcgttgtaagtaaaaaaagcaaaaagaacatgctaggaaaaactgttagaaagaaatgcacctttctgaaaaatggtttgaaaaaatcgcgcaagaaaaaaaacattgtttataaaaaacaagtcgctcattaaaatacaaacattgtcattgacataattatgcatgaaaaacatatattatcattagaattttttcacccgttgcaacgcacgggcatttttgctagtatatttcaaaaagaaaaaaaggcttgcaggaagccaggaggtatatgccttacttttgaaacagagggaggtatttgctgaaccatttaaatagtctacctattaccagatcatgttaatgtgttattgagcttgtcgtactgtttgaccaatgtaacaaagaataatcctagtcaagcagcaccatgattgatatgtctatgtaatgctagaagaccaatactccactcttcgctcttctaccattcatcataactactaattttaatttggctgtaacttcatgtacacaagtagtgcataacaattttattctgtgatgctcaccttcgacccatccataatgaatatcgtaagcacatcatactagttactccctccattccaaatttatctacatatagtttttttgaggttattcctaaatgatctacatatttgtgttcattcattaagtctattcgttatttgtgcatcggagtaaatggacattgatgcatgcatccatgcacacaagtatttataacccacatgcaatattttgatttgctattggctaggaaatagtgggaatgatacatgcattgagtttgttgctagagtaaatatagtatgagagagttattagcttttcttggtcttggtgtacctataaaatatgtagatcaatttggaatggagagagtaatacattagcacaggagcagaaaaagatactagacagtttcatacctgcaaagaccggaacagcacgggctcggcaagctgaaagattaatttttcaactccagccaccattctctgctcgacgaacgcagacag

SEQ ID NO: 23850 - DNA, 5968 bp, Oryza sativa
ctcttactgaagaggggaaggattgagcaagaatgagtacaaccacagtactcagcaagccacaccggcagatgcatgattaatgcaaaggggtacaaggggtaataatataggggttaagttttgcagaaaagcagcatttaaaagtcacttagttgcccaaagccattttataaagacgatcctagagctacacagtattattaaacaaggccgtgaacccacacgaacctgccttaacccaaggcctacgatgattcagaccgaactggcaacccgaccctgggtcccagctcgtcccaagccaacccaggccaaccattccacattttagttgttgagcaaattttaagaattaaaacactgacttgggtacattgctcggcttgcccataaccgagggcgcggctattcgaatagattatactctgatcagaggtgtacatctttacccacaagacacatcttcctcacgtgcaaccacgtgccacataccaccacggtatacggacggaagacgtgacatagttcccaacccatcttagccataaacaagagtaccgacccaacccccctacggccggaacctccgggacaggtaggcaggatcgagccccctagcagcagggcaccaaccctctgcaatgacatctcgactaccgggccgcagctcgtgtagccttcatttgccctggagaatgtccatcgacccccgacttcatccatctccaatccgtgtacttttgtttataaccagactgagccacaaactaagccttacccactagacatgtggaagtacggtagtgctttgcaacagaggcccgagcttaatccttatagtactcgaggtacgactaacaaaacccaaccacgcacctcgagcccagcctaaaaccattttgggggttttgaatagagggggaggtgtgtgtccaattccaacataagccaaccattccatagtgtccaaatgatatgagaattcccaaagtctaaagttataaaaaccacctaatgttgtcctattaatcagcgaagcatctacctaaattcatactagtggaaccatgaatagaatacccactagttggggttttgtttaatctagggtgaacaaggtaataatatcaataacaataatattaaggtcataacaaaggtaaataggcatggctaaataaaacagtgatcacgcgggaatttaaataaagcgataatgcaataatttaaatcaaaataattttataaactgggattcaacatgttcaaggatgatgtgacttgccttgctcgctttcccaaccgacggcttcgacttccacgaagagcggatcttccgaagctgcagcgtctacacgaccaacggaaaagaaaaaggcttttactctaatgaactccacataacagcagaaacaaagcacaaaaatgggttcttgacttcttaaggaaaaattagagacttgaacggtccaattccgagttcaaatggccaagttatggccatttgaagtttatatgctctttaaatggatatttacgaatttcttcatttaaattttaatttaaaatcgaattattgcgtcagccgaggggagagggcgcgcggaccgggtccacgggagtggggcccacgcgtcagcctctcggtccacggtggaccgggagcacgcggctggcggcggtcggcgccgtgggtcccacgcgtcagccgcacccgcgggcgcgggcggctgacggccgggccccacctggcagccgcggggcgcgcccgaaggcggcctcgccggcacggccgacgggaggcggcgcacccgcgccccgatggtcgccgccggcgaccaacggcgcggcggagcggcacccgagagagaggagggaagggggaagcgaacggagcggtccacggctcaccccggtcgacggcgacgacgggaacggcgaccgaaacggaggaaggcggcggcgcggctcgggacgacgaggacgacggcgttccggcggtcggcgagcgaaatggaggagcggacggggtcggcgacgacgcggcgaagccgaaggaggcgacgccgagtcgggaggaagtccggagcgacgacggcggcgaaccggagctcggcggtgacggcggagagagaggaggacggcgcgagcacgaatccgacggcgagagcgagcggcgagcggcggaaacggaagagcggagctcggggaacgaatatatagcaacgggagggggagaacacggccggagagagaggaatcggccgcggagatctcggccgccattgatgacgccggcgacgattacgggaacgatttcaaacggatccgagggagagagagagggaaaagcgggggaaagcggagagggaatcacggggaatattttccccctctttatggcgcgcggggacggcgggaggcggcgagattcgcggcggcggcggcgctagggcatgggcgagcggcgggagcggcgggaggaaggcgatgacaggtgggccccacccgtcagcgagggtggcgggcgggcccgcctgtcagcggcgcgcgcgcagggaggagccgatgggccgcgggggagaggagagagagggagggagagttgggccgagccggcccaagaaggaaaaaggggggggaaaaagacttcttttagggtttttctttttataaaccttttcaactttgtttatttcttttcaattattatttgtgctctgaaaattccactaaaatttgagggctcctttttgaccaaggggaatttaacaaaaattctccgggccacatttgaatttttcttgtatgtattttagtgttttccaatttcttttcgaattttaattaattctattattccttttagcgaatgatttttatttcgggatgaatttatcaggacgtgacagcggcggcatcgggatcggcatcggaggagagggcagcgacggcggcagaatagagagcggtggcggcggcggtgacggagagcgtgagagggcagggcggggcgagcccacgttgaaggtgtaaagaagtgaggagaagagggcgaggagagctggagagaggagaggaacagagcggaggaggccaaggcgaaggagccaccacttttgtcatgtggcatcgggagcaagtgcggcggccgcagagggacacggcagcggccggagcagcacggtagaggagaagggaggctgcggcggtgacggcgatggcgcttgcgagcggaggaggtgggcgtctgggcgccggatccgccagcgaggagaccggggtcaccggatccggcggccccggcctcctcactgggagatccggcggctcattgggatggagcggcggcggcagcacggtagaggagagggagctgcggcggcgacggcgcacgcgagaggaggaagcggcgacggcgcacgcgaggggagaggcggacgaaccgacgcgcgtggggagaggagaggacgggcggctagggtttgtaccggttcgcgaaatccaggccgtccgtccacaatccaacgatcgcacgggcgtggaagggccggcatagcgggacacgtggacggccagatcgaccctacggcgagatcggacggtggatagcagcggggaccggtgcataattaaccgaatggggaagggtttttttgcaaaaatcgatgacgtggcgcccctaatcttctagcgttcccacgacgtttaagtaaacctatatgctatgaccatatatgattgtttatttataatagcatgaagatccacgccaagaatttgtcacaattcacaagacactacgtgtaacacgctagttggttcccctggatatatagcctcaaggtcatcctcacttcataagaaacggcaaaaagtaaaccgccactaattaatttcttcaactaattagataattaattaagtttgtaaagctattaggtgtctaacagtaactgtatagagtaatagtaatgtgtacaacaatttaaataataaaaatatggtttggcatttgattttcaatgagatgttttctatttcctttaattctgcggaggctatgactggtgggtccaacatgtaataactttatacaatatttctatttttttaattgtatacatgttttcagaagaattgcaaaaatatacccttacatgttttttaattatatacatgccgtaggctaaaaacgtgtggtcgagtgtttgacgcggtggaaatatgtgggaccgatggcactaagtcggtcctgcgggctggctacgcggtaccgcacaattccgcgggctggcaatgcgacactggccaagatgcaaagaaatacaacgtgcatgcatgaggctcggtcgcgtgcagccgtctcgcggtgccgcttggctgacccgtgggaccgacgcggtactattcatccacaatgcaggattattccgcctaatagtcccgcaccttcgcgctgtgccaaacaaccagtcccgcatttccattccacggcacacgtatatttttgcaattttttttcaaaagcatgtatataactgtaaaaacgctaaagttaatgtatattttcaattttttcttgaaaatagtcaatatgaatgaatttgattttcttaaaatatacaatggtttaaacagatcatatattggatatataatatataatcatttaaagtttgcttatttatttataaagactacaaagatcaattcgtatttgagaatgtgtgtatggaacatgcaaaaaattctttattaccataaaagtgcactaaatatcttctaactacaaaataaaaaaaagcaggggaaggaaaggtgcatgtgtacatgcgggagcccagggagaggatttcggatttttgtttttggttagatctagtggtctagatgaatcagttttgttagaaactatcttaccatcggtgtatcttttaacttttttttagataaagagagttttattgatcttaaacaattacatcgagaggatacaatttttctaagaccaccctcggcctctgcatagctaggatgcacatagactatcaatatttgttgtgccacatggccacttgtaactaccgtaggaaaaaaaaacatgcacttgtgggtcctcgtcttcttttgttgtgccacatggcagcttgagaacattttagaaagccacgtggcggcttgagagcgtttttaggaagtttaatggacttttagtatataatagatagatataagtttttgatcctttacattttcctgtaattatttgagcctcaattataggatgagtcagttgtgtaacaatgaggcgggttccattacataagccctttggtggatctagattcctaagaagcatcatggagacactaatcttaagttgtaaatgatgatccggcaaaccactcatgtgtactgtattaaggaattctggaggataaagagactacacattgcagtagtttggtgtggcatcatcaatgctatcaaagctatagtaggacatttcttaagtggctatctggttaataatttgtgcatttatagcagcagcaatctcatttgttggtgccaaaatcgcacgctcacataagtagcttggtagctacgatacatgtggtattgaaccatacacaaaagaaatcaaacctgcaaagttcctttcttcagccggtagtaagagatatgatggaatttccacctagctggtgtccggtcgatcagcgggtgcactatcatggacagcaccatcacccaaagatagaagccatgttgcaaacaactcaagctcagacctgtcttgatgagaaaaggttggacaagaaaaggttggacaattgagcctcatgttttcagttaattgaagcaccacacaattttccataagtgggagcgagtgatcgaggcattcaggatttgttgctttcttgcattaggaataattggtagagggctgcaggaa

SEQ ID NO: 23851 - DNA, 8585 bp, Oryza sativa
gatgggtgttcttcttaatacgcacacatagaatcatcttggatgtgtagaggaattctaaagcatgaatgtggtgtacggcctcctggaagtaataaagctgctataccagaggatgccactgccaaggctattttccctttgtttctaatgctgcccaacagagcattccatagaaatgtcttccctgttccaccatatccataaataaaaaaaatatttgtccagaattattcaaaactgagcattctatggcattgcaaacacgcatctgattgggatttaattaattgagctgttcattcacctcagttgttccataagcaagttcatccattataagcctactctccaatggtggaaaagcaagatggcttagccgcggtaactgaaagtgatccaagctgtatcctacatctcttagtaatctatccaattcagctagggtggataatctgatatgctcttgaaggatattttgatgtatcctaggtgtctgctggcacacacgatacgcaaaatcctcacccattagttgaacattattgtcaaacaacttggctgggtctgatacttggtaaaatagaagcatcatgacaaataattgtcgaagttgatatggaagcgcccactgtgctgcatcagtgatagcatgagaccattcacgatcatcgccaagtaaccccatttcttcacatgcagattgaaaagttgggtattgaatgccactaacagtgcgtacatcagaaaaggattgagcgcctttgacaacatgcagtaatatacgcaagtaaaactgctcaccttggttaggtccaacattggcaatgcgaccaaccttgcccttatggctctgagagcgttgtttccaatatttaccatcaccatgccatgtccaaaactcaggaaattccacatacatgtgttggcgagcttgtgggtatatcctattagcatcaaaccatgcagtcaatttggtgatggtgctacgtggattttcaatgacctggtccagatggtcatcttcagaaaataccacactattttcgagtgggagatgcacaggtaagcgctccatagatggatcagtgtggtggatgtcaaattgcagtaggcgccatgcagcttcacaaggtgttacacacctacaatcaagatattgttgtatttcattgcctccatcccgtatcccaaccttagcacaatcaggacctttggttgtgtatttgaataggtacttctccattccatcacgattaacaatctcaacattgatgtgtgcttggtacttaaccaagagatcaacattatgggccacaacatacctgttatcgacatctacaccacctttctctgtggtaatattgttttttggccgagcatatataacacgcccgacaacaccatagtttttttctgtaaattctttaggataaaacttactgcattttccatcattcatgcaagtagacgatttgtttgaactgccacaagggccatgtatcataaacttggagacagcttcataaccaatatgatcaacagatgggtccggtagctatgcaggtacaaaggcatcaatccaatcaacatcaagaggtccattattttcaagccatatgattacatggacatgggataatccacgtttttggaactcaattgtctagagaactacaaaaaggaaaaaaaggagaagcaaataagaagcagtgaaggggaaaactgggcaaataaaataaatcttaaaaaactggcatgttaaatgagaaattgtggacaaaattaaggatttatggaaattacttccagatataggactgaaaaactggtattttgttatgtcatccataaatattcttagcttcatttggaaaacacggtcaacaatatcaggtcaatcagaggagtgctgccttggaatgagtgctaaagcttgtgttatttctggccatgaagcgttgcatgtgaaagtggtgaaaagatgtgggcacccaaaccctacgacaaagtgcaacacaatcttggtagttttgataataataacgtgggcttccagtaaatgaagctggcaaaacaattttttgttctgctgctgatccttctgtaatgccaatgctaacagcatgaaccaaataattgtatgggctagctctaaatttcttctgaaatgactcattcctgtaatggctcaagcaaccatcctcgacgcaacaaaaccatcaacaacataggcttgagtcagtatcttgcaccgtaaaggagtattaaagtcatcagctctatcatgtagtctatatgcaatatactctaccttggtgacatttttcctcttaatagcccctgatcattggcattgacggtacttgagatctttgtagaagccatcttccccatacggaaacaacagagggtattgcatagccataaacttgcaatgagattcttttatcctttgtagatgagaaatattattaaatcatggccttcattaaatcattaaccaccaacccaacaaccttagatggaacaggggcactatacacaccaccatgttgattgggcacaacaaatagcttgacataatacttgtcttcagattggttagccaatctatcccgagcagttcggaacactcacaatcgggttgtgattatcaaatatcctcatcaaagatgaaatgacattttcatttggtttaaaaccaccacttatgcatggaaccgacatcctattctggatctcattttcagtatcaaaaatgtatagcggacaatattttggcctagcaccatctcttgagatcaaatccaatgacatagctgcccactaatcttgaaaacataaggtcctcctccatcattaatagaccgtatgatgttcacgtccatagttgtcatagcaaaaatagagttataacgcctaatattatcaaagaagtgggtagaaaatgcagggttttgtccagtcaacaaactaagcaatggttctggaggcggtatatgtatggcgataagtgaacacttcctcccctacagcatttgttgtacacacgtgaagctgcctatccttgaccacacacatgctccttataccaaaagagagcaccacaatacttgcatgtctggttaggtcctccaaggtgtaaaggtgaaaaaatagtgcctgagtggaaaatgcataaataaaaaagtaagatagataaaaatatgtggcaacctaatgaacaatatggtatgttctcatcaccatacataggcgatcattggcatgaatcagctgagccgtggcaattatcattatgacgaaacctctttctcaagcactagagtgatcatagagcaaacatcaagagagaaccgcggagttgaaaagcatgacgtctgtaggtgaatgctggcgagtaaaaccaactatgagtttgaggcaaaatgaggagatatatcccctagacatattagaaacacacatatcatgtatgttcctcatgtgctaaaaaaaataatggatattacaacataaagattgataaaataataaaacttacggtggtgtcgaccgggaaatggttgcctaagatctggtggcaagaaaaagacacccagaagaattgaggaaacagttctatgtcatcggagtggatcacagaaaactgaaaataaatcaattagttaccatcgtcaccttggtgagaagccgatgacagattctgttgtggtagttgtgtatgacattgttgcattggtgtacagcattatcatttgggattatgcgacgccgaacagatcgagatgaaggggagtaaatagcagcatatagctctgcaacaccaacaaaagctgtacaaaatcaacaaaaaggaagttgctataaaagtctgtcaatgtagaataatctatcttactttcttctctcttgcgaatcatatatagttgccttgcgttttttacgtgactcagcagcaacatatggttgtggccatggcaaacctaagaacaatagaatataacatatgtatgtatatctgggagtaacttagagtgtgtgagcataacgcggagcaagggatgagcatgttaattgaattgagcttaatatgaacatatatatctatatctatactaatataaaaaggagaagttgcacccctccaatcctacagaccaaatcatcctaactcatctcattcgtccatttgcctggtcatctcatctcatccgtgcatcccatcccaacgcaatgacccacagtcccacctaagccgcacgatgactccaccgtattcctcctcgcccccgcgcaatgactcccgccgtggcctgcccccgatggagccgactccgccacgcactccacggctccacgcgcgctcctcgctactcctcgctcctcacctccctgccgcgatgccgccgccgaacaccacctcggaggaaaaaagaaaaactttcccaatcctcccacgccgcgaaccctaatgaatcggaggcggaggcggccaccacctggccctgcgccggcacggcggcggcgatgacggagtcctccccttctccacgtggactgccgccacatcctcgctagagccgctgcccacgccgacatcttcttctgccgccgccggagcctgcttcttccccaccgccgcggttggagctgacctcggccccatccgccgctgtcgccgccgatggggctggtcgatctctcctctctctcagcagtgaaggtacaaaatcaatttatcccctttcctgaagtcaatttctgaatgtggagtgcaaataatgtggatctgttttgtccctttttgtttcgtagtttcatcctgatccagaacagaagcaagacatcgagttacgagccgatcaatttacatgcctagtgcctcccagtcaatctattttgaggattactagggacaaaatgatcattaatactccggtccaagagggtgtttgatgcaatgctggttagtcattcttattccccaagaagatttgtctttgcaagtggatttcttatgtgcactcaatttttcttgatgctgaattaccaacatttgttatggggtttagatatttagatgtctaatatttacattgatatatatgctgtgattattctgacactcacttgatagctgtttttgtttcaacgtgtgcatttctgtgattttcccaagcaccctttactacccctttcccacctctattttcttgagcacgatcatcttaattgcaatttaggtcaatcttctgttctctgcatcgcggacgtttttttttcgcgaacgagttctctgcatcctaattcaatggatgacacagggagcttctttggtatagacagggagcatcagtactgtctaatattgcaccactgttgtcattgaagcaacatcagttttatgtgttttagtgcttcaatcgatctaaagcaataccttgaagtacattttgtatattttctaatgcctctccccggacataatgggatgaacttcgtaaacatttgcagtaacaaggtgagcaagcagctaaccatttcattaaaattgcgatctttgttgtttgcatggatatgaactgaagaattgagatctttgttgtttgcatggatatgaattgaggaaggataatattatactcttggagttcccaaaaggtcgacagtccaatggccgatgaatgcatgctttgatgctctgcctactgagttaataagttaataaggtgtagtctcctgcttagtctccctgttcttcgccgagttcgtcgccgtccttcgccggaggagaggagagctggtgccggcggagggaggaggggagccagcgcctgcggacagaagaggggagagagccggcgtgaccgtgagggaggagtagttgggggatttgggtaaagtagtatgggtggagatttatattcttctctcgattttagggtggttactataaaatttggatttctttgtaaattgataaacacgtgagggctgaaatggaaagttacaagggttgaaagaagaagtaagtcactcgtgaggctatttgcactgtgggaataaaaaacttgatccagatcttcatcctgtatgaaatagaatgatggtaagctgcactgtgagaggcctaagtttcctgtatatacattctactgtatcaacgatggctgtactacataccagatcccgtaagaaaagtagcatatactggttcaacaagggattcagtgtactggatatatacttgtaaaaacagtacatactactccctaaccgatcgatttaatatatactgcatacttgaaaattcagtatataatccttaaccgatcgatttaatacacactggatacttgaaaaatcagtacatactctttaaccgatcgatttagtatatactgaaaacttaaaaaatcatgtacgatggattaagtatatacagctagagaaaaagtagtaaatacctgaagaagagcatacaaattaagtagtacatacttctacgagataaagtagtatgtatttctacaagaaagaaaaaaaagtagtatatacttctacaagataaaaaaacatataccattccctagcaaaaaatattatatactccaatggaacatatactattaaaaagacacaaagtcatacccaaaggatattacctcttttcaaaataaacatatattttgaaatgttatcacaaagctatggatctagttaacaagggtccaaaactacatgtttgtattgattcaatcactacggggctgtttagatttatgctatttttagttataccattttttataaaaattatcaaaaaaaattatctacgcttaattttttttttccaaatttagtaaatacataacaaattctactagatatttggcaatattgccaacttgctaaaattttggcattgccagaatttggtaaggtttattttggctataatctggataggccctacgtgtataaactgatttgacacctattttatgaagaaaactacagcttggcatcaccgtcttctccaagcaattcaacgtcttcaaattggcagaagataacaccataaatagtgtagcttggctgataaatgcaactagattacgactcagttgcaaaaatggaaaaaaaccaacgttactataaagcatcttctacgtatatatgggtgaataaaactcacgataaataggcggcgattccgagtcatctactagaagttgagatccatcacccaccttctcaacaataacgacaccacaatagatttggaggatcacctctcccacccacgttgtctttctccgctagcggagcctctaactattgaaaccacaacaggctcgggggaatatatttgttgctatagggaggtgggtggtgatgatatgtatgccgggaataaatgcactttttttttacggaggcttcggagggggccgaatgcaaaattttagttagattggatagtcatgtcgtagttccataccaagtgaaaatagtttcgattataggtgacaagttaaactaatattatgtacctagatacgtggtttatgatattatggatctaaataataacgcgttctaaagtttaagaaccagcagtcatgtattttaccttttaaaactcctcattaggataacgctgcaaattatattacctctaactctttttaccataagtttatagttatatgattgatttataattttctaataattataccaaacatttatcgttttataaaattttctctcgtatatattccgtgtaaaagtgagtcgattttagccactactaggggcctgtttagatcccatggcaaaattttacatcctgtcacatcgaatgtttggatatatgtatgaagtattaaatataaaccaaaaagataactaattacatagattgtatgtaaattacgagacgaatcatttaaacctaattgcgccatgatttgacaatgtagtgctacagtaaacatttgacaaatttgctaataatggattaattaggcttaataaatttgtctcgcagtttacagacggattctgtaatttattttatttttagactacgtttaatactttaaatatgtgtatgtatattcgatgtgacacgctgaaacttcacacccagataaatacagcctactagaccaatagccattagccagtgcgttaaaccctcgcagtccccctctcgccgctccccgtcttatccccgctccgctccacctgcgccccacacgcacagagccacgctactctccccacccagattccaccatttcacgcccccgcctccacttcgccttcgcctcgccgcgccgccgccgtctagcccttccgcgtaggcccaggcggccgggccggcgggaagcggcggcgagctcctcccctctgatggcgccgcagctgcagggctgctacgcggtctcgtcctggccccggctcccgcggctgcccccgtggccctgcgcctcccacgcgcagcggcggcgggtgctgcgcctcctgccgccgcggcgccgctgcgccggtgcggtccgggtggtcgc

SEQ ID NO: 23852 - DNA, 11140 bp, Oryza sativa
accttcttttgtgagaaatgcttgattcaattgttgatgagctgagaacggactagttggaatctgtatattagccgcatgatgtcttaaacgtccttcatggctgagtatctcaggattcactatcgtagaaagaaaactaaataactgcaaggatgaagactcacaatgacactccttttcgaaaaagaaagaaaactaaataactgcaaggacaatgattcacaactgaagaaattatactgggttattgaattcaatttcgtatacagagacgctgcagaggattcgggagagaaccaggattgcgatgcaggatcccaaggtgaagtcatgtaagatttttattgttgttatttagtagtgtcatgcatttactggatagttgacttgccttagaaattgtgcaaagttccatagatctaggagtcctgatgataatattaaaaaagagtctgcctgaacaagactagatttctataagcacatagtattagcatcatatgatcaaatatggggacataattccatccgaaagaaagttaggtctctagctgtaagtttgcatctctcagtgttgttggcagggccaaattttagtgactaatgtagtctaccatgttatttgttagataagcatagcatctctactcttatcatcttatggttgagtttatctcacattgtggtgtaacaagtgttgctgctggacttgtgtatagctattaggcttgtggtgcaaaagcaccactaaatttctgatggcttagtggaatatatcatatctgaaagttataattccatctgttaaaattttcaaatgctttggttttgcattgctattggtgattttatataaatgctgccaaaactgtacatgactaccatacttacacttcaatattatagtagtaacatttcatttcatcatgtttattacaatcaagacgaaggcagtttaaattagactattcatgtccccatctctttccgccatccgttgtcccatgttttacaaccatgctaagcgacttatgttgcataaaattaagatacaatgccacattaagggcatgtggtaattaacatatcagaccaacagtttaagcacaatggttattgtgctgcagttatttttatagttcatgtgaaaagtaggaaatagtctcttatttggtttagttaatcagagcaaagttagttagattatattttattatgaagattgccataccacaatttgcatcatagttttttaatgtaaaaagacaatcatttccaatttcttaagaaagtgtagctagttgagtacccagacagaatatatcgaaatgtgatccacccaattgaggttattataagcaacttcaatcccaaaagtaacttaaatattccaactgcaaaggatcacaccaaactagttcccagtggtgcaatgcatgagtgcaccagcaacagtcctgtgttcagttttgaaccatgcttatctatatgattatttgttgggatcgctgttatcatttttttcatatctattatatttgactatagttcatatgataaactatttaatcaatggtgtagcttgcctaaagtgttttttgtgcaggttaagaaaaagttgatgcatctgggacatgcacagaggtaggatactatttgctcttaagttatatgcgtgcattttaatttgaaaagctatgattacagttgaactgaagaaggtattttatacacatccacgtacaaatgtaaaggattcactattcttctctaagtatgactgcattacttggcacgtgttctacttggtagcaactcccagtggtgaacccagcactaggttttaggtatggctgatttgccagcataaacaaagcaattgttatcaaatcagacgattagtcataaagtcggtttaggtgggcaatgtgttcgcagatagagtgttgggccttgggttaggtcggcagtgaaaacatggatgggcctaggcggctagtccattattgctttacgggaagggatactatagcaactgggaggtaaaccctagcctccacttcccctagccaacatcaagcagagaggagtgcaccaggggtgagaggagcgtcaccaaccaacctcctcctcccctgctctcagcctctcctccaatgctggtgctctgatctcctctgctcttccatctccctggctcccacttcttccaaattgctggtgctgcaagcctggaactagcctttccccaaaacaccaattcaccatgctaattggcctattgtgtttagtactttaggacttatgttattgctggctattccatattccatagtttctatcatatattgggctagcacagttgtaaagactatatagtccatcctctgttttcgcacgaccaaatcatggactagttgtgtacttgtcgactcagtagccaagtcggtgtagggggtacctcgactcaactttacgacttgacaacaatgaaacaaagtgtattacccacaatccaccaccataaaagcatctgaaaatgaacatgtatttgtattacaagcacattaccacatggaactaattgggatgaacaactgtagtctgtatgcaaacatgtgctgaaggcagtatgtagaagaattcctcactattgaagctttcaccacacttcaacagaagttaaacattaattacaattgataatttgatatttccattaccgttatgccttggctacattgtaatcagacataatcaaatttatttgacagttacttatagatcatgaccaacacatttttgagattctttaaaactgtctagcctttgacgactctattggcagcatataacatgcaaagagaaaatagagcacatgtcaaattgcactaatgtgatgcatccagataactcacgttaaatgctaggatctcattggtgtagacaacaatgaggaatatacccatcatggcttcacatgcactcatgtatggatctggcctcctgtctccgctggtcactgccgtaccagtgctagcgccacctgctacattgcttgcttgtgattcattaaccaaaatctgatgtgccatttttacagtctgctgatgagtgtgtgtgtgcgtgtttgggggggggggggtaggttaaaaaccaactaagagcaagtttaataagaaaggaagtttctagttccaattatatctacgtcatctattgatcacatagtagatagctggtgcaatagatgagctctattctacagccacattctttattttattgatcaatttaggcccaccatgaccttgtttcagctatcgattggggaggaggaaggtggggtcgaccaggggcgggcccaggattttcaacttgggtattcgaaattggaagagataattttttccaacacaaagtctaatagttgtataatatataacggtataagcatgacgtcgtaaagtcatagattcatagaattgaccataaattaaatatgttaagcatattttaaagtacagtactaaagtattaattgacaaaacatgtcagatttataaagcatagaaaatggaaaaaatgataagaaatcttacaatttagagagaaacttttcgtttcttgatattttgaaaataagtgacgatgtctttatccttcactttcctcttcatgtttcaaacctacaaaacaacactatggtcttctaatttaagtattaaccatgctaactctgctaaatatgtgcactgactctgctacaaagcttcacaaatcagtgaatcacaagtttcaaagttcaattgttcatccataaaccatgaaccatccctgtatggctggattcaaatcctaaataaaatgaaccatcctggattcaactaggaactataaatccgaaattcctaaatcctattcgaacctaattaccaaaatgttcctaaccagttttaccttcgtctgggtcctgccgtctgggcgtttggcgcggtggagtggtggagacgacagaggaggccggagcacaagcgtggctgcgcgggcacctgggcgccacagtccacaggggcggcggcgcgtgggcgccataggggatgggcggatggcgcccttcgcggcaagcggcagcccgggggcgcaggcgtggccactgggtagccgtgaagctgcagcagcttggcagccagctgggaaccaccgccgtcggggttgggaggcgatgctgcgaccccgatgcgcctccgctagtccgctgtcgctgtgcccgtgcgccgtcaggagtcgggaatcagggtcgggaggccgccagggagaagatcgattgggaaggagaggttagggtttcattattcccttttgctgatatgggctattgggccaatgggccgaccagccgaggagaggacggaggtgggatgggatggtgctaagtcgggcttctctgaagaaacaagtctattttacatatttttttcatatacatatgaaatatatattacatatatgaatttttttgtcaaaaatcttgggtattcaactgaatacccatgaatcatggtgggcccgcccctggggcgcaggcgtggccactgggtagccgtgaagctgcagcagcttggcagccagctgggcaccgccgccgtcggggttgggaggcgatgctgcgaccccgacgcgcctccgctagtccgctgtcgctgtgcccgtgcgccgtcgggagtcgggaatcagggtcgggaggccgccagggagaagatcgattgggaaggagaggttagggtttcattattcccttttgctgatatgggctattgggccaatgggccgaccagccgaggagaggacggaggtgggataggatggtgctaagtcgggcctctctgaagaaacaagtctattttacatatttttttcatatacatatgaaatatatattacatatatgaatttttttgtcaaaaatcttgggtattcaactgaatacccatgaatcatggtgggcccgcccctggggtctaccccttcatcgtagcttagcttgtgctgcagttcatgctaatttagtcacccagtcctattctctttcctctcctctctcttccagctcacgcaaaaatctgatgtggcatttgtatagcttgctgatatagtactattgtacctgctttaacaggtaccttctcccaccgaataactcagttatactcttatcttttattcggcctcctaaacttggtgctgggtcctggaggctgcacctcctgcttcttgtttgtagtgtcgcctctgtgtaattactttggcctgcaactcagctcatattctagagcatagctcaggtggagttctccttcatcttacgcaacagaatcccactctcgaggtccatgctgcatggtggaggccattaatccactatggaggtggttcccgctttcggtgagtaactaccctagcctgccataatgggatgtccacccttggcaatgccttatagtctagttttgatactttagagttccagataaaccttggtggccatagaagctaattttactcttatgcaagctaagggaggaagcctaagtattattgtatgctggacatgcctaggtggttgacagtgttttggcgattggtatggttctttggtgcatattggcatgtattcatccttggtggagaacctacattagcattccaataggttattgaacgtgcacagtgttaagttagaaacatattacatgggaactggattggtctaagatttttcatggtgcataaggtcatgtatagcacgactctttgccgggcgcatggatgaagtttatttttctttttttgccaccatggagattaggggcgattcccaagggtgtgtgtgttgctgcttgagcatgcattggatgcatcaccgtccggccaaatgcatggaaagcaaacctgaggaggcaggcgcctaaagaatagctgcctctgttccagattaaggctcctacggagagatctttctctcattaggcagctacataaatctgtcccattttacatgccctaaggaggtttcgaaaggtacctcgctaatattggcgtaacaggagctaatattgtgttttgttataggaggtaccaggttgcattcaaatagtgttaatgctacctccagtaccttatcaaggactgtaaaatcactcgttctaaaatattaaatgtgtgacctactcaccttatagatgatatgtattcttcgaaatgatccaaaagcagctccacacgtgcatattggtcacaccaaaatcatatcagatgaaccttggcatttaggtactggtcactttgccataaggtacataaaatttaaaggagatatgcatcactatgtgaatattaatcattatcttaatactctaatgggttaccttcaaccacattcagaggtctagagatatccctccgattatatgggagggacaaattttgatctcaactgagcttttagtaaatctgcttgctcattatggtttgattaacccaaaacttgttggtccatttgcgtatgtcaagctgtaaatgtgatagctccagggggtcatagaaccaatcctaatgataggtatttcttcttaatatagcgaagagacaagaataaagatatccatgggagtgaggcgaggatggaacttgcgtttacagaaattaatgatccaggatggttgctttgtggagtggagagacatgatagcagatgctgctaggaagggctttgctggtggaatatccctacaatggaattcatataaaatcttgactgagcagatgcggcaggagtggttggaaaaagtccagaaaagaagatcaatgcctcggccaacaggtaatcgacgagcaccaaaatctccagagcagcggagaaaaattgcagaagccattgctgcgaagtggctagataaggtaaagagaatagcaataccttcctcttacatgtttctcattttcatttgaatattatacccaagctctgaactgatcttacaccattccttgtagctttgttacatggattaaatagtcttaactccaatactccatatagctaggagtatatggatcacacaccagcaatctatatggaaattggcataaaggagaaatatctagttttatgagtgccttatctgttttcttgtaggaataccgtgaacgtgtatgcagtggaattgctagctaccatggaacatcttctggaactaaagtaccacgaaagccaagatctgccagagaacctggttcaaagagagatactgtgaaaaagaaacctattcaatccagatcagctggattggaggatgcatgtggaacgactcccacagttaagagaaagaaaagtgcaactccttacaaagatccaatggctggtgaaaaactagagatgataacaaagattcgagctcaaagggcagccctagaaatagaaaagaaagaagctattaaaagggctaggtatgtctgcttattccatagttcaattgggtgggatcaacatttttccactactggtgattttttggcaacatatttttttttatattgcaaattttctcctcgcgcttacaagttcttctaactggattggattgttcttaataattttgtgaaatgtcagtcaaaaggcatatttccctgaaaattgatgcttactattctcacgtaaaaagttgttcataccaagggtattttcttttgtttgttcatcttgttcgatacattgactattatagttttgcagatgaaaaacagagatgtacacgcataataagtacttatgggaaaaaaaattcaaaagctctaatatgaacacctaaatatcttaaaacatgtaaaactacagatcattatgacttgaatatattttagtgcactatgcacttgatttcctgtttcagttatttggtactgtttgctgagcagaaaaactatacatgctatctgtacatccagggatatgttttttaagaaataatgcctgaagtttgcacttgttgggttgcacttaaaacatttaattctgtcactcaagtggcttctgattatattccttgtcattaggtcactgattgcagaagctgagaaggctgcaaatgctctggagactgttgcttccacaagcccttttgctcaagcatcacttatagaagctagaaagcttgttacagaggctagattatcacttcaacacgttgatgatgaagggcctgcagatagtgcttctgatgatgcatcacaagactcaggtgcgtctgatttgcacaatcacgacatggcaaatcaaaatgacgtgatcaagcaagagaataaaccagtcaatgggatggagcttcctccaagcaatgttaatggcagagatttctattttgacgtgtcgactctcactgaaacagatcaccttagagattatcagagaatagaaaattctatggaaagagcctatctgcttccttccgcttcttcagctattcaagacgtgaacgaaaatcacaggatgaaagattttaacgcacatcaattaatggttaatgatgaatcaataacaattgaccaaattgcatctgaagtagcagaaatttatcctgacgagccacaggaggatgacacgctacctgtgcagaagtctaaaatgaggtgggtacgtgggcgactagttgaagtggaagaataaacagttaccagaattatattggttgactaaactgttcaagatatcattatcttgcattccgcttctgctttgattactgttggtatggaccaaaatgggaaatgattgctgatcttggcacgtattcatggtgcattcaaccatgggaattagtcgggaatacgccatgacagagcctattatattctgaggtgagatgcttgtaattagtagttgccaactttagatattttcctcttcttgaatgtagtcaggttagccaaactgaaatcctaaaatcacggtgtggtggatgcatttatcttgtattagaacattttgtagctgtcagattgaggtcctacggatagccctaacacagatttcattaagtcaaatcatacgaggttgtcttgtaagataagtcaaatcatacgaggtcgtcttgtaagatattctgtagctatcattttttttctaggttatcttgtacctgagttcatttgtgaacttgtatcgagagaactactgtttctggctttctgctttgtgccatcggcaacacatctactcaatgtctgtgctaatttgagcctaacttaggccctgtttaattcagcttagcattattataatctgaattattagaagcaagctgaaataaataaacagatagcttattatgataagattattataatctataagctatattactctaatctggtaatccacgtgcttttttttaaggagctgtttgggaaacagggacttactttaagtctctatcacatcggatgtttgaattagtattaaatatagactaattacaaaacccattccatattcttggactaattcacgagacgaatcttttgagcctaattacgttatgatttgataatgtgatgttgcagtaaacttttgataattatagattaattaggcttaaaaaattcgtctcgcggattagctctcatttatgaaattagtttttttattagtctatgtttaatactccaaattagcatccaaacatccaatgtgatagggactaaacagttttagccccatctaaacaacctcctagattattgagtggctaacagctagcaaataactaatcttaatccaatttattgtaatctgacttaataatctatattataataattttaagctgaaacaaatcgagcccgagttctacagtatcaactcacgtatatgacatgctccttccacaaccaaagaatcaaagcccggcctaaaggaagtagataagcaaaatgtcttgctcttatcgtttccccttcagtttaagcagccgtgaaaatttaaattttaagacttaattttagagttattttggtattgttgtatcatagtttatttctcatcatttgcctttaaatcgtaaggatatgtatacaaattttatttacaaattatttattaatcactcataagccgttcagcttataacaagtataatctaaatgacaaggcggaagtctgtcctgttccactacacatctaccatcacatcacatgggggaggatgtatttggggggctcgttggcaccagaggagctggctcgccagcatcggaagcggcaggctcaccctggcacggtggcatcgacaggttgagaacctagcgtaggctttgtttgataaatgagataagaaaataatatcctacttttcaaagggtaatattgtatcataattatgtatttttcacacctcatttaatcctagctatttatctattttcttttttcaatttcacctctcataacctatttgccaaacacatgcttttccatgcgttgcactaaacgtagattaccattttttttccttgaagagtggactgaattttgaacagatcggtggactgaattttgaacagatcggtggactgtattgagtaactatctggttatctattgatatgggtagcggttattccgaaaccacggtgagaactgacgctactggagaaaccatctttggtcggtcggccaaatttcacaatagtcaaagttctattaaaaaccgggactaaaaaaatatctttagtcctagtttaaaagcttaggggtactttttgatctttagtcccggttgatgttattaactgagactaaagatcatttttaattccaattaaaaaagggtaggcagtgtcagacccctatattttctttagtctcggttggtaacaccaaccgggaaaaaagatcggcatacacggagatcgaggcgtgcgcgcggatcggatcgagattcctcctccctcccggttctatctcctcctcctctcctcactcatgctatctcttcctctccttctccccctccccccttatccccacttctcccacttctctgcacgcggcggcggcacgcggtggcggctagcggcc

SEQ ID NO: 23853 - DNA, 9703 bp, Oryza sativa
ccgggcgcggccggcggaaggcggcggtctgcgcggcggtatggccgcacggtaggtggcggcctcgtgcgtcgggggcgcacggcggagggccgggtgcccggcgcgacggcggctggcggctggcggcctcgcgacggcgaagcggcggccggcgcgacaggtggcggcctcacgcggcggcggctggcgcggcagtgggcggcacggcggctgctggatttgggttaattttttttgagaatttttgattcggatctgatatgtatttgatttgatttgtgtgtgacgtgaatatgtgatgtatttgtgatgaatttcgtagaacttgtgatgtaatttcttttttaagattttgtgatgtatttagagatgatcgatttgaggatttggaggagataatcgatttgggatttcatgattcggggatgggggatgaagtgaaatcaatatattaaaaacaataaaaaaataaaggagcaaccgtggcctaccctggctccatctttggtcgcggtttgtgttaccaatcgggactaaaaaggcttcatctttagtccaaccgggacttaaaatggatttttactcccggttatttcacccgggactaaaaatagcgatctttaatcccggattagtagtcccggttggaaaaccgggactacagggggttaccaaccgggagttaaaacgatttctccaccagtgtgaaggacggtaaaatatgtgttcctaatcactctattgtgagatagctcctgcgcacattcctgaactacttataccgtgtgattttctccactattataaaaattaaagatatttttgccaatcctttcgtacatcgcgctgtgcttgatacatagtattttcttcgctatgtttctgccgaattttttcatccatcacctccgtgatcgattcggtctcatacctaggtcacacgaagagcttcacttgatatgctcacagttctagtttgcccgatctttcggtaagttgatgataactacgatttgagagaaacgttgatgatgcgactacaaccgtacgagacagtgttgtgttgtaccttagcgatcgatacacctctgcataggttattgatctttctggtgcaaattatccttattcctacaagcaaatagaagaaacaagtaaaaataagataaaaacaatatgatattacaaataggaattgactacaaatggtaaattggggttctcgaagacaagtaattacacggtctagccgacacgcgtaagtacgtagcaatgtctaaactttaatctaaacaaaattcgagaaaccctaaaggggtacctaactatttaaggagatgggagaatgacctagggcctttaggatcatgctccactaggatggggcgccagatgaagttacaatcccataagtccattataggtgatgcaacattttgtttatgtgattgcggtcaaccgagatggaatttcgagatgaagttggaaccgttggaaagaagactccgagagctttccattaagtactcatggacccaaaacatatctcgtatgcatatttggtgaccgtttgacgtcagcactgctgctagtggctgaattggatttcataacttgatcttaatgtctcccagttaagttatgatataaacaatggttatatcaatagtagccatggtcacatattgctccttccttaaccggctcggccttcattcagctcatcgccaccaattgggcttgcttctctagctaggccacttactatctcactggtcatgccccatggggccaccttggctggatagccctggcgctctgaagcatgcagtttcctcgtgaaaaagaaaattcacggtgacatctataattttaattcgatctcctctcctctttataattttcttgttgcgatttgtaggactcatgcatatattgacttacatactcatacatcaattctttcatgcaatgcacgtgtgccacgtctctgctctttacatacccaatccttgctgtattgatcaatgttagcttcgaatctctacacaaatagaacaaataaccatagtaagaaaagttttttcgttacaagacctgatgaggacatcccagctacacttgacgtaaacaagggtgatggtttacgtcatacatcacatgaagaaaatgaagatgacgtaaaccaagttgatggatcacatctccgcaagaacgatcaagcatatcatggtccaatcatgcgcagctgtactaggataatacaacaagagttgaactcgctctttgctcaacttaacccaaattttagtgagaattttatactacctaaatgctctatctttgtattaccaaggtttacgcccaaggacatcatcactatgccaagaaggatgagttacgttgaggacgacaagggtaacatcgaggaggaatcaacccatgcccaaccagcagctgtttacgccaacaagaagatggtttatggtgcaaaggctcaaatttcaaggcttgtacgacccagccagtcgagagaccgggtgcatggcatacatggttggaaagagggaaaagtctagtttccaatgcatcaaatatcacctcaatatcattttccaataagaatttatgccatttttactgaagaccgcgcaggagctgaagggctgtgcacgaacccaagaaaactctttgcattctcatttatgttagccttgatgaccagaacgtgtcttcttatgttcacactcagttaggagggatgttcctagtataaatactcctctactccatccattagacaacttttgttcaactgaaaatctcatatataagagattgctgaagattgcataaatgccttacccctttgttcttgtgagttcttttggacttgtaagaaggctcctctggtgccccctagtttgtgctctacggcttccagttcagcttgcaccgtattgtgtggattagtcccggattgcggttctatgattgctcaatttgacaagtcggagtccaagaggcttcggatcgtgctcaccctcaccacttggtcgcatccaaccttggcaggtttaaagctagttatttcggatcgtggttctgtgattgctcagtgtgacgggtcggaatccaggaggcttcagatcgttctcaccctcaccacttggtcgtatccgaccttggcaggtataaagctagttatcttcttgctgctcacagctagttaccctcttgtgtttcggtttacactggcactctctatcttgaacctactgccgtgaagatcaagccacccctcgcgagtgtgttcgcatcaagacccatgttattcaatacaagcgcacacactattgtatgaaagaatctatttcgtaactagtactacagatttggttttcccatgtggccaaaatcaatttttgcttgcggacggatagcctgcatgcatccaaacgtatgttaaagatgatttgtgcatgcggacggcgcaaccgcatgccaatgatctgattttcgcatgtgggcgcttaagccgaccgcatgcggaaacaaaaaaaatcacgaaaaaaataaaattccagaaaaaaagccccaccatggctcgagctcgccgcagccgccaccgatgttcctgtcgtcagtcgaatccatggctgacatatccaccatcccgcaaccttcggccactgggatagaagaagacgagggagagagagtgaggagaggcggtgaggtttgtggggttggaggccgagcccgtcgacaccggatctggacctcccgagggcggcgctacccgatccactgccctcgctgcccgccgtcgctgcctatcgtcaccacaactgcaaccggttccgagggcggcgccaccggatccgccgccagccatcgcggtcgctccctaccgccacccgcctcctcgtcagcgtccactcatgcttggagatgaagagagagagagagtgagaggagagagtgagagaggagactaggggagagaatgagagagagagaggagagaataataagaggagaggaagagagagagaggggatagagaatgagagagagagaggagagaataataagaggagaggaagagagagaggggataggagttgaaaaaaaatttgaattggtgagagggaaaggacagtggaggggagaaaaaaaatctatgtataagaggggtatttttgcatgcggaccacttaagaggcccacttgcgaaaatgctccttaagatgcccggctgcgaaaatagactcatttttgcatacctgcgaaaatagtttttgcttgcgctcctcttaaggaacggtatgggaaaatggatggttgatttttgtagatgcgattagttacggtcatcttgttgatgatggtttgtcttttgcaatatgctgatgataccatcatctttttggagcatgacttgcaacaggcaaagaatctgaaattgactttacctgtatttgaaaagttatctagcttaaaaataaatttttacaagagtaaattattttgttttggtcaggcgaaggaatgttatgatcaatattctaatatctttggctgtctgataggttcttttcctattaaatatctaggaattccaatgcattttaggaagctttctaataaagattggaaagttattgaagaaagaattgagaaaaaaagtttaatagttggaaaggcaagcatatgtctattggtggtagattggttttgattaatgctgtacttttgagtttagccatgtttatgattttttttagataccgaaaggggttcttcgaaaaattgattattatacatcgtggttcttttggcaagggatgatcataagaaaaagtattgactcactaggactaggtgggatattgtttgccaacccaatgacccggggggtcttgggatacataatttggaaatacataataaatgtcttttaagtaaatggttgattaagctaattaatgaggaatgagtttggcaagacttattgaagataaaatatctttataatgagtctataacccaagttggcaagaaacggtaactcccatttttggttggacctatgaatgtaaaaagtactttcttaaatatggattcttggattgtcaacaatgggaaataaattagattttgagaagataaatggttaggcaacttggccttcaaggataaatatccatctttatacgctattgtccgaaggaaatcgttttctattgccactgtcatgggttctgttctgcttaatgcttcttttagaagatctttagttggtcagaatcttgtttattggcatgagtcgtgtgcttctattgtacatatctagttgaatatttcttctgatatctttagatggaattttcatcagaatggtatgttctcggtaaggccaatgtacctagctttaatcaataatggctgtatcgagaggaataggtgcatttggaagcttaagatgccacttaagattaagatattcatgtgttacttgcttaaaggggttgtgttaactaaggataatttggcgaggcggaattggaatggcagcttgaggtgctgttttttaatgaaaaatgagtctattcaacatcttttatagattgttattttgcgtagttcatatagagagcagttcagttctcttttggttttaacctctctactaatatgtcatattttttatgcatggcttttagtaatgaactgaacaacatgtacaaatgatgctaactttccttcacaattctcgactatacacacaaggtctcatagttcagttggtgatggacacatagcgatagtagcttgtgtcaatgacgaattctttcacatttagaccaagattcggtcaaacttttaagttatcaccagtgacctgttgttgtgttttaaagtaagtattccagaaattacagatggatagaatcttaaaaatttgactcagtcatatcgtatataaaatttcaaatatttgtattcacccgttgtaatgcacgggcatttagctagttagaaaaatttctaaagttaagatgctttaagaatcatattaattcagttgcacaagtttaaaataattaatactcaattaattatagctagtggctcatctcgttttaggtatcttctcaatcttctctaatctttttctctcaaacatagccttaggctgagtttgtttctctcctttcacaacttctactccctcgttttttacgcacacgcttcctggactgttaaatggattgttttacggttctgctaaatttgtggcgccacaattttaccttgatttcagtcgattctttgaccgacacgattgacgccgagattcgtgctcttgtacataaccaccagaaatacgataacttcaccgagcagatgtgttacattgggtactgctacatgctcgtacacagttgcacattggtcaaagtaagagaccgtataaatgagaacacgtaacgagagagggataaaatagttagtgttatataattactccctacttacactataattacatactatttacatatgtaattttagaacttacatatgtaattttgagacttacaatgtaaatacattaaaattacatatgtaattttagggacttacaatggaaatacattctgactattttttgatgaaaaatatggcgccatatagatacatagtgccttgtttattgcaaaaattttctatgtgaaggttgtttggaaaaaaatcatattaatatattttcaagatttttttagctaatacttaattagtcacgctttaatgagtcaccatgttctctgtacgaagggagagaagttcccaacacgtactaccgaacacgtctctagttaccccagttttgcattcatcaaagtagtactccattcgtttcatattataagttgactttttttagttaaatatttttaaatttgactaagtttatagaaaaatataacaatattttaatacaaaatagacatattatcaaaatatattaaaatttagttgtaacaaaactaatttggtattttaaatgttgctatttttttaataaacttagttaaacttacaaaaagttgagtaagaaaaagtttaaagctacttataatatgaaacagatggagcagttgctaagtcaattaaattgtcttgtagatgattgaagtaggagaaaataaaggtaccagagagagtttagaaacctagctatgactgtgaaggtcaaaagaagctagagagcaaagcagtagcacgacatgtggagactagagaaggaagatcacgtgaaaataagaagagttaagtaaaggaaagcttttgcatcaatatgtctggatgagctacataataaatacaatgtcgttaatccttttgctgaagaaaagttaatagaggattgatcttccttttgctgccttttggcacgtttcatcgttgatacttgtagtcgtagagcacgaataaaaagcatgatgaaatgtgggcaagcgttggccataaactttctaaacccttgaagttcaaacaagaaaaaaaatgagcttattctctactattattcgtggaaggattttttgaagttccaagatcaaaatttcaactgataattaattaaatgatgactagaatgtatgttgctaaaggacttttgggagcccttcctactacctctatgtacgtactccatatgaaagcactgcatgtgtctctctttccttctcatatattaaccatcttattgtcaaacattaaactatttttttcttaaattattattcgatttacgatcgattactccgttatatttgattatatactgatcacagaaaaaatgtgtttcaaccgttaaaatttaatgtttcatatgtgatagcaaaatatttcagcatatatttcactgtgtttaaaaaaataatgtttcaattgcttttttttaccatgtacgaattaacgtttcacctgtggttaactgaaccagcctttttttttgggaaattatgtgtatttgtagtagcctccggatttttcttgcatactttcagatgattaaggaaattgtactttacatgtacaaccccttttaattggtagtacttgtagagctttgacatccttcttctgctctccctagctactactactgatctatatccctcctgaaatcttgctaatgcttggttgtatattgtgtatctcaactgcttctgagacagttttttaaacctccggttgttttcttctacttcagtcatgtacaaattaaagatgtctatcaaaataaagatttttatatgatatttgcttaaaggggtagtgttaaccaaatataatttaataaaaggaattagaataatagtagtacaaagtgttgcttttgtttgcatgaagagactgtccaatatctattatttgaaagccatgttgctaaatttgtttggagaatcgtctttatttctcttgggttgaaaaagagtaatctctgtgtacccctgaaaactcactcaatttttttcatatccctgaaatttacccgatcccttctatgcccctgaaatttcaacttgatcccttccatgcccctatcgttacatttaccttcatttcactattatattatattatattatgtttggttgcaaatatcttttttgctcttgatgctctaggtttgaatataagcttaaaaaatgattgaaaattttgtttaagtgcacaatatgtgcattttatgaaactaatgagactaattataattagtgcagaaaattttgacataaatttacaaaataaaacaaatgtaataaattaaattttttatttgaaattttaataggacaatggatatttttgattgggagtattcataaaaaaattattgtgagcattggtagtcctatctttgtatgaatgctcatcatttttatgacgtttttaaaaaataaatacattttttatttctttatctaaaaaataattttatgataaataatgcagcgcacaacaaactgataactataataatctcctacgacaaacttttacatttttaataatgcaattcatgaatttctatgttcatccaaagggtaaatggtcatttttatagaaattagacggtcaactaacggtcaacagatgtgatggatatggaagggatcaaaactcaaattttggaggtatacaagaaagtaagcaaaattcaggggcatagaaggtattagcttaaatttcaggggtatagaagtgattttctcttgcaaaaaccacataatttttctcaaatgtttggggattggctgatagtcatgaattttaaagctaagaaatttatttggcaaaatttgctacaggacactcaaaagttatgtaattagctgggggacacccgaaaaacgtgaatttgcctgaggacactctaaaagtgtggtaatttgccacaggacactgggcgcattaaaatataatatccactgaattgatgagagagaaaccgcgtaaaatgacagttttgccccttcttttcttccccttccgcttggcgcttccattgacggcacgcccgccgccgccaccgccaccagcgcaagcaccaacaccacccgcggctccatcctgcgccgcaccgtcgccgtctccgccgccggcgaggcaagccacc

SEQ ID NO: 23854 - DNA, 27893 bp, Oryza sativa
  unsure (1)..(27893): unsure at all n locations
gcccactgtaggcgaccgcttgcgatggtcggggggcatataagcccccagcccgaccgaccgttgctaagaatttctagcggtttctctctcctaaacatccacaaattagtggggaaggttttcgacctcaaatctttgattgggttccatataaaaggtgtagagctcgttctcctccttcatttgcttccatttttttcagttttcatcggtggaatacgaagaaacttgcacttttataaatggagaatagtgtaggcacctttttgtttttttattttttaagcaaatacatattgcaatcttttacatgtttataaaagtaattagcacctaagtttaaacgttgggtttgcctctattaatttattttcattcggatgaaaaaggacgaatatttttattttttagaaatggatagacagtattctattaatgcttaaaattgatgtgcggttgtttaaatagtctgttcaactttaaattactacgtgattagttccctccaatttaaatacgttcgtgtttgaatcggtcatggatgtattaatggcaagctttattataggtcatggatcggacatggatgtacaacacgaaaagagctcatccaacgttcttgaaggaagcagccaaatttgttgagctcgcaaaggcacatgctgcgagcgagaatttgaggagcattttttgcccatgcaaagtttgtaagaacgagatcttgctgcaagatctgaatgaagtattgtcgcacatcgtagaacgaggatttaagaagggatacaagatatggacttttcatggggaagccggtggtcgtaacgaagagttagatgatttctgttttgatgatgcagaaaattttataatcgaagacatgtctcagtgaaacatccgggaatacggtggctcaggtatagagaatgaaggtattgatttcgatctggaagatatgttgcggcacgttgaaccagagatcctaactggtacaagacgagggttggacaattgggaagcgttggaaaaagcagcgaaggagcttttgtatgacgaagccaaaggatgcgacaaggactatttagtactgcgctcggtgcttgaacttcttagattgaaggccagacatggatggtcggacacgagcttcaatgatttgatggatcttttgggagtaatgcttcctaagccgaacctgctactgacgaacacatatcaagcgaagaaattgatatgtccattgtctctaggtgttcagaagatccatgcatgtgaaaatcattgcgtactgtaccgcaaggaattcgcagatttagactcttgcccaacatgtgggacgagtcggtacaagacgggcaacggagcctccgatggagaggtggtcgacaaagatgatgcaccggtggatgagaacaaaaagattcctaggaaggtgatgtggtacctgccagttaaagatcgcctgaagcggctatattacaaccgagacgacgccgagttgatgagatggcaccaagagggtaggaatattgacggtaagatccgacaccccgtcgatgctcgacagtgttaaaactttgatgcactacacccggaatttgcaaaggacccgagaaatgtcaggtttgcattgagcacggacggaatgaacccattcggtgacctaagcagcacacacagcacctggccagttcttctaacgatgtacaacttgcctacatggatttgccagaagcgaaagtacattcttttgtctataattatacaaggtccaagacagcctgggattaacatagatgtgtttctggaaccattgatggaggatatgcaagaactgtgggaggaagggttacgaatgtgggatgagtaccgtagggaacatttcactctgcatgccatcatagtcgtgacgatcaacgacttaccggcaaacttttcattctcgggccagtttaaggggaagttcggatgcctcatatgtatcgacaagacgtcgtacaagtacctcacctcgtcaagcaagggtgtttacatgcatcatcgtcagttcttacctcaaaggcataggtggtgtgcgaaggctagattattcgacaatacagtagagaactttctagctcctaaaacacgtacaggtcgttctgtcttcaagttgacaaagaacattaaggttgtgttcggcaagccaaagaagaagcccgtcaagagttagaaacgtacggatcaggacacaactgatgcacctgtagaggaaagtaaccagtccttcaagaagcactcaatttttttcaggtatcttgattactggaaagacatggaggttcggcatgccatcgacgtaatgcacctggagaagaatgtgtttgatagcaccattggcactttactggacatcccgagtatgacgaaagatgggttcaagtcccggaccgacctcatcaatttggacataaggcatgagcttcacccaaaagagctgccaaatgggaagatcgaaattcctccggcttgctactcactaacacctgacgagaaaaaaatctttatgtacatgcttgcatagtgtgaaagttccgaccggtttctcagcgaacgtcagaaaactcgtatctctaaaagatttgaccatctgtgggtaccatgctcatgattgtcacaagatgttaacagtcttcctacccattgccataagagtggtcaagccagttcacactcggttagtgataacaaagttgtgctactttttcaatcgagtatcacagaaggtttttgatcctaaagagttaggcccccttcaaacttttgcaatcgagacaacatgccagcttgagatgtttttccccctagcatactttaacatgatggagcatcttattgtccacatcgtacctcagattatcgagattggtccactatacctacacgagatgtgggcgtacgagaggtacatgtccgtgctgaaagggtatgtttgtaaccgagctcatccggaaggatcaatgatagaggagtacacaactgaggaggtggtcgaatgctgcatagattacatgaaggacgccgaacccatcggtgtgaccccctgtcacaccctgaagttctttcccaagcctaaattgaatttataatccacccgagaaaatattggtgtaaaagcaagagaaaccctaataaattaatgcaaataataatcggatttggcatgtggaatttttcttgagttctacatgtcgaaatacgctaacaagatttttagtggaattttcagagctctattaataattttaaccaattaaaatggagcacaagcaatattaaatccctagaaaattcattttcctttttctttctttttcctttctctttttcctccgaataggccgaggcccatacgcgccgagccggccacccgcctcctctcccctggggtcgtcgacaggtggggcccacctgtcgggcccgtccccttcctcgcgcccgcgccgccgcgcccgcaaccgccgccgcgcccctctcccgcgcctcccgggccacgtcgccctcgcgcccgcgctccccgcacccacttccctctctctcccgctcgcgcctgcgcccgagatggccgggattcgaattacgaatcccgcctctctctcctcccccactccccacgtcggccagcgattcccgcctctaccggccacgtccgagctccccctcccctattaaagctccaccgccaccccctctctctttttccccatctcgccgagctctctcgtgccctctaacgccctagcgccgtcgccctcctctctgccgcggtcgtcgccgctagccgccgtgccgagccacgccgtcgacaccgtcgtgttcaccgtcgtgcgggccgttccgtccaccccttccccgccgaaattcgccgtcggcctccactccgcgccgtgcgccggtgagcatcgccatggccgccgccttctgccggcgtcctcgccctctccgttttgcctctctccctctaatcctttcctttcgattccttaggtggttccgcagatcgtctcgccgtcgccgccgccctccgttgctcgccgtcgtcggtcgccatcggtgaggcttccccttcgtctctctctctcgcgccgctagtcgccgcgctgccgcctagccgccggtcagtcgctgcctaactgccgcttagccgcccgcgccaccgctctccgccgccggtcggtcgccgccggtcgccgtcccgcaccaccgccgcatgcgcgtcgcgccgccgtgcgccatggtcgccgggccggcttgagccgtgcccgcgcgcgccggccgcgagccacccccgccgtccgatctacccttgggtagatcgggaccgcccgttcggccgcccacgtggctgccgcgtggccgccgcgtcggcgcaacgtcagcgccacgtggtgcgccgtccttccccggtccgtggacccgatccaccatggaccagcgcccgcagccgctgacatgtggggcctgcatgtcggcgccgccctctctctcctcgggatttatttattgcgcaataattcaattaaggatttttctgtttatagtaaaaacacagtgaatcatctaaaattcataactaattcatccgagctccgtttaagcccattcaagtctcagtaaatcaagaaaaatgtgtagaattcattaaaaatggttttgttctctgtttcagtagtcttatagcctgtttgtattgtttgctttgtttgtcgcatagattccggctctcccgacgctccagtttaccttgaaatagtcgtcgaagttcctccagctgcatagcaaggcaagtcatgcttgtcgcttgatcatgttgatcctatattgcaaatgctctattgttttccttcaaattctgcattgttttacaataatcctatgggatgcttacctactgttatagccatgctatttacttgatatccgttcctttgttaacttgggttataacatgactagaggttggattagggattgcttagccatgcttagttcaactagcacacaatgggggaaataatattaatgtatagacttcaggttctagtgttgatgttggattagtatcaccgttctggtgttgcttaattaaaataaaccttatggtgggctgtgggtgcatggttttgctagttgtgtcacgcccggaatttctatccaaaattccaaacgcttacatgtgtgtgaaccctcgtccaggaatcagccgaggcacacaataacaaattgataatagagtacagttattactctaattaataagcgaataaaatgtcattacagaggtagatagttcctctcaatcaataaagatctaagcagcggaaaataaaataaacggcgcagacggctccactccacaggcagcttgaccaaggctacacctaatcctccacaccatcagcctcattgtagaactcttcctctgatgaatgattgcaagttgagtatatgacatactcagcaagccacgcagcaaatatgcaagtgcacaggataacaaaggatggcataatagggttccatttgcaaaagcagcatttagcaaacatttcagaatttaataaaacagttatgtaataattaaacaatattaatccaacactatacaacataccctgttgtataggcccaaccattctgaacaaccaccccggctgcacagttctatctccaaaccaggaatataccattccaaaccaggagctaaacaaattattaccagtttaagcatcttttactataatgagaggtgtgagactaatcacgaaagacattgttagacccgcccataaccgcgggcacggctattcgaatagttttactctgatcagaggtgtaccactgtacccacaagacacaaccccacatcatgtcaccatgtgcctcaataccaccacggtacctcgggaaggagttgtgacaatacccctcatacaacacaatccactgcagcgcaccttcctggttcataatcacccccttataaacaaggcatggactccccagcgacccccgtgggcttatctccgccacttctcagtctggtgccccgcaatgaaccatgctatacaaaagataaagccgttgcccacgctggcttgtggttggcacggttaatgtttcacaaccgaaactcgtgaaccggtccttaattgtcatgagcacgaccatcaaaaccatgtgctcacaacccaccattaccaggttttagttggcacattaattaattaactaatcacgattgtccatcgtgaactatcattaagccatcattaaataatagtgagtcataagttatcccaatagtgtgctaatgtttctaagcagggctaagcaattatttctaatatctagttgaaccaatataaataaagttcaaccagtcaaattattataacccaaggtatcaaggaataaagtaatcaagaacaaaagggctatagcaaacaataggttaattccacccaatgacattcgaaaataaatgcaatagttgaaaagaaataatagctttaaataggatcaacatgctcaaagggttgtttgggatctgtgtgacttgccttgctggccttggaactcttcaaactcttctccggcgaaaacggactctccggaaacgacggaatctaagcagaaaagagcaaaatcaccaaaacagcacataaacaagcatgaacagtacatgtggatatttttaatgtatagatctcaattttagaaaaatttagagacttgaaccaactaaatcggagctaagatgaattagttatgaatttttaaagattaaatcggattaaaacacttatatcggtttaaattgaattatgacgcaataatgaattatttttgaaaaggaaaagaaggtttattgcgtcagcgggctagggtttcggtggaccgggcgcacgggcggcggttcacgcgaacggacggcccagatcgatccaatccaagacggacggccgagatcgaacggtccacgaccggctcacggcggacgaccccgatgacgtcggcaatgacgtcaccgacagcggcggcggctcggcggagcggacggctcgggcggcgcacgctcgccggcgaacggcggcacttcggcacaaacggagggcaccagcacgtagaggacgacgcggcgaactcaccggtgaccaaaacggcggcggaagaacaacggacgatgacggcgacgaggaggaagcggcggcaaccttcgggtcgacggtgacggcgatgctccggcggtcttcggcggtggcgaaggcccacggcggtcggcgacgaggaaggaaagatcgggaagaacgaatccgagacaaactcgaatccaacgctttccaaaacgatttagccaaagattccaaaggagaaaaggtagaggagatcccgaggatcatttcccctctatcaattcggccggaaacggaaagggacggccggattggaaagcggcggcggcggcggcgcgctagggtttcggccggaggaagacgacgggcctgacaggtgggccccacctgtcagcggtagcgagggcgcgcacgcgggcggctgcggactgggccggactgggccgaggagagagagagcggttttgggccgactttcggcccaaagccaaaagaagattttttaaaacctttttcaatttaaattatttcttaaatgcaattccatttattaaaaatactttcttagctcaaataaatcccagaaaaaatctaggaattatagaattaagcaaagtatttaatgaaattttatctggcccctttttatattggaatttattaattaaaattagatcttctcttcaagacttttaaaataaattctaaaaattaaaattaaacaacaatttatatattttgaattttcagggtgtgacaagttgcgcccatggcacttaaggaccagatcgcgggaaaccctagaagaattcctcgtacttaccacaagccagcatgggcaacggctgggcttgtagtgtagctttcctctagctgacgcatccaggcaagggtgagcgtgatggagcggggcgggccctgtgacggcctctgtcgcttccggattcacctaggcacgagaggggactgcccgttgcccgctggggacgggggtgaaacctgaggtgtggtgtgcttggctagaggggttatgcgaagggtcctatcacggcctctttccggtatgtcatggtggcatgtcggcgcacggaaacgtgtcgtggggctgtgtcttgtgggtacagttgtacacctctgatcagagtaaaactattcgaatagccgtgcccacggttatgggcgatcaaccggattcaccgtgattagactcactctagattagtctaatggaattgaataatataggtggatggttgggcctgttgcaacgtggtatagcgttggacagtggatgattaatattgattaattgttacaactgctttattgctttcacttctgtttataaatgctcgctttatgcaaatgaaccattatagctgtcccttgataattccctgcaccatgcccctattccggtatgacttgctgagtacagtgggtagtactcggccttgctctattttccccaaaccccaaagttcgagtatgcgtcagatgacggtttctccgaggagtaggcttcgtccgtgccgtcgagtgtgcctgtggaatggtattcccgctgcagtccaagtccagacttagctccagttatcctttatgttttccgctgcatttatgtaagacttttataatgtttgtaagacatggatctatatgtcaactttgtcgtttgtgtacctcggccggtcctggacggggactttaatgcacattctgcttggaattctagttgggaatttctgggcgtgacaccccccctttacacgagggccagttggctgggacggggatcgtaggcaagaaaaggttctacgatgacgacttcaaagatgtagcggaagcacatagcagtgttttgcaacaactcaccatcttagagccgtacattcaggaacacatgaacgagataagagcccgcaaccctagaagaacggacatttggatttgtaaagaacagaaacggaagtttcctaaatggttgaaggagaaagatctgtcgttgggtgattcgctggaggaaaaaactttgcgcaggctagcaaatggcccaactagccttgtgacctcatggcaagggtacgacatcggcggatatggattttacatgatattcaaggacaggaaaagcacaactcagaacagcggagttcgggtggaggtgtttgacgcattaggtgagaagaagtcttactacgggatcatacacgacatttgggagctggactatggccttaacatactgatcccagtgctatgatgccaatggatcagagaacagaacaggcgtattcatcgatgactacggcctgatggttgtggatcgtagcatgctaggacacaaggatgatccgtgggttcttgctgagcgggttgctcaggttttctatgtcagtgacccttccgacgataagatggccattgctgtactgggaaagcaaaacatcgttggcattgatagcattcaagacgcatcagattacaaccaatacgacgacgtccctttgttcacaggttttcctaaccggatcaaggaagttgagacaagccttgatggagatctgtttttgtctgcgcggaaggatggtgtttccaaaattgtcaaacattagtgagatgtcgatcctgtgtactacctattttgtaaacgattaccggatgaaacttatattgcaaatgagatagggtatccatgtttatccgtactatatgtcgttttgaatttattttatggtccaatattttatttatattaatcatatcgatgaataattagatgcgaagaaaattcatgtctgttttaattctatgttaatctatatttgtattttgaataattcgtggtttaataattatacttattaattaactataatttacatgggactataacaaataattaactatttttcaatgtgttatagtcaatataataattaatacaatcctaggcaaataaagatatttttttaataaattgggctttttttcttcccgtgcgggctcgaatcgattattccgtgcggcggcctaagcctcctccccagcatccaccgccgcctcctccactcatcggcttcctccaccgccgctgcttgcatcctctcccccccagcccaccaccgtccgccgcctccgtcccctcgctcgacatcgccgccaccgctgcctccctctcctccatccccctcactgcctccctcccctccatccccctcgttccacatcaccgacgccgaccacctcatccccgtcgacgtcgacgctgacgccgaccacctcatccccaccgacgccgacgccgaccacctcatccccatcgacgccaccgccgattgcctcctcgaccgacgctgccgacgtcgccgaggccaccgacggcggacctcctccccaagccgacgacgccaccgaccgacgacgccgccgacgccaccgaccacttcctccgcaagccgatggccacctcctccccaagcagcggccacctcgcccccaagcagcggccggccacctcgcccccaagccgccggccgcatcctacctcctccccaagcctcctccaggtacccctctcttcgccgctttcttttttttggatgatgcagtggtaatggatggaatgatgcagtggaatggatgattgaatgatgaagtggatgatgcatgcagtagatgcaatgttggatgaattttttgaatgaatgaatgattttaggttgaatggatgaatgaatgttgatttgtgatgttgagatgatgatgatatttgtgatagatagatggctgtttgtgatagatagatgatatttgagatgatgatgatatttgtgatagataggacttgtgctctttgtgatagatagatgtatgtctatatgggatatatggctgttttatgtcactgtgggtttttttttttctacacatgatgaaatatatgcccctgctgaaatataatactaatttgcaaatgatgctgttatgcccctgctgctgttgtgcatatacatgatgaattatattttgcttctatatgtttatatatatgtgatgtacatatatgctgtttatttttgctgtttatacttgtttatactgtatatgctgttccgcacaggttttatatatgctgttttatacatgtttattttgggtgatatatgtgggctgttttgggtttattttgggtttattttgggctgttttatgcctcactgtggttgatacatgtgggtgattgttgtgggtgatatatgtgggctgatttatatgtgggtgatatgtgggctgttttatacttgtgggtgatatatgtgggctgttttatgttggtgataaatggccaatgatgaatgctcaaagaacagatcatctacacttgtcttctgaatttttttgggggcaatccacttgtttttttctcaagaacagaacaactacacttgtgaaatattttggggggcacatcacttgtttatttttgcttgagaacagacaactacacttgtgaatttttttgggggggcacttcacttgttttttttcccacataagaacagaccatctacacttgtggccatatgctttcatagtgtgcatggtgatgaatatccttaccaatcttgctatcgttacccatcttacgttccttaccgatcttgctttccttaccaatctcctaaaattagatataggaggtgtagttcgtacgttatcatgccgctataatatgaagtgttctggttgccaagttggcttggtcggtttagttcctggacggaaccgactagtacaaattggaaaaacagaacatttcgtcaacatatgacatgcgttggtcattcgtaaaatgtgctggcacgtctgttgaaagatagacctctgactcgtacatgcgtcggcctcgtggatggaccaggagctcgacattccttaaggtcgttctttccgacccatacaaggttccgctgcctgcattgttccaagagtgtcttggacaaaagcaggaagtggaaccttgttaaggtcggaacgaactgccttaaggaagtcgatgctccaggtccgtccacgaggacgacgcagctaggagttagaggtttatatttgaacacacgagctagccatgtgatcaaaacatgtttttactttgctgttaatatgatagtttagtttagtggttatgatagttcagtggatttgaacgaatataaaattgagttttaaattattccattgtaagaacgcgaatcgaagatgtcaggcaagacagctccggcgggcacagaaccgacggtcaataaacctaatgggcaggacagcttcgtcggacacagaaccgacgtcactaacaatccccaacacaaagaagatgccgggaaggtaccggcgtcgagcgaggaattgtggcgcacaccgagcgacccgtttgagctagaactagcgcaattgcagtatgaaagacctgaggatgaccccgattatattcctatcaagcaggcggtaataacttaatcctatcgaaatatatattttgaattgaactttccccgacgtagcggtctaatgacttaaccgtgcagatggcaacccgtcgtcggtcaaaacgaagtgccgtcagggttgaacctgattcggacacagcgacctcgggatcaccgcaaacggacacgacgacgagtggtgaagcttgtccaaagaaaaaacgtggcgagaagggcaggaacctcttgccgaaggagacgtactacattgctgctctcgacgatgacggcaaacccgtcgagccggaacatgtaagggcgaagtttagcaccgcatgtggcgcgctggcaaggcttcatgggcctctcaacgtggacgaatggaagcacgttagcattcacatcaagaacttaatgtgggaaggtctgcaggagcaccttatttatccgcctgggtcggagtcaattggccggaaatttgcactgcaaacaattgcccatcggtggcgacagtggaagtcggacatggacaccaattatattcagaagaataagactccatttgaagaatgtggcaacatttcagcagctgagtgggacaagttcgtggccaagatgacaacgcctcaagctctagaaaggaggaagaagttgttggacctggcgaagaagaaacatatatccacacaggttagggtcaagtggatacgccggtcacgagaagaaatggcgagctatggaggaaaagtttgtggccgaaggcaaacctttgattgtgcagcccataaataagagaactagaaattgggtgtgggcaagaacttcggggcaagtgacagaagagggtgagatgctgttggactgtccggacatccagaacgtgaccacgtctctccagtagatcgtccagaaggagaagaccggtgagttcgtccctcgacggcagcatgatgagctgaccgaagctttgggaactgtagaacactccggtagggtcagaggacagttgtgcaggacgaattggaaggtagggtttccacagtgtcggtgacatgggaccgggagtatcatgactagaggtttgggcaggagcaatcacccacgtggcctgaccccctcgggggggtcgggcccgagggtgatgaggccgcccctctctttgtctccccgagggatcggaccactcccgtttcggccccgagggctgaggcgcccctcaccgggagaccgcgcaggcccccctttgccggttcggccgggggccctgggtgagattctaagctcctagtctgtggaaagttcgcgagaatggaaaaagcacaagacacgggcgatgtatacaggttcgggccgctgagaagcgtaataccctactcctgtgttctggtggatctgtgtatgaagaagctacaaagagctgtagagccagagagctcttactctagaaaccctcttctcccttttttcctctcgtcggatctactctccagatcctctctctctctcctttcgtcgtccctcctttccgtccccccttaagtgggcaaggtccttttacattcgtctacggcgcggaagcggttctcccatccgagctcaccctgaggtcccctcgggccaccatgtactgcgaggctgatcaagatcagcttcgcagagatgacctcgactacttggaggagcgaaggcggcgcgcggccctccgagccgcgcgctaccagcagagcctgcggcgctaccatcagcgccacgtccgggcccgatcactctgcgtcgacgacctcgtcctacgccgcgtccaaacgcgtgctggattgagcaagctctcaccaatgtgggagggtccgtatcgagtgatcggcgtcccccggccgggctccgttcggctggccacgggcgacggcacagagctgcctaacccgtggaacatcgaacaccttcgtcgcttctacccctaatggagttcgggtgtcaggtttcgggctcgggccaaccccgcacccccttcaggcgtgcagggttggccgggggctaccacatatgcatattttttcttctatctgtatttcaataaaagcattttcgattttctaaaggttgtatctgtgctgttgtttccttttgaagaatcttgacttgaaataggtcactcgtgctcaatcctgccctcgggggctcgggtcggctaaaatcgccaaaaggggccagaaccgagccgtgccccggggcgtggtgaactccgggggggaatcggcaaaaacccacaatcgggtcacccataaccctcggtcaccacgctcccggcctggccagtctcgacatgtggatctccccaggcaccagccccgacccgagccatttgaggactgggacctgggcacgagcccttgttcaagctaagacacaaaaggaccacggcacagatcatcctcgttctcaaacacacagcaaaatgaaattgacacagaaatttctttattttggttgcagattaagttaatctatacaaaaaggaggcctgaaggcctcggaagaaagaaaagaagaaaaaactatttaaagattggcgggggcctgggggctcactccgatgcacccgggtcgccagcctcgtcgccactgtcgcccactccgccgtcatcgtcctcctcatcggagttgagggcgaacgcgagtcgaggggccgaaccctcgaagctgtggacgatatggttggcggcgtcccggacctgcgcgcgcgcgccgtcctcggtcccgggagggaactcgtccagcgccgtccatggggagaagtcggggtccctggcctggtaactcgccagtacgagctccaccgctcctcgggcgaggtccctcgaggatgacttaatcgtcctctcgagctcctccgggagccgctggagagtcccggccatctccgagaggcgttgggcgaggcccccctggttggcggcgtacttcacagtccgcccgccccagagacccgcctgccgcccggcgcggtctaaacgggacacggcgtcgcgaagcatgctgggccctatctcgcctgccaggcgaagggcctcgacctccccggtggacgaattcagcgcgccctgcagatccgcgatggtgtgttcggcagctgcgaggcgggcggctaagtcgctgtcgcccgtggccgccccgccgctacgcgcccttgcatccagctcccttgcctgcgcctcgagttcagcggcccgctggttcagtgcggccctctcggcgcgggcaccttccagattgcgacgcgcttgttcctctagcgcagcctcacggagggacgcgctctccgccagcctttgcgccgcggcctcagcctcctcgagggctcgctcccgctcgatgagcgcatcttcgcggaggcggagtgcggactcctcttcggcgcaggcggcttcgtgcgccgccagtgtgacctcccgaatagcaacggtggcctcgcggtccgccaggtccctctccacgacgcaggcacgctctaccatcgccatggcacgggcctcaagggcttcttcgcgccgccgggatgccacctcggtctccgccgcccgccgttctcgggcagcggcagcgtcaaggaccccccgggcggcgtcgagcttcttccctagctccgcctcccagctcacgtattgaaggcggaggtcgtcctgcgcctcgttcatcacggtagtggcgatgagggcagccccccgctcctcctccacttccctggcgatctcccccagcaccttccgacgggcttcgagctctgaggcgtgccggcggtgtgccttgcggcccacctccaccatggcctccactgagcgtcgcccctcttcgacacgcgcccatgcggcgtcgagctccgcccgctctgcttgcagggcctccatctgggcacttaacccgtccaacaccgtggtgtttgcgacggccaaggcctgcagaaggggctctgcgctcagtggggcagcggaaggcgtgggggagagccgcctcggtgaggatgccgcgcggctcggcccgccgatggacgtgccggactcggggacgtcccccggacctggcttgtcctgagcgtcgcccgagggagtgggcccaagcgatgcgcccgcggcctcgtcgcgagctgcctcggaagtcgtcgtcgcctcggcctggcgaagtctggcctcctcccgagcggcttcttcagcttggcgagctcggacggccacctgggcagcttcctcggcttcccgaaggcgatccgcggcttcttgccggtcaatttcgcgggttgcctcggaggatgtcgtcgcctcggcctggcggagtctggcctcctcccgagcggcttcctcaacctggcgagcccgggcggcctcccgggcggcctcctcggcttcccgtaggcgatccgcggcttctcgccggtcagattcccgcctccgggcctccgtggtcgccgcattctcggcctcagattggccggacttggattggcaagaaggacgcgacgggatctcgctgaagcagaagaaaagccagaagacaaacaagatgggtgaatgaaaactcgcgttgggagaatgaatatagccacaatgggcgtgggacgaacctgcgaaggggtcggttaaacgaccaccttggaggggaaataaggtttccccgggatggttctgtcccccccatcttgcggagccgtttcttcttccgctccccctcgggctgcggcgtcggcgtggccccctccgggcgcctgctgctgacacgcgccgccccgccccctcggggaggagatggggaggaggtaccctcttgcttcctcttccctcgggcgtcggcagggcggctgccccccgagcccccatcacggggcccggaagcacgaccccctcctggggtagattgatctcccttgcggctcccgctcgcaccgtcatggcccttaggagctcgctcctctgaggccccgaccgccatcatgatggtcaggatgttggcgcgatctggatcgctgcagagggggaggactccttgggggatgagggatgcctccacggagctgagattcagcacccgttggatcattaccttgaagtcttcagggacccagtcccatttgaccccccggtgggtcctcatacagtcctcggacccagtgtactcccaggcgccccgggcgcgccgctggagtggcgcgatccggcgacgaaggtagtcgccgtacaccatcgcccctgtgagcccctgggatcgcaggcccgccaggcggtcgaggacggcgtcgtagccatctcccagatctaccggcgcccgctagctggaggcctgcgccgggggctggctcggaagtcggaggcgcgcttcgtcggcgaggggggtgtagaaccagtcgctcttccagtcatcccacttcttgcggaggacgcagggaatgtagcggttcagcaccggcccccgcggctggaagtagcagccaccaaccaccgacggcggcgacactggctgtacggtgaagaaccaccggaacagccgaagggatgggcgcaccccgatgaacatctcgcacaggtgcgcgaagatggccaatgtcattaccgcgttgggggtgaggtgcgccatctggagatcgtaaaactccagaacatccatgaagaaagaagaaaatggcggaaccagccctgccattgcaaaagggaggaagaagacggaccgccccgggtagcgtggcgccgggtgtccctcgcccagcgtgactatctcccggccggtggcagattccggcatgaagcggcgcggcagcccggcctgcctctcgctcacgatgcgggaaggcggcagcacgctaccatcgagcggagcggagccccgtgccatgacgccggaagaagagatgtttgagagcgagcgcgtgtggcgagggtagggcacaggaaacaaggagttagggcgcaagcaaggggaataatggcgagaggaaggaagcaaatctcttcctcggtgtctttatacccttgccaacgctgtacccggctcctcgcttctcgcgcccactatctctctccctcgtttctcgcgcccacgcttccactaatcccattcgcccgcttgcggcgcacgaggtggatatgcggcagtggcggtcgagatggaacatatcgtgcgcgcgttaattacgctcgccgaccgaagcgccatcaccatatctccaggcaaaacgaaccggctcgtcccgattcgcgtgctactcgagtaatgtggcagtcttgaagagaccgctcattattgacagccgagttaccattgccgatgtgtgtgatttgcgaccgttgggtttctgcccaactgtagagaccagccccacttgtcaccaggcctaagtaagtggcgtcacgcccgaccgcttccctcgaggagggcgatcgccctggcataacgccgggggctactgtcggtgacatgggaccgggagtatcatgactagaggtttgggcaggagcaatcacccacgtggcctgaccccctcggggggggggggggtcgggcccgagggtgatgaggccgcccctctctttgtctccccgagggatcggaccactcccgttccggccccgagggccgaggcgccccgaccccttgtgggttttgcgccgcgtgtataggttaggtgagcacggcggggctcacctaaccgcatttattgcggtttgaacgagcgcgtcacgccgaatgtaacgcagtgcagcgcgctcgtttatccggtctgtgaccagtcacagaccggtcagatcgtgggttaggtggcgacaggcggtctgacgcacgcctcgccccatcccgtcaggatgagagcctccaagcactcgtccctagccggagccggcgtgttagctcctggagatggcacgttggtcccggtcagatatatgccaggcttcatcccaaccgttacaagcaagatattgtatgaagaagggcgaacatgcagattgctagactgacacgtggtggacaagaatgaccgatttgtgaccggtctgacactggtcatgtcgtcggcagacaaccatgttcccacgttgcacctgcttccggcggagtggaggtaggtatgggccatcccatcagaaggtcattcggacagcagccattgcaagtctccgcccatttatgaagagatgacagggtgatccccgaggtcagacgagtgaggacgcgtggccacactaaaaaacaagcagtgtttttagctttctagagaaggcaagccaagtttgagtaaagataggataagtccccaccaaaaagagaggtggtgcatgtggtatccccttgagatataaaaggaggaccttgcccactgagggaggggagaaaaagaaaaaaggagagaggatctggagagtagatcccacgagagaaaaaagggagaagagggtttctagaggaagagctctctggctctccagctctttgtagcttcttcatacacagatccaccagaacacaggagtagggtattacgcttctcagcggcccgaacctgtatacatcgcccgtgtcttgtgctttttccattctcgcgaactttacacagactaggagcttagaatctcacccagggcccccggccgaaccggcaaaggggggcctgcgcggtctcccggtgaggagccccacgctccgtcacacaggaagcccaaagttacaagaagcgcgacgcctacaaggccaagatgcgccaggaaatcacagatcaagtcacacaacaagtcacccaacagttctacagtcttgccgcacaacatcctcaagccttccctgacctggttcctcatggttcgcagtcgacacagatcccaagctctgtcgagtcggttgaaaatacaacctacccggtagatagtataactggtccgacaccgtgcaaccttgtcgttccgatagggagagcgggaaaaacaaaggaggttgcgtctggattggctatatcggggagacagttccataatagctcaattctggtggactatgcaagggttcaggtcgcacgtgttcatggcgaccagatgtcgttggagcttgacatcccaacaccagaggggattgaacttctcggggatgcggttaaccagttcatactctggcatcgtcgtgacatcatcctcactggacagttcacgttgatgacaccagctccattggtgccaattacggctgcacctcctgcaccaccgtcccctccgatctgcactaccccacccggatctccactcccacagatatcaccagttagaggtccctctccacctccacaacaagtagcacctaactccccaactaccctacctcggcagccgtctcctgctcctcagtcctatcttgtcccaccccttgacgaacatgtgccacctccacagccagatacatcaaaggagcagccaaaaacctgtgaagcccgcaagctcatacccgttatagtatccacgtacactaaggagaaaatggcagagtatgagacacggatggttttgcaatctttcaagggtcgagggggtccgctaaagccagttggacctgatcagtattcggacgcacagaagagcgttgtaggtcttgctgacaaaatgcaatcttggacctccgatgaagtgcctaaggagtatgaatatggcaagccgtttttgccgttcaacttgatgtgtgaactcccatggccaatgaggttgatgcatgagtggtacttgagggcaagtgagttaggtctcgggatgattactgtgcatgtcccgggaggcgctttcaaggatggacctaatgcaaacttcgccttcagtttcaaggacctccacgcattccttaagatggataaaatggatatcaatctcgtcggcgcgtggtgcctgtaagcattgcatgtacttcgttattacccaatgtgtgccaatataattgttacttattctaacttccaaatttcctcaggtcacaatgggtagacgctcaaaaaacgggggcctcaatcggttacgtaaatccaacgatggtttgcgagacggcccacactgtgcggatatcggaggatagtgcggtactaaagaataagacacctcaggaggaaaaagattacatcgagcgtctgcataagagaaagatggccgaggtgggaaattacttggccacctcatctctcgcacactccgacaaacaagtcatcatggtcccctaccactttgggtaagcaacttcgacatatttccgttcacatattaataacagcacatgaaaatatgtctaacataatttcataatccgtgttcgcagcgaacactacatactattcttcgtctatccaacagaccaaaccgtcgtagttcttgatccagcggaccatgacaaggacgcgtacatggagttcctatgcttgttgaacttgtaagttcgaaacaattttcgtaaagattccaactttccgtaaagatcattaaagtagatttatcataagtaattaatttatttttgtagagcacacggccgttataagaaacatggcgggtacgtaaagaatccaagtagagagaaattgtacataaggggacactggccggtatgtcagcatttattcggtacgtacatcacgattgtcacttcttatttctgacgtgtccacttatgtatgcaatgttataagcaacctagcttgacaaacctatgcggttattacgtgtgcgagatgctcagggtcaatgggagatacagaactgagtttacatatgtaagtcattaaactctcctattgcaaatagttcattaaacatgactgtaacacaaatcatttgtcttttaatttccgtagctcccgagtatcccttatagtgcaagttggttcgatcagagaacgcttatcaacttgtgcgcggacttgtgccggttcattcgtcgcaacatctgcaatcatctaggagagttccatgatcctcatagcgtacttgctacggaccccaaattcaagaatctaagagagtgggagaggcaacatgctgtggactaaatggatgtatttgtcgcgagggatgcttgtaataaacactatactttctatgtaatatgatttaatttgatgtttcggctaattttccactaattttccatctattgtcccgtgcgggccacctaatttgaccacacgggaaaatagattatcctgtgcggtcagccttactgcaccacacgggataatagaatatcccgtgcggtccgtataaccaatccgcacgggataatcgattatcccgtgcggtcggcacgcccgcacgcgaaaataaagattttcccagacgatgagctgcaggcgggccgggcgaccgcacgggataatctatccaaccgcccggaaaaatgggtattgtagtagtgtattgttcttgctcttacaaaaaaaagccctttcttttcctagaatgttggaccctctctcttggagtcataagcgaagtggcatgataagatgaagcaattatcattccataaatcttgtgccaaaagcaagcacagaaggtctagataaagctagccatacccacaaatgatgatactacccgttatgatggcagaaaaaatgaacatatggagaccgaagaggaaaattaagagacccatagataagagaagggtgaagagccaatacggtccctgaagtttcgcttcgggctcaggatagtcctcgatgtttcaaatcgtccaaataagtcctccaaattaattatttgggtaaatatagtccttggacccacaaaaaatgccgggtgagcatgcggagtcatcatcgcgtgcagcggtatgaatggaatgaaatgaccattctacccttatataccatatggaaaagaaagaaaatacaaacaaaaaaaataacaggctatcccaggccagcattgttgcggatgggtggccgacaaaggaatttacacgatcaatgcttggctgcagcaatcgtaagtgacaattctaaaatgatcatacatgtgtgaatcatttatcttcttcttttctttcttttctatatggtatataagggtagaatggacatttcattcataccactgcattcaaggatgacctgcgatgctcacatggcactttttgtgggtccaaggactatattaacacaaacgattaacttggaggacttgtttggacaatttgaaacctcaaggactaaactgagcccgaagcgaaacttcataaactgtatttgctatttgcccataaaagaaggcgaaatggcagttgaggtgtggtggaagtgatgcatgcacagaggcttacaccatttgtgggtgagaaaaaaggaaactaatgcagagaaagagaagaaagatgagagctgccaacagtcttaccaactagataaaaagaggcttgagttatataaagagaggctaatttacagttgaagagcatattagaagaaaagagatcaaattatgacaatagacattccttctatgcctatcccgcagcagctgttctacatgtaacttttgttagtagtagcaactagctagtttttaaaaattgatcatgcacaatagatataccatggctagctagctagctagctagctatataaaattctctcagatgaccttgcaagcactaatcagggtatccattacccatttgttatgaacattagcctttttgttgttgttgcttactcataaaggtacgaattgattttcttttttctgaaaaatgtcgtgcttctttgttgtgatcaactacttcatcttcagtgacagacccactatgtgtttaggccattgacagagtgcgaatggctatgcacaattttgtggtgtggcaaaagtgaattcatcaacgacgtcggacgatgattcgtcaagtagccgttgaaataaggggcaagaatgacttatcatggagaagattgccaaaccgttaaatatcagatcaaattaagatttttgtttctcatgacatcgtcagatcaaagggacatctgttaacggcatgtactgctaatggatcgcatgggcccttccatttctccacacactggtggcaatgtctaccggtgagtagggatgaaatcagttcgaaaagtttcctgattccggacgtgttttcagaaataggaagtgttagtcggaattttttcagaaactttcgaaaatggacccaaattcagaattcctttcttggaaaaaggaaatgaattcacaaggctactatatgttggaaaccggaatccattgtaatatttccagaaacgaattcggaaactttcctgaaacaaattcaagttttttcttggatagattcggaaataaaaaaaattgtcatgtacaactgattagctttagctttctgtactctaaatgtttagatttataccatatgtattaagatgcttaactaaatagagatattttcatctgacctcgatcgttcgtgcacagaggtcaccgaaaaaaacaccgatcgctacctaccgtaaatgtaagatcattgcagcgaggcaatgaccgttcccacgctagtgcttatatgtccatttaactcattatatctctgttcaaaatgggaaacttttttggttttgctatatttcttgcggcaaatttcttggagaaaaactttcaatttttggaccactagatctgctccaagattcgtggttttgctagatttcttgcgacagatttgctggagaaaaacttttaatttttcgactgctagatctactctgagattcatggtggcaggccgtggaaaaatttcagcaaatattcgataggaggatgatttgagcacagaacctccagcaacttagctttaattgctagccaagttacatacaatttacgatataattacaatatagttattagcatgtagttccatttgaaagattgttttcctaaaaacatatgacagaattttatatacttattttttggaaactaatttttatccctttcttggataagttttaacacggcagtggcatggaaggcgctggtgtcgatggtgctggtgcagattttcatcatggatacgatcccgctattcaaggtgtcgatcgggtgagttcactctccaagctggagctcgacatcgacgagcgccttgaccacctcaacacctcatcttccacttcctatttctcctccctctttattctctaatctgctgacagctggcgaccgagattgccacggttgaaattaatggatgagccttatcccattcgaagatttatttttgagtaaacttcacaaaaccccaggtttccccaggttttgagacaccaacaacatagaaccttaggtattatgatttgtttcgagaaacactagattttggtgcaaacttttttcaagaaaccctatgtttacatcaaatactcataatttcattattatgcatgatatatttagtatatgtgttcacattagtaactcaaaatatatatacctctttgtgtactttatcttcttcctcactcttgcaataataccatttaaaaatcgcaacacaaccccttaataatgatacattaaccagttacttatacacagccataataccaatgctcgctaaaataagtccaacacgtatatcaggaatatctcatattattttttacaattattatgcatacgtatattagtcaaaaacaatgatgtaaggttaaacatggggcttcttgaaacattttccccaaaacctagggttatttgaaaaaaatcttaatgcctggggttttgcattacgggtgccttaaaaccttgggttttgtgaaatttactcttaattaattttttttcttttgtaaaaatcacaaaagctcaccttatgtgatgacatgcatatgatgtttagttccaccttgcctattgtaggagagagaaacctccttataagggacggtactctcctagccacttgatgcatgtgtggtggagagaacaagagaaatactcgcgctcgtctcgcctggcctggctaggcggcgcgcgtacacgacattcgcgtgaatggttcctgccaaaattcgtttctcatccttgcacagatgtttcctttgacatttttgttttgctgcgaaaatcggttttgattttggaaacaccccgaataatncnnnnnnnggggggggccttnagtancatgnnnnncaggnnnnnnncnngngnnnnatctnctnnnnntncncnnnnnnnatntnnnccntgcctcttgatcacgcatgctaatatctctataaaaacgagccctcgcctccttgcaatccacgcggaatcaattaacctcctcctctgcaatgcgctgtctctcgtagtttactctgacccgctctccgcgtgcaccggcgcttgggagagctggtcttcggaaccttcgccttcaacgtcctgcgctgggagaaagcgacattaaggtttttgggcaacgctttgtgagactgcttgttgttcgtccaccacggctcgtcttcctcttcgctcgggtgttgcgcgtcatcatcaacgttcggtaccgcgagttcttcctgctgtgcagccgaacgtccagaacgcttggtacgcattcatcgtgtttcgtatattcgatctgttcatgttttattgtccagtttacatgtgtagatgtatatatgatccgattatgctagtatatatgttcaatgtcgttatttatttataaaataaattaaatctagatgtgcttatattttcaacaaccaccacctcgtcaggctcccttgtcaccactgccactttatcaatttggagctccccttccacctcctccaccaaaagctcaatggaaagtgagctcaagatcgagcaccacatcccgattcatgtcatcaagtttcatgtcatcgtgcaccgccgtgtcgtcagaccttagagagtggcagtcggtgtgtcagcgaagttactcctgaccggctctcccatatgcactcaaaggaagctacagtctcaccggagactacgtggaggacatatctagagggtgccagcgtagaggatggaatagtcaccaacattgcaagcagggaggcacgggatacgctattccacaggttccacctctccaccttagctcctttgtcgccgtggtttttctcccgagcagtgaagcccacgccattccctgctaagatgaggtctctctcttatgggagaaata

SEQ ID NO: 23855 - DNA, 8916 bp, Oryza sativa
cccatatgaacccctctagctctctttggttatatcctgcataataccttctcttccagtatgacttgttgagtatagtgggtagtactcagtcttgcccggtctctcaaccccagagttcgagtatgcgtcagatggtggtactcggaggagtaggcttcgtccgtcgtggaggacatatctagagggtgccagcgtagaggatggaatagtcaccaacattgcaagcagggaggcacgggatacgctattccacaggttccacctctccaccttagctcctttgtcgccgtggtttttctcccgagcagtgaagcccacgccattccctgctaagatgaggtctctctcttatgggagaaataaccaattctcccatcactacttttgtaacatagatagcgcactataggtgccaaaacaactaaaactagaacctttaatttattataggtgccagtttttttaaaaaaacctgatacatgtaaaaatcgagccgagccgactgcatcatccttatccactcgcaacgacgtcgcccgtgcggataagcacgacatgcgcgagcccacctctctcgctctcgtgagcccctctttctctctggcgactctcttccctctctctctttgcccctctcctcccccacccgcgagggccgacggcggcagcccttctcacccgcgagcgtcggcggcgggctctctctcacggctctccctcgcgagcggctgctgttagatccaggccggatccaggcaatggtgacggcggcacgacagcacgacgacgggctccccaaccgaaggcgacgggggcggggcgccctctcctctgctagatctagcgggagggaaggtggcgggctccctaagccgactccactgtcgcgcgcttctcgcctctgccatcctccaccacctcatctccctcggcttcatcaacgtggtcatcctcactcacgccgagctcgacctctcccagcaggccgacgtcaagtccttcttccccgtagagctcccatgctacgtcgtcctcaccaccgccaaggtcggcggcatccacgccaactccaccttcacggtcgacttcatcgctgccaacctccagatagcgatgtaagcggggcaggaaagcgagtttttttagcccgcttatctcagttatagtttaatttttcttccatattttgtactaccatataggacatgaactagtaagcgatttttattcgggtagcgggactacccacttgcattcctacctccagatccagtgaatgtttgagttcatcctttgagtttgagtttgattttgattagaagctctgctaagcttggcttgaatccaagccgagccccgagctattttctttttttttcccttgttcttctgtataggtgcctgttcatgactaaaaccggcagctatatatatattattattggtgttggttctttaattagcaccaatgaatgaagtcatccgtgccgcctgttgggtgacagttgaatcatccagcacctaaggccgattcccaaccggcaccaatatcatttttttaatagtgcatggagtggagacccgtggcaacacgtcgctaacttccttaaagagaagtcaccgcatctccatgcgtagagagaagttgatcgttgctgataggtggttgtggagtcaggagtgagaatagaagaagacgaagattgtaaatggcatgtgggccttatatttttattttattattttcattgattgggtgccaggtcagcgccctcgtagacgaaaaccactatggtttttaactagtatagcaatttgaactgttttataagttgtaaagtgccgtatacccgattttcgtgcgcgaacattcgcccactaaccatctcgcgaatggcgtcgggacgaggaggttaaagacgtgtgatatccgttcttcccgttttatccttttatacgtgatcgttttggtacgtttttttttgttttttttttcactccctggatactggaacgtatatatctttttctgttctttccgtcgaatcttttttttttttcaaattcgtttttcattagtcctttttattttagtttttaacgggaattttatatgaattactttttttgcaaactttgtacatatgcatatatatagactttatataagtaaagtttctatatgtagacttttatgtatgtaaattttttataagtagactttatatatgtaaaatttctatatgtagactttatgaatataaactttacatagaatctatatctacacttaaaaattttaatacgtcaatttataatagaaataaaaaatgctatgagtggactcggtgttctaactgaagaaacaaactcttaacggatcgcgcaggactaccaaagcaaactaccaaagcatgcatgcgggagtcagaaccaattcgcggacttggggaaacgcgaacgttcgcgcattggactcacccgcatctaacagggctatttaaattgtggggtcatactaaagcgcacccagcgatctagtataaagtataagcctatatcgacgccagatcgagttggccgtgcgggcgcaccagatggacatcgacggcgcgggcactaaggcggcagcagcgggatggaaggcgccggcgtcgatggtgctggtgcagctgttcatcacggggatgatcatgctttccaaggtgtccatcggcggcggcatgttcatcttcgctctgctcgcgtatcgcagcctcttcggcgccgtcttcatcctcccctttgccctcatctttgagaggtttcttgtttcctactcttattcgcatgcaggccagaagaacattattgcactaaactagtgatggggggttaatttagggctcatctacggcatttagatggccatatatatagtagtttttaacttaaattggaagtattttagttttcgtgcaaccaaaaacagcgtttttctagtctagttgaaattgtgaatcattggatgctatggataacgccatgcgtaaacttgtggctcaatgatggataggtatcgccagcaggtatcattagcagtctgtaggatatgcatgcactgtaaaaaaacaggtgccgtgatgaaaatatagattctatttttgctaaactttgttttgtgtagagggaagtggagggacatggattggcgcgcattcggatggatcttcttcaatgcctttatcgggtacgcatatatgtttctgaatctgaagcttcaaattactgtcaagtttccattatttatacatcctccgaataaaaatgtactcggttttaacaaaatatactagatcatatactagtattttggagaacctcaatgaccaaggaacgagcggcctgagtttaacaaaaatacccatgatgtattactcatgcatgcatttatcaatatacctaatgttactgtaggcatacgtcgcatatacgtaatccagggctactatttgggattttagaggtaaacatcacataaatataagtgcttcctatactatatgtgtgtccttttaaaagacccttagaactatactccctgttcgacaatacctattattttggacaatgacatgattctcgaaacatagtttgtttgggattttctattgtagtgcacacaataaataaatatttgattttgttaaaatatttttaagactaatctatatattgttctattgccttcaaaatgaatattcaaatgttattgatactcaaaattctatacctcaaaaacaccaaaataacacacaaaaagaaatatctatcggttcttttgaactcagaatatggaaactacactactagacaaaaaattttggtgactgccccacactcttgttatggtcatgctgaatagtcatgaaaaacactctctcgccacacaagtgtgtcacagcatcacaaaatttagttgttcggtgactgaatggattatgtagtcacaaaagtttacatgaaaattatttagttaggtttaaaagtattatttataatattggtgacggttatatttcaaagctgtcaccgttgatcccgtaactgatttaattgtgacaggctgaaaagaaaaaaaagaaaataccagagagaaatagattattagcttatttagaagagttcagctctgtttctctctccacctcctcattcctctcgttcccctcctctgctctctattcttatcctagagaggattcgatctccccttacagcgatgcttgtcactggccgcgtcaaccgttgagccgccgcgtgttctcctcatccgcgtgctattagataaaaaatgaattgattggccaaatatgtatggcaaaccaaagtagctgtatcaaccgctgaattgaaaaatcaagattataacaaaataccaactgaaactatgggttgtcttgttccatactaaaaccaaaaccagagtttgttatagcattaaagaaggtgacgatagcgaatgttttgctagtagtacaacttgtattttgatatgcttgcgcatacaaaaagaattcgtaacgaaaggctgtcagtctgtctatctctctttcttaattatattatagtttaatatataatttgtttttcatttattttaatatttggtagtatgcatgtctcctctcgttatgagtatataagaatatttcgaatgaatgaaaacgaacaaaagcactgcatgataaataacagaaacttagcacatcgcggcccaaacgaaaatgagaaactttatgagcttggcattccgatatagtgccagtgacctcttggtttcatttcagttgtgtcctttctaaagtctgtgatggacacgatactgccctcagtttccatcaattcccattgtatgcattcggcctcttgcacatcttgtcacattcttccagaacaattgtttaaaatgataagcatacattttaatttaaagaaggttaaagatattcttgattcgatatacatgctccgatattcgtttcaaaaaaaaaatcgtttcaaaaaaagatatacatgctccgatatttctttcaaaataggtttggcaaagcatagaactaaatatacattttttaaaaaattaaaatgttcaaacttacacctcttcactttggtgtctgtgtagtctgtaactctgtatgaataataagtcaacttaagattttacggaagcacttaatttgttaggaggattgcttcaacggcaaaaatgaagctactagatccatccaatagctttgctggaagatatcttttgcacaaacctcgttgagatcttcaccagaaattatgaaatcatgatatgttcagttgattaccatataatagtaattaacttaattctatagggatacaaatgggacccggatccattgtctttaggcgctaaaggcagagatgctgtctagcactacaaaagaaaacagtgatttgtatttattcactgtagcaacagcgtagagcaggaaactgaactgtaccatgctactgtttattttgtacatcgatcttgctggttcactccaaagtcatggtactaatacacatctgatttcaccttgcgatatatatatttgtctgttcactgttcagagacgctgcgacaaagaatctttgctctaataagatactcactctgtcccatataaaatcaaaccctagcatctcaatgtaaaattaggagagagggaaaatgaccaaaatacctcttattattaaaaaaatagtaatgatgataggatgataaagggtattggagaaattaaatttctcattttacgtgctgatagtagataggatggtagaagttggtttttcgtgggataaaattcaaactccagaggttgattttttttttttttgggacggagtgaatagaaatttactgatggcaaagccaatttggtgaaagactgttacatatataggagaaccaatttgacagtacgtgatcaataatcactttagtgttgaccagttctaattaattatctgagacatggttttcatctttcttctcacatatcaaactatgcaggtatgcagttccaatgagcctttacttctatgggctcaaggacaccactgcatcctacgcagtcatctttataaacatcattcccctattcgccttcatcctctcactcatgttcaggtaaaggttccatttgcaaggttccattcgccttctttgttgtgtacaatgtatttcaatacttataggttccaacaataattgttaatagattttattacttgagaaagtatctttagttatcaaaaatttaaactaaaagttttggtaccttagggtacagggttcctagtatctcgggcttagatattaagttttacagtagaaaacataatatcaaccagtatcttcttaacaatggtaaaattagctataattatttcatggaatgaaagtaatgcacttgatagtaccatggcaagcagtgtgtgatttcaatcctcatgtcccgtgttcaatctccagcatgcttacaatttctcttaagaaatatttggagggacgtatctccctccaaatctcgtttttaatttcatggaatgaaaaaagatgaccatttttgggtaaactcgaatggtgttgcaaatatatgatctcactgaatcatatggatatgctgtatcaacatatggcagactggagacattcgaaattggaagcatagttggggtactgaagatagtgggtgttctgctctctgtgggtggcacaatgcttgtcagcttatacaaaggcaagtcactgcatctctggaattccattttgcagcaccaaaatgaaccggccacaaaaactgcaaccaatcagctaagagggacaattttattggttgccagcagctttgcctatgcttgctggtaccttgttcaggtaatcacgagcaattttacagttcttaggagataccactttttctattgcaaatttggtacctcttagtacctaaatactatgagatacaaaaatttacactaaatttttggtacctcctcaagaactataaaattgctctaatcacaaacttaccttttaatagaaacatatatactagaataatcttatgctgatatttccatgttgtaactgtatttgcagtcaaaagttctgaaagtgtacccatacaaatattggtcttccatgataacatgcttggttggaggatttcaggtagcatttgtcggaatcatattaaggagacataagagtgcttggaagctaggatgggatctcaaccttgttactgttgtgtactcagtatgtcttcaaaccttcctagttcttgaaattaacttaactagaagctacaatgagaaaagtataatattttgtttcctattcttggggtgtccagtgtagcttgagttgtagtattaactaatagtcctggagttataatatgattttgaaggaataatgaattttcatgaaacacaataggcctaattgttctacggatattgacatcaaaaccactttggtgtagggtgcacttgcaacgggcgggaaatatagccttaattcatgggtagtggctaagcgaggtccagcctatcccccgatgttcaacccactatcagtggtcttcactgttgtgctggactccgtccttatgggggatgatgtgacagtaggaaggtcagttgcaatcatttgtactatctatgatgcatgttcggtatttccaacagaaaatgcatgtcaacccattatcagtggtcttgctaagccgaatttgcatgacacccaattttacatacgccgtgtttagtttcaaaataattcttcaaacttccaactttttcatcacatcaaaactttcctacacacaaacttccaactttttcatcacatcgttccaatttcaaccaaacttccaattttggtgtgaactaaacacagccgtagcctaaaaacacattccaaagtggcatgcatatttctgacagtaatggataattatctacggtgaacaaccaccattacacaaatgggcaacagtgaacggtattgaccaggcactaaccaagcggcatatcattgccaaaagaaaaggctcgaaaaatgatcatattttacctgatatatattgggtttggaagtcttgatgttttatctgatatgttcggcatttgaatctgaatatctctctccacgcatggcttacgtagcatcttacttctatctaagcatagcttttttggcatctaaggaaacacatgttttcttttaactctaatagttcaaaaattcaaatgcatatttgagcctctatataacttcaaacaaaaaattaatcagatgtatagtagatataaacaaattatacagttttgacataaaaattatctccaaccgaaattaaaattttaaaaatggttttgtttttcatagaagatctcaacacttctaacatatatcttggcatgtaaaagatctacaataaaaagatcataaattacaaggttatatatctcagcaaattctacgatttcgatctaaagcttgtcttcatccaacttctccatttttaaaaagaaaattcattatgatgcttccgtacttagtggagaggatggttcagtcattgggcaggacgactgtatgctctattatgtaacagaactagcgatgatatattagtgctggttcataacaagaacctagtagtattacggccagatataaaggaacaggccgtgatgggattgttacaaaggtcatttctgtagtactgaacaacaaaaagaaacaagtgacgaagctggtcatgtgagcagtactttaatattcgaccataacatttgatttagttgctctcttattttgaatgtgcagta

SEQ ID NO: 23856 - DNA, 7216 bp, Oryza sativa
agaaagcatgttgccaatatatggaagatgatataagaataagcgataattcattattcatatttgttttgtctcagtacagttctacagttttatactcttgttatgttatcgtcagcttatcttttaaagttttaattttgaaccagctgtgttctatcaaattgtctctctctatatatttttgtcatagtcaatttgagagtccgtaacaaagttctatcaaattttctctgtatatatatttttgtcgtagtcgatttgatggtccgttacaaagcaaagggagtcggaaacttggctagtaattaaccttcatattgtaaaacacctcattattggtagttagttgtttacttatttcagaagaactgcccccttagtagaggaaaaatataaaataaacttgaaaatataaaataaaggtcttaataaattgatgctgatcggccttggacaagtatgtactgtagctctcttcaatgtgctgaaaaactacactgcactccctccatttcttttttttttttgagaaacacagtacaaacgcaggcgctcacaacgtgcgcactccactccctccatttcaaattaatggaagttacggatttgtatttggtcaaatatttttatctttgatgatcgaattttataaactcataatatttcgtaacataaattcacttaggaaaattttgtatggaaaatttaaaacattttgaattctaaaatttttgtgaacatgcctgtgggacaccccagattaaatattatgtaaactattcgaaacgatagcttagttggatggggtctcaataaaactcaaataaaacagtaatcgtccaacctcatcgctgccctatcaagtcaaatagcaaacatattatgtaacccaaagaatcgcgtagagagcataggaaatattactgggactccacatgctagttaactttagcctgagacatgcccgtcaaaccacacgaaggtgttgactagatgttttacacaactcgggagacttgacaaattgttggagctctacaacatctcaaatgctctaaactcatactcatgtgtaactagttcctacaacaagcactagtttcacattttcatctaagcaatgataagcagaaatagggcataaacacaaattagaactcaaattactaccggatgtaattacctaggctgaccgaacaaatatatatataatgatccgcagaagcttgtatactagttcccacaagcagcccctactaggggtagacacctaacgaatcgagtcctagaagaagtcggaacccgaatcactcaacttaagtcaaatctaatacctgcaaaacaagatcatatactatgccacacatgaccgcgagtatggctagttgaatagttttaacaactttaccaacataatgtgaatcgttctagtttgtcctgtacccgtcggtactagcacactctacacgttgaatgtggtctagaggtcaccacgtagcctttatattatctaatgcctagccttgcaccagaacggcaagtgtgaccgttaggtggtgggcctacgccttgaacataacatcgtggcggcaaacgcatctgttaccccatgaggtactgtactgttatattgcacaaacttagatgcctaaactactattaacagtgaaatttggcaagatagactcgaattggagttggatatcaaagcggaatcgaaggagatagaatcttaccaaaaatggactgcgcattgactgggcagcgtatcggctggaaacagagttggaatttggttgagtcgatatggcaggtagccgatacagctctacttaggctcagtttgggcctcgattgagataaccgtcattgccgtttagagatatagttcatttaaggcagttgtatctattaattagaatatttatgtcggtttgagttagagatatggcaagagtctgccgaatggatttgtttgtattttctctttagaaaagcttgagtcgtgtccacaatgaacaagttttgtactcggggtataaatataaactccagaccattgtaataagagagagaatccaatcaatacaacgttcagcgcattgccaccccttttcttttacttctcgacgagttcttgcttcaagtcggagcatcggccatgaattcttggcaagaagtaacttgtctcgatggctagcgctatcggggctattatatcgttttagatgtattagccctttgatcgtgaccattgttatcatatatcttagttaatctagtcttagtatcggtggggaggtggtacggtggctactactccagatttggtgcaagagataaaaaggaaacatattttttaacaaatccaatatttctttccgaaacaaaccaaaccaatctaatctaatctcctccttccatcctacacatgcgcagtgcaccatcacggatacaaccacgggacatgatacaaccacacgacaaaaacctagatgcaactccaaaactgacgaacaaaacttctaaaaactacaaaaatcgaaccctggcggtgagacgagtccgttttcgtaggtcttgacgacaacaaagacatggcggcggtaacaacaatggtggtactagatgtgaccagaactcgaaactctatacggaactgtcatgcccagaaatttccgaatagaattccaagcagaatgtgcattaaaacccctgtccaggaccggccagggtacacaaacgacaaagttgacatacagatccacgacggaaattaaaaacattccacaggcatataaaaatcttacataaatgcaacggaaattaaaagataaacttgagctagatcttgacttggatagcgggcgacaccattccacgggcatcctcgacggcacggacgaagcctactcctccgagtaccaccatctgacgcatactcgaactctggggttgagagaccgggcaagactgagtactacccactatactcaacaagtcatactggaagagaaggtattatgcaggatataaccaaagagagctagaggggttcatatgcataaagttagcacttaaaagcagtagttgagagcagtaaaatagatgtagtaattaatcaatattaatcatcgctgctctacgctacaccatgttgagatagacccaaaccactacctgaactaaccagatccattaagctatactaatgatgtgactaatcacggtgaatctggttgacccctcataaccgcgggtacgactattcgaatagttttactctgatcagaggtgtacaactgtacccacaagacacagccccacgacacgtttctgtgcgccgacatgccaccatgacataccggaaagaggccgtgacaggacccttcgcataagcccctctaaccaagcacaccacacctcaggttttgcccccactcctcatcaggcagcgagcagccccctctcgtgcctaagcgaatcagcaagtcgcataggccatcgcagggcctatccgaacaccatcacgctcacccttgcctggatgcgtcaactagaggaaagctacactacaagcccagccgttgcccacgctggcttgtggtatgtacggtaagttcttccagggcatccctcaaaccggtccttaattgccatgggcgcgactagcaaaaccatgcacccacaacccaccatttagtgtatcttaattaattaacaccattgcggtggtacaagtccaaagtcatgctaataatcaatgtctaagcattaatgcaattccccctttgtgtactagttgaactaagcagggctaagcaattcctaaaccaacatctaaacatgttacatcccaagttatcaaaggaataaggcataaaaatgataaggctgagaatagtaggtaaatacctcatacagtgacattataaaacaatgcataatttaaaggaaaagtagagcatttgaaatataggagcaatatgttcaagtgacaagcatgacttgccttgctatgctgattggggggggggacctcggcgactatctcaaagtacactggagcgtcggaagagccggattctacacgatatacaaggaaaacaatgcaaataggctataaggctactgaaacagagaacaaaaccatttttaatggattcttttgatttttctgtatatactgagacttcaatggacttaaacggagcacggatgaattttctatgaattttagaaggtacactgtgttttattactataacagaaaaaccttaattgcattattccgcattaaatgaccctggctgatgtcatcggggggaggggggagggtggcgccgacaggcggaccccacctgtcaaaggctcatgggtcaccagtccacgttgaaccgggttcacaagaccggaggggagcggcgcaccatgaggcgccgatgtggcggccacgtggacaaccacgcgggtggaggacagacggccctgatctaatggatggtaggccggacggcggtggtgcggcgcggctggggcacgcacgggcacgactcaagccagcccggcagccatggcacgtggcggcgcggggtcggccactggcggccagcggcaggtgacgcggagagcgacggcaagagagggagaggggaaaggaggggcgtcctcaccgtgaggttcggccggcgcggagggaggcgacggcaaacggcgacggcaacgggactgaccagcaaaacgagatggattagtggggaagagggagtccacggtgagcgaggacgccggccgaaggcggcggcaatggcgaaactgactggcgcatggggaggagtgggctctggtggtggattccgacgactgagggatgaacaaggcggcctttgttagcggtccttaaatcataatatctgaccgtcaatacttgcatataatgcaataaaatatggtatccaacttagtggtaggtattattactaatcatttccactagtgttggtggaatatgtgtatgcaggtaatttgaggagaaaacacatccgtcatgcgaaaaaatgcacctatgcacattcaggacacgtttacacggattggaggccccataagtctatgaaaaccatttagaattgggccaaaacatagtgcaggttattggtggcccattaagcagcctactggccaaaggagaggccgggaggacactttttgggttcggccgaacccaccagttcgaccgaacccgttctggggcctcccgccatctggcttcacgtggacagctcggatctcttcctaaaggcggttggagggtgttttggacaattcccatgcccctaactgtcatttgaaacctatataaggaggtctccatctcacttcaagcacacacaacattgagctgaattacaagaggctctattgtatcttttgtacattagaataaggtagggagtgaggagaagcttttgaggagtgcccggaagtttggcgctcatccgacttctacctcgacgagtgtagttttctaggaggaattctggaggagtaccggagctgtcggtacactctgctccgggttcggagaaccttcttctattaagtaagcattcatgttcctttcttatgttatttaggctgtgtttgctactgaaggttcccaacccatctccctcgttttccgcgcgcacgctttaaaactgctaaacggtgtattttttgtaaaaagtttctgtacgaaagttgtttaaaaaaaatcatatttatccacttttttaaaaaaattagctaatgcttaattaaccatgtgctaatcgattactccgttttccgtgcgcaatgtcacgcccggaatttctatccaaaattccaaacgcttacatgtgtgtgaaccctcgtccaggaatcagccgaggcacacaataacaaattgataatagagtacaattattactctaattaataagcgaataaaatgtcattatagaggtagatagttcctctcaatcaataaagatctaagcagcggaaaataaaataaacggcgcagacggctccactccacaggcagcttgaccaaggctacacctaatcctccacaccatcagcttcactgtagaactcttcatctgatgaatgattgcaaggtgagtatatgacatactcagcaagccacgcagcaaatatgcaagtgcacaggataacaaaggatggcatagtagggtttcttttgcataaacagcctttaataaacatttcagaatttaataaaacagttaagtaataattaaacaatattaatccaacgctatacaacataccctgttgtataggcccaacctttctgaacaaccatacccggctgtatagatctatctccaaaccaggaatataccattccaaaccaggagctaatcagattattaccagttatagtatcttctattatgatgagaggtgtgagactaatcacgaaagacattgttagacccgcccataaccgcgggcacggctattcgaatagttttactctgatcagaggtgtaccactgtacccacaagacacaaccccacatcatgtcaccatgtgcctcaataccaccacggtacctcggaaaggagttgtgacaaaaccccttgcataacacaatccattacagcgcacctttcctggatcataatcactcccttataaacaaggcatggactccccagcgacccccgtgggcttatctccaccacttctcagtctggtgccccgcaatgaaccatgctgtacaaaagataaagccgttgcccatgctggcttgtggttggcacggttaatgtttcacaaccgaaactcgtgaaccggtccttaattgtcatgagcacgactctcaaaaccatgtgctcacaacccaccattatcaggttttagttggcacattaattaattaaccaatcacgattgaccatcgtgaactatcattaagccatcattaattaattaatagtgaatcataagttatcccaatagtgtgctaatgtttctaagcatggctaagcaatcacacctaatatctagctgaaccaatatatagagctcaactagtcaagttataataacccaaggtatcaaggaataaagtaatcaagatcaaaaagggctataacaaacaataggttaattccacccaatgacattcgaaaataaatgcagtatttgaataga

SEQ ID NO: 23857 - DNA, 8890 bp, Oryza sativa
aacagttgcttcctgtttgtctgagaagacatcattcacataccgcagcacaagagatgttttgcctactctccctgtgccaagagaaaagtaaaagttattgtttgtgttaataaatatgaaatgtattcaatcacatgtcttttcaatgaaattgaaaaaatggagcatataattatgatcaattcatcctaagttaaacttaggtttatcagttttcacattgataggctgggccaacagaggactggttacaagacagcctaaacacctcttccattaaaaatctgaaatcaatgacagaaagttataacaataagcaaaccctaatgacccaacctataagatacatgcccacaagactatcaacaatgcttttatgcatggaaacacatatatatcttcattcaaaaaatgtaaagccaagtactaaggcatggttaaagagtttcagcaattgattatgctggcgctatcacttatcaagtactgtctactgtggtaaaaaattctttcattgtgctcattgcctcagttcaaaactactccaacttttttcttttccaaaattgaaattagccaacttcaaatgaaacgtgattccgctttggcaatgcacaaactgatttccaagcttgcttctaagctataagtaagctgatcctaaatcaaaatgagtcaatgttcaacaatgctaggaaaagcaagtgtaccatgttagatcaatgcccacccgtgcctggtttcaagaaaaattctcttgacattcccatgtatgacttacatgcacttgctaagaagcatgcccaaataaagactgtagtactttcccatcaaaaccccctcctcccaaactacatactgtatcatttttccaaaaaggcacacatcactttctctagaggaacatgggtaagacccatggcatcatacacagatgaccaaaaagctgagtcatactgaattttttttttctaggaccctgccttcaagggttggttaaggtaatgacaagaaaagtaaaaccaccaattaatatagaactagatcagctggacattacaatccaagcttaaaagcggacagagagcacggatcaaaatgaaatattatccacccctattgcataagacgaattccctgccaccagctccatggccacccttcagctgccactttgtgtccacatgaatttgcagcagtccccgctgcagctagcactagacaaatcttctatataagaacgaatatgcttctacttgttagattgtttctatgagtagccctctcggtctaatcatctcctggactccgctaagcctcgaaggcaatcaagtaaaaggtaagcttagctcaaaaccgctcaactccctcgtctaagctatagatttagctacctacacagggtaccagatcaaatgattctgcggctttcccctaaccctagctagggctcagcacgcaccacaagagcagccaaaattcacccagattccgtggctattttcttgcgcacgccaaccccaaactgaaggatcgggaattcggcagaaaagggggttgagaagggggggaggagggttcgcgggatcggaagggagagggagatagccgtaccgtcgccgaggaggacgagcttgaaggagacgctgggctgcggcggcggcggcggcttcgagcccatcggaggcgaggcgaggcgagaggggttccgccggaggctcctacgagcctctagaaggttccagaaccttccggatcgcccgtcccggtgttgcgtgtgtgctgtggtcagagaggagaagtgtgggagacggggaaaacgggaatcgtgcggcacgttacccttgcgcggagcaaggctcgggccgggccggcccgggcttggagataggttgctggcgttattttcataacatggatgctaagcaatattattaatattttttttctaaataaaatgattggcccaattgtcacactcttctcctataagccactaatgggatgtttagattcaggggtgtaaagttttggcgtgtcacatcgggtattatggccctctttgtttaatcttaggtttattagcttagggcccctttgaatcaaaggatttatgtagaaatttcataggattcaaatcctataggaaattttcctatttggccctttgattcaaaggattgaagctttccaaatcctatgaaattcctatggaatgacacattgcatgtagattttggagaaaatttagcaagagctccaacctcttggaaaatttcctttgagtctatctctcatccgattcctgcgtttttcctgcgctccaatcaaacgaccattcctgtgtttttcctgtgttttgcaatcctctgttttacacttcaattcctgtcagaatcctatgtttttcctattcctccgttttttctaccctgcgattcaaaggggcccttaaacttttaattcaacttattggcttatatgatttataaaccggtagatttaatgtcctgaatttagtggtgaagtcatatatctacctcatataagccaaaaaagttccaccaacctagcttttggcttaatagtattagagtggcttatggttttaaaaagccaaacgaaaaaactgtttgtttaagcttagactttccgacttataagttggcttataagcctatacaaagagggcctatatagggtgttgcatgggggtatttgggcattaataaaaaaactaattacaaaatctgtccgtaaatagcgagacgaatttattaagcctaattaatctgtcattagcaaatgtttactgtagcaccatattatcaaatcatggagaaattaggcttaaaagatccgtctcgcaaattagtcgctatctgtgcaattagttattttttaacctatatttaatacttcatgcaggtgtttaaacgttcaatgtgagggtgtaattttttgcggtgagatctaaatggggcctaactattttttctctcttccttcggatggagacggcactatggtccactagtcactagatcatcctctctcatatatcgtcatcattaatatcatatagagagatataaaatcatcggtatcaaatatttattacttgcagtcccaattgaaggagctctctaagggacgagtgtttgtagtctgcaaacacaaaacaagagctcatctcctacgctctatctccgtctctctctacaccttatctttttctctcaaattaaatgcacgtggcatgcagccacgcatccatgatagtgaacacacgaggaaagaagtcacaggcgagccacctcccttggcgatgacgatgacggcaacctttatccggcgagccccttcctccccctccctccaacgagcttcctcatacggagaagagaagacacagtcaagtagctccctccagtgatgacaatgacggcgaaggcctccctaacggtgagccctctccttgtcccctcgacgagcttcctctgacgagatcgattaggtatccatgtcagctccccacccttctcttcgctccggtgccgacccatagccctggcagttgcaacgccgcttcagtatccaccgccggtctgctggccctgaaaccattcctctaaacccgatttccctgacttacccctcgctatcaccaccccctcccccctccccaccctccacctccgaaaccctaactcttaccctaatcagtagcttgtcgtcacgcaacccgaaagagttcgtgcacatgaggagtgcgtgcgtgttacgtaggcctctagtccgcacgtacatgtcagctgcttatgtcgcgcgcgcctccccacctaggcacctagcctccacgggccacggctctctcacaccacgcgctattaacactaatgatcatactgctagtgcttacaattatattttaaaagaaatatatttaaaattagtcaaaagtttgaaattggtagttgaaagattttaaaatttgagttgaattttttcaactttcaattgaaagatgtagatttgagttgaaagttttcaaatgggttgaaagtttcaaattttgacttaaacgttttcaaaaattaaattgaaagttttgaatttgaattgtaataaatcaaattttattgaaaatatcttctaatagaaattttgatgacttttaatatatcccaaatcaattacatgaatataaaaaggagagaatccactcagtgccactgagttcgtcacggttcaacaatatgccactgactttgtcgacttccattatatatcatcacctttcccttaacctctacgatttaccatcgtcgtccacagtccgtcaactatacgccgtttgtactgttatttttttccgtaatgaccaaaataccctttgagtcatctaatgcttcggtgcgcgccgcatggaagaatgtcgtcgattgcctgctcaggctcaagcgcctcaagctgttgccgccgtcagtggtcgaccaggacggcggcaccagtgccgtgagcagcagcacggagcggctgggacacctggccaagtcagagtccggcgtcatcttcccgtcgtcgcaccgtggcgccgggacgagcaagcacatgtctggcgtgatcggccggttctcgcagttcctttctctggacgccggcggcgagtcgctgctgtccgtgggcagcgagttcgagaacaacatcaagatcatccagcaatgccggatcgggagcatcttcacggagagcgtgaagctgccggacgagtcggtgcagaacctaggtcgggcgctcatcttcgccgccactggcaaggggcagaagttcagcacgccggtggaggaggaggagacggtcggcttctgctaggacctcatcgtgctggtgtcgtcggcgaacgtgcaccgcttcaccacgttctggccgcagttgcacgactgcttcgccgccgtgtcccagttgccgctcttctccccgtcccgttcgccgagaaggcgatcgtggcgctgttcaggatcgccgtgaggctgctctccggcgccggcggcggagaccggatgtcggaggagttggtgttcaagtccggctactctgacccgggcaacgcctggagcagctcaagctcaagcttctcctcctcgtcgatggtggcggcggcagcgacgatgatgatgatggaggacgcgtcgcggatgggcaacctggcgacgagcatgttcatcaagctggccgaggcgttgcgcaagacgagcctagtccagcgagaggaggtacggaaccagaggagatacggaaccaggcggtggcggagctgggccgagccattcgtccccacgccgccgtgcgccttggccgccggcgggaggtcgccgggacctcgccgcaccttccccggccgccgccgtgctagtcacgcaccgtcccggctgtgcttggccacacacgcgctgcctctccccggctggaggaagaagacgatgaagagagagagggtcgggcccacctgtcattagctgtagtcgatttctgtaagggcatatttgtcttttcttcaatgcaaattaacagtttgtggccgtgatggtaaatcgtagaggttaagagaaagacgatggtatataatggaagtcgacaaagtcagtgacatattgttgaacgtgatgaactcaatggcactgagtggattctctctataaaaaaaatatgaacgaaaaaaagtcatgccagctaaacacatgcatgcgtgtgtgtgacgttgatgcatgtgcaggtgtgggaccaatgcaggcatgcatatgttgcacagctgggattggtgcacgcatacgggtgcgcgctacttgctaatctagcgcgtatgcatcaattagcattcctggcgtgttgctcccttcgtttctggttataagatgtttttgattttggttaaagttaaactgattaaagtttgatcgaattatagaaaaaaaatagtaatatttcgaatcgaagtttgttccaagttaaattaattaggaactcaacgaatcgaagacaaaatctaaggtgcctttacgtgcatgtccgaattgatgtccaattccgtgtggccgcatgctttcgattgaggtccgaaactctgatgatataatttttcgttctcgtgctttgagaagagatcgagtcctttttctcttactttgccggccggccggtaagagattttcttcgttcttcgttctcttcttccatgttgttatatatataaacgtgaaccaaacctttcatagttataacttaaatttgatcaaactgaccttaaacaagttgctcttgtttagttcccaactttttcttcaaacttttaactttttcatcacatcaaaatttttctacacatacaaactttcaacttttctgtcacattgttccaatttcaatcaaactttcaatcaaacttttgacatggcggcgccagagttgaatagtttgatggacgacgtcgtcgaagagatcctcctgcgcctcccgccggacgatccctcgtgcgccgtccgcgcctccctcgtctgcaaacgctggcgccgcctcctcaccgatgacccgtgcttccaacgccgctaccgcgcgttccaccgccgccgagcgcgcgcgccgcctccgctgctgggcttcatccaccacgtctccgacgaccaacaccccggcgcccccaccgtctcacggttcgtcctgaccaacgcgttccgccccgccgagccagagcgccgcaggggctggtggtggccgatcgactgccgccacggccgcgccctcttccactccgccggcgaaggcctcgccgtctgggaccccatggcgggcgacgtgcggtggcagcaggagccgcgcatcccggcctccgactgcatgtactccaccgccgccgtggcgtgcgcggcgcccggctgcgaccacgaccacgaccacggcgactgcggcggaggccccttcgtcctcgtcttcgtggccgtcgacgagcgccacgagaccgcgtcggcgttctcgtgctcatcggagaccggggagtggagcagcgcgccctccaccgtacacctcgaccgcgagtacctctacagaagcccaacgtcctcgccggcggcgccgtccactttctcaccgactacggcaggaccgtcctccgctacgacctcgccaagctggagctgtcggcgatcgagccgccggaggtgcactccgacgtgctcctcacgacgacggagggcggcgacctggggctggccatcctggacgaccagcgctacctccgcctctgggcgtgggccgcagaccatggcgtcacgcggcggtgggttcgccggagggtggtcgacctcttcgccgagctcccgttcctccagcacgtactcccgctgaatctgaccggcttcgacgagggcaccggcatgatcttcttccaagcgagcgacggcgactacgccatagatgagctcatgtcgtcaccacgtgccaagaagctttgggggagggacaacttttctaatgtcttcccctacagaagcttctacgttcacagtaatagccttcggaggcgtttgacgtaaacggtaatagtaataggtaatacttccgttccaaaattaatacttcctttgtttcataatgtaaaactttctatcattatccacattcatatagatgctaatgaatctaaatatatgtatgtgcctagattcattagcatatatataaatatgggtaatgttagaaagtcttacattatgaaacggagggagtatataaacagtaatatgtaacatatcctagtaatatgagatatgttccatctaatgatgtgttgttatattatgggatgaagggagtagcaacgataatggaatcgtttgaagctgtttatacttacatggttaattatgtttggttgtcaagttcaatactctaccattttagcgtttggacacactggtggagaaaccttttgtagtcctggttcgtaacccccctttagtcccggtttctaaaccgggagtaccaatccgggactaaagatcgctatctttagtcccgggtgaaataaccgggagtaaagatcgatctttagtcccggttggtaacaccaacccggactaaagatcgagctgaccttttttttttttgcatgcccctgttgctgcatggtttatatatatatataaatatatatataaaccatgcatatatatgtttcaatacatatatatgcatacatatatatatatatatatgtatatatatatatatatatattatattatattatatgtatatacatgcataatatatatgtatttatacatatatatgttatgcaaatgcatatgtatatagatatatatatgaacaaaatatatttacattatagaaaatgtgtacacatgcatatagaaacatatgtagtcatgtattaattacaatccattatatgtcctagctagctacgatttcgacgtagtagtactcgctgctagctcagaagctaaggaccggtgaattgtgtttccgtcgtagtagaattcacccttgggatcaaggatttcttcgttgatgaatcccatgagttgttcttgaaccgccgcgataaattccttgtgtgtggtcaggttatccctcatgcgaataaactatatgaatgtatgaaattgattagtaattaaacaagaaatcgctacgtaatgaaattttgaatttatttgtacgtacatcaagctctcttgtggtgatgatttggtctgcaaggcagtggcaatactcgcacacgtaatagccgcacaagttagttccctgcttttgctttgcgcactacaaataaatgacaaacaatgagagatctaattaatataca

SEQ ID NO: 23858 - DNA, 1226 bp, Oryza sativa
caagttcccatatgtcctcgatggcaccgtaatacgtggcagttgttccatcgtgtcccatggcatcgacacgaacagcgctgttttggttcgtgctcttcatgtcttgggctctcgtgtagaatgtgtacccattgatctcatatccctggaatgtcgcgatcgacccagacggtcccctcgccaggaaggcaagttgttggttgatcgactcgttacccatgagatgttgtcgtagccacgcggggaaagtatcaatgtgatgccgtgtaatccatgcatcggacttaccgatgttccttgcgcgaactagagccaagtgctcctcgatgtaaggagctaccaatgaagagtgttgcagaacagtgaaatgggctttacggaataaattgttgtctaccgtcgttattgctttccttccgagagttctctttccccgtagtctcccttcatggcgtgattcaggtaccccgattgggcgaaggtcttcgataaattctacgcaaaattcgatgacctcctctgttccataacccttggcgatgcttgcctctggacgagcacggttacgaacatacttcttcagaatgcccatgtacctctcgaaaggaaacatgttgtgtaggtacataggcccgagaatacggatctctttcacaaggtgacaaagtagatgcgtcattatattgaaaaatgaaggtgaaaatatcaactcaaaactgacgagacattgcaccacttcattctgaagggcttctaatctatccggatcgatgaccttctgcgaaattgcgttcatgaatgcacatatctttgttattgttgcccggacattgtctggaaggataccccttattacaattggtagcagttgtgtcatcaacacgtgacagtcatgagactttaggtttgtgaacttcttctccttcgtgcttattattcgcttgatattcgtggagtatccagatggtacctttatgctctccaagcattcaaacatactttccttctctgccttgctaagagtgtagctggctggactcaagtaatggcttcctttctcctttggtccgggtgaaggtcgccgcgttgttccatatgcttcagatcattacgtgcttccagtgtatctttcgactttccgtatacacctaggaagccaagaaggtttacgcaaaggttcttaatgaggtgcatcacgtcgattgcgtggcgtacgtccaaga

SEQ ID NO: 23859 - DNA, 13139 bp, Oryza sativa
acaggttgatcaatagaagctttgctgattggttggaacaaaaggtaaagttgtgtgcattcaaatttctgttgtaagaaattatttagacagtagagagtaatgatactcttatgcaggttttagaaaatggtgcagaaatagatgaaaagacgagcattggctgcaaaaccgaacaaaactgttgttcgctacagtggatacattattaatggttttaggttccacactgagccgtgaggctggccgctgcactcaaaatagtggtgttgtgaacgtcgctgatgatggtgttaattactatggcagattatcagacattgtagagctgtcatatagaaattacaaggtagtactctttagatgtgattggtatgatgtccaccacagagctggtatgaaaaatgatgaatttcggttcagccttgtgaacttctctcggaagatacacactggagagaaattggatgatgatccatttgtgttttcatcccaagtggaacaagttttttattctgaagatccaaaaactgaaggatggcatgtggtaacgagatttaggcccagggatctttttgatatgggtgtggaacagccatctgatgaagcagagcagatcatggtaagaaaactcaggctcagggatctttttgtcttttcgttttttttctttagaggaaaaaggcaggagctctgccattcatttatagaaggaagcaagcaaacatagagaaatccttttacaggatggtaccaaggatttctgtttacttattgtcttgttcattgttgataattgtcatccgaaattcagaatattagaaatttgcatggcttgtactttctattgataaaatgtagaaattcagtctggagttaagcctggagttaatactgatgacatatatttgaagattacatccacttgtttttgcagcaacaaagtaaagataaaattaactgattcttgtttcatgtttcaggtttgccaaatgcagggtatcaatgcaaacagaagcaagatgtccacactgccagatgatttctgtcagagtcctgatatcctcaacagtggtgttctccggcctctaggacctgaaaaccaatgctcaacaaatagcgacattttttatatgaattcccaagtgaaaatgggctacaagtattgtttgataacttttagatgatacctgcttcggacttatttttttaataatacttgggtttcatttgttgggatggacttttatatatatatatatatatatatgcttgctgctcgtgttaagttatggactacaaagttttatattaatttccctacatatttccataaatttgattactgtctaccgcgcgcaagacatttgacctgccgagggttctattccttcccctagcacattgcttaaaatttttgttctccatcccgcgcacaaatgttaaagtaaatccggcggtgaaaaacgtaagtttctcccctaatttttttttagagaaaacaaattaggggaaaaaggtacccctatttttcgtgttgagagattttgtttttaaaaaatctccattgattttatgtcacagagaaaaatagatgaaaaattgtaagtttctccctttatttttttagatgaaaatgtaggtttctttttccactgattttacgtcagagaaaaaaaggagaaaaagatttaaccgtgcacaaattgtaggattcaaaagtcgaaacctggacctcacacagcatgcgcctccaacattatgacttaaaccgctgagctatgcaaccttttgatatttagttaagacaaatttttactataggacacttcgatttcgtagttgtaaccatgggacaccgcccgaactcacttttgggggaaaacacttcataaacgtggtaatttgccaatggacaccacgccaatagcgtcctcgctgtcctccgccgctcccgccgcgtgtcgcttcgccacgtcctagccgtcctccaccgctcccgccgtcctcgatctctctcgccgcgagcgccacggtggccactcccgccgtccttgccatctcctccatcgcgacaagctcgagccccagcgaccgacgccgccccgtcctgcttcgccaccgctcgcccgatgcttcctcgtcgcggcagtcggcgccgccttccacctccctgcccctccacacctgccaagggagggctggatgatgacgaagatgacgggcagcatggcgcccaccttttcgccatgcccccgccatgtcgacgtctctggccgccatccgcctctccgccacgcgcctgccacggccaccgccgttgctaaccaatagatcataaccaatacttacgttaacttagatcgtattgataaaatacaagcagcagcattcctaaatctaattcgttttggcacccaggtaaaaaactttcacggcattcttttttcgccgggcaaaatttttcgcggcattcttttggataagttgctcagtatatatatctatccctccatctccccactcatctcacactcgtaacagaacacggatctggcgacggccgccggccggtgccgttgcttcgttcttccttggatgcgcaggtgactcaattgatctctaccaattcttcttgttgtctcttttattctttattgaatcaaactattaggtaccccttctgatatccttcccagaagatcgatttattaggtgatgacagaaaccccttctccatagtctgtccttaattaaattcgtccgtctcctgcagtctgctggctgccggcaaggggtaggggtcggactgtgtcggtcagaccttgagttcttgacatataatttataatgccctaactaccctctttcttgattagtacattactgtttcacagaaaaaggttacatgcatatgtaaatttgtacatcttgtatttctagtaattccctatgcagtcaattacttttggttagatgtatggttgacttcagagtttttcttcttcagttaacaattatggtgagagtgccaagacgtttgcggaagttgaacctagatgtctagggtgcagaacatgcagaacatgtggaaggcgaagaaggaaacttgcactacaactttgaagatcaagatgaaagcgataagcaacataatgatgataatttgcacttgcatcttgaacttcaggatggaggcagtgaacttgaagaggaaaattcagaaagtgatgatgatgcaatagcagagttgccttccgcaattaaaaggccaattaatataatctgtaagttttatattttcctactcatgtctttatgtatatgcttttccgtgtgaaccatagtttaaatgttcctacatgtagttccgaatggagaggtacgacagattctaggaaattttaatgtcaaaaacatggagcaattaaagaatggaaaggtaattgtggagacagatgaaaatggtgttcccaatgatagatcaggttcccttcttggctcgtaccttggtaagatggcacaaaattcaacatttgcaccattgcacattccaaaatgggacgatgatttatttgtggagccacaaaagtgcatagtcgcccacgtggaggtgaattctttttactaaatactaacaaatatcatgtttttacttttcacaactaacatctgtttataaatgttaataaagacgaaatttgtctacccatctgagacgaagctacttacaagagattgggtcctaatgaaagttagcaaaggttggaggtcttacaaacatcgtttgaaggatagatactataatcttgatgtgagaactctgaatgaaataccagaagatgtcccaaaaggtgttaatgcaattcaatgggttggtcttcttgcaatttggggtcaagataaacataaggtgatgtctctattttcattttaaaattgtagcccaagttagttggctaatcatttatattttctggtttctatttatagaaattatgtgaaaaaaactctgaatgtgcaaaacaacagaggaatccacatacaactgggagaaaaagccatgctatgctttttaaagagatgggggtaattgtttgactaaaacattgatcttattataaaccagaagcttcctaatggtataattgatccatcttctgatttactttgttgcttaggaagcaaaaaagagggggaaggtccatgagattgatttatgggatgaagcacataagaaaaaagatgcacatatgaaggcagtactggtatattttcttgttattagttgctttcattatatacaatttgtttcacttgtgatgaactacatgcatgtttatttatatgtaggacatggcttatcatgaattagctaaaaggaaaactgatagtagtggtgttctttcacccaaagattatgatgatgtttttcgaagtgttgttggaaaaaagacaaaacttcgagggtactatgatcataagaattggagccatttaaaggtttctcagggactagatgttattgggcaatctgaggaacaagcaatgcttaaattaaaaataaaggcaatggatgataaattagaggatatgagtgatgatatgaatctcatgcgcaccttcatagaacaaaaataccctggagagaattggagaaacattgtggttgcaagaaaaaataaggaagtaagcatctgttcaccatattaatttctttgtgaaaaggtcaatgaaccaaaacaatatgtaagaatcatgtggtttatgtttttgtttcaggtggatatttctgaacaagttggtaatgatattccacatgagtttgaaaacattcttgacaaatcatatgaaaatgtccatcctacaccaaataatttgcaggttgtgcagtattaccttgataattttaaaattgatgttttattgaagtccttatgctgttctttttcataagttgcaggagctgcattctatcagttatactaaagctaaagatggtcgtggcaaaccatccttaccacatgaacacatgataaccaaggtaccttatgcaagtctcattatgctgtaccatgtgctatttttctggtgcatacaatctaactgactttcaattgtagcaatcaggcattataagctctgccaaagtgtctgaatctagccagatgtacatagaatctactagggcacatgacaatggaaataaaaaggtatatacaaactaagtgtgattagtgaacattgaagctctatatctaccaatcctatgattaatttatattgttgtaggttgatatatttgaacaagtcgataacgatagtacaaatggatttgatcataaccctgataatttagatgccaatgttaatgctacatcaaattatgtgcatgttaggaagtgtttacttgataaattttaattcaagctttcacattttctaaatatggtcctttatcataacttgcagcaagtatgttctcttaaatgtactaatgccaaagatcgtcgggccaatccatctattccatatgaacgcacaaatgccaaggtgacctacagaaatcccaccatgctaatcgattatgcttgattgaaacatgtacataactttactgtattttaattgtaacaactgagtttggaaaggttggcccaaaggaccaaaacaagtcagaggaacgcggaatcatcactggtgacccatgagcatgtaaccaatgaggtatgtaaaaactaaatatgtagagatcaattaatgaatgttgatgcactgccatgggttggcaatactatggttctttttaaaaaaatactgcagggttatagttttggtcaagacagtcgtaatgatattacaaatggatctgttaataactttgaggattcacataccaataggaatgccatacaaaataatgtgcaggtacagaagtatttacttcataaattaatgaatcaaactttgccaaattcttaactctattatttatcatttcttgcagaggttacagtctgttagttcaactagacctaaagagagttattctagtcaagatttaccatatcaaaacttgactacaaaggtgtgctatgaaaatcttcctctattacatgtgaggcatttttaacatttatatgatagagtcaactttcaattgcagcaatcaatcattcaaagctctgtcaagaggcctagaaccagtcaaagttttgtggagtcaattttaccacatgataaaaccaaacaggttagattcaaagaattctggtcatatacttgcttgcaatatatagtgatgctaatcaagtaagcacatccatttagtttgattggttaaaatttctaatacaggtccctcagagaaaggaagctgtactcaagcatacttcatctaaatcagtatgtgtttgccattgtttatgataaaaccaagtacccatatgttcataaacgacaatgctctagtttcttgaatgataatgtcctgtttctcaaatttatagggtcaaagggaggtttacttgttttcactgaatgcaataaacaaagacaaactagtggcaaagggaaatttagtgaccgcaaatgccacacatgtggttggaaggaacatgcttggaaatgagtattatggagtggctattcatactgttacaaatattggtgatgaaaggctacctagaccaccatttgaaaattgcaatacattaagagatgcaattggttatgtcattgcttggcctcgcgcatatgtaagattaattatgtcaactctaagtataattttcacacagtaatatttgcatatgtcacattatttataatatctacacttttcaggtaaaaaagcttaggagtacaaattctacccactaaggttggccaattctaacttgattaattgaatttgcgttgttggattttattagtgcacatgtccacaactttaagttattattgctttctctgcaggatattaatggaggattatgaaaaggaaaaagaatagaggaatgcctgatcgcacaactgtctatttgaagaagtcatgtggaatgattctagcaatttagaaaaagaaagagactcgagtcaagactgcagaatgtttatatgttcatattgcacgttaattatttctccatttagtttgagagctatggaccttttatttagttgtaaactccctgttcctacaacattttaatttttaatatgagattttctctttcaatcaggaatatgatgcacgtgcaattgttccatgtacatatagataatagttataaaaaatacatatagataataaatatatgaaatatttaaatcagaatacaagtttgtatacaaataaatacaatgtactagcaaaaaaatacgtacagtattagccagaaaaatcctattgagacagcaaaaaaagtctctacgtacgtgcctatattaattaagacgttgtgcaggtggttctataaaagcgtctctatatttgtagagatgcaatttacacgtctctagcaacgtcttaaataatgtagatacgctttaaaaagcgtctccataattttgagacggtgcaaatagagacgttcctacgacgctttataaaagcgtctcagttatctgtggaagacgaaataaaacgtccctatcctacaaataagatgtctctgttaggttgttttgttgtagtgcatatacatatacaaatttttttatattattttttaagtcacaaagtatctttttgtttttagttatcacacaaacatacacctatttgtgtaaaacaaaaaaaatatattttttgtaaattaatagaaaaactccaggttatactaaagttgaatactgcaagtctgcaactgcgagaaaaggaccgacacaacattcagcttcaagaacgtgggccacggaacccatttgatcgattggatcagctcggcctgcttgggtgcatattgcccggccagcgcggagcccacgtgcaatatccatatgcttgaagtgaaccttaaggttcaacttttctgcttaattccttgaaagaaaaaaaaagacatatctactccctaaactcaacccgatccatcgttttgtagcttaatattttgataagcagctagttagtaactagcttatgagtaggggtggatataggagttggacagctaggactagagccctatttctatgccaaaatatccattgaaattatactttaaaaatggaagacaaaaggcaaatttatgtagattatactagttcggtcatgctcttgagcacattctagctccgctactgcttatgagaatctgaaaatactaggttttacagcttctagcttccacttcatattcgtagattatataactataatttttaaatctaagtaacaatctgatctatttagaggagctgaaaaattttagaaaaagcagcagcaggtagaagctatgttaaacaagaccagaagtggtggcggcaatgttggtggtggaggaggccgggaccgcctagatcatgctggctgccccccttgtctcgggagcccttctcccttctcctcctctagtgtggcgcgagcgagaaagcggccggcgcggaggttgacacaacaaggtggtggtggcggccttggtggtaggttgtggtggatctcttcggccctccttctcctcctccaacgcggtgcagcggtggagaagccggcgcggcgaggtggcggctccatctactcttttattattattattattattttattaaatactatagctaggtgccgaatggattaagaaccggcacctataatctcacctatatccaggagtatcggtgccgacaaatagatatcggcttggaaaaccgatatcgccgtttgatggctgccctacagttaatcctcctgatctcaccaagctgtgatgagccagctgctgcatgccggagatgattgatatgcaagtagctagagtagctagcatggacacgatgatggagctaggaagacgcgagttgacgccatcgcttgcgaatctttgacctccatcaacgtacaccgacgacagggtggtacagctagcgcgctagcagctggctcaaattggctgacaggaccaatcaatcgatgatacactatcgatcaataagaattcagaattaatgatcgatatcggtcgtcgcgtcgtcatcgcatcgaccaataatcatgtcgatctcgatcgatcggccgggtggctcgatcaatttgcatatatgcacgcacgaacgcatgtcaggatctgatattcaactctgtttgataggaatttaatttctaaatttaattctaagaattggattggagtggagttgtgaagcaattttctagcttcacttctctagtttattttgtgatagaggcacttcaacatactctgctcattatttttctggtgaaagtgaaaccatttaagcttcaactatatactagaaaagttgtagtttcaactatggtaatggaccatatagtatatcaatagtctcgttaagctggagctatattaaatagacctattcatcatatccgtcggcagcctcattaataattatatatatgtaacataataattgtgtcagcatcctcgatcgatcttgtgtcctcgtgccggcagattcattccatttgctcatatcgtacttcgcatgatgcattagagcaaatttaatagcatagctaactactggctccaatttatctctatagccaatctaatagctcgtccatacaatagttacatactacactattaatacctggtcccacctgtcatacacacactgcgtcttggagtccgtgctacagctggctacaaatttgtagcccgctgctcttctctcttcttatttatccccttaaaatatatttgcagctggcttataacctgctattgtacctgctcttattaagcagccgcccgctatggaatcaaatcgatcatgaatgtattaattcatggatcgatctagatttacaagatcgtcttgggactaaacacagcctaaacttctaacttttccatcacatcaaaactttcaatttttgcgtcacatcgtttcaatttcaaccaaatttttaatgttggtgtgaactaaacacagcctatatatcgatattggatgcactcatgcactgttcagggacagtgcatatatgatcgatgaaacaacgtcgcgatctgtcggtactggtccagctaattacacgcacacgattttgtcaaattaagttgatcagcttggagaggaacctcgtcgtcgttttcaggctctgatgatgtcgatcttgccatgcatcgcatgcacacacagcgagctgaaaaggccagttggatggtgaagttattcattaattagtggcggaactagatcgacatgaatgatatgatcatcctcattcaaagctactccagcccggtcccgcgcgccgcaacactgagtatacgtttttttttttctttttgaacacactgaggctacaactactttagttttaaaattgttctataatataatataagacgtgcatgtatacatatcattaactaacctatcttttccactaaaatattattatttaaatcctccacaatcaacatatctaattttattgggtgcatgcattttatttattaggataatccaaactatgaggtaataattatttgttggttttgagttaagggtgactatgccttatattttggaatggagggagtactaagcaagcttatagtgcagcaagtcttacagagaggcccctgatagatgggtaaattacactttaacctggaaatatgcaaagaaggacctagaaagaaacagaaaaagcaatcgggtccttctctttgtcatgtccataacaatgatggttggatcgacgcactggtggacgacaataggagcagagaagccatggctagctgcatatgctgatgcctagatgcgaacccaaaaggagcctccctaagatggaggttgaagcacctaaggcaaacggagaaacacctcaaccgcaccttgtaaaaccttcatcggagacgaggaatagaagaccaacgtggatgcagaaagctcgccagagaagaaaaaagtggccggcgctaccttcatttgagcaaaccctgcacgctcttagcttcaggcatagatgatgaacctggaaaacaattgacatggagccatcgtcgaagaagaaaccgactaggaagtcatggccgatgaaactaggatgaaggagccggacacccctttgagctgtacaaaacgggattaacccaactatgggagagacccgagaagtctaaaactaagcctactagtggaggaaggagctagaccccctcccccctcgctagtggccgggaagctgccgggaatggaagggaaggggttaggagggaggggattttttttctgcctatggaaacactctccagccttcgagagaaaggactcctccactgagtgcacgttcaaaatagttttatgactgtactatgtacataaagagaatggcatatgtaagaacgtattacactactcaaaaaatagcaattacactccccaatccgccgccgcctccccaccctcatccctcctgctgccttattgctgtacaatagttcgacaagccaggatggtggtggtggggcccaatttatcccggtggttcatcgactctgctgtggaggaggaggtacaacacgtgtcaaagcggtggtgcacccggtaagtgagatcgcgaatccggtggcaccatggctagatctagcggcccaacagccagacctgcacacctccatatcgggtctgcctggggtcaagcagaccagggaggccgatacagctggacatggtcggggtgacgatagcaagaagccaacgtgcgtgacaataacaggcgagtggcatggctgacgagggtgggaaaggtcggtgtggctgattgcacaatagcatgagaggccagcatggctttgatagtagatggccgatgtgggtggtggaggctggcggccggtggccaatgcggacgatgacaggcgtggcgaacgttgacggcgatccatctacacccctattttctctccatggagctcttcccctactatatagccgatccttccagtcatgaggaactctattggtgagacgatagtggtggtagctgaggaagaggacactctagcatcgcagctttgtgaagggatggcatttctgcaagaggtggtgttggcttgcactatagacccgacgaaggcgggtctgagctggccggtggttggtgtctgtgtggtggagccaagggctagcagaggttgttcgggtggaggagcattgagctgacaatggcgggtgagatacgtgaaagcctagctcgggttctcctgagccgacaacaatgacgaatttgagcatcatgttcctcccttagggcattggtgagcttccaccctttcattacgtgataagactctctgggtgaaaactaagtctagatggatggacaatggtggcgcctaagatgtcatgatctccctagaggcctgtctagaaggtcttagttactcaactttgctgcctcatctcggtttggtcttagtagttttttctgggttgtcgtcattaggttggtgcaagggatgagtggatcttcttctctctcaccccctccctccttaacacctatatgcgaggatggccgggaacttgtcaactatgtagagtgagtgtttccgcggggtgttgatcggtcacgcttagtgatggccgacttggtgccagtacttctttttttgttcacgtgagtaatacgagtactgtctgatgtgggtcgtaaaaaatagcaattgaagcatatactggtttaatttgtcttttttaataccagtttgtgataaaaatcggtaaaccgacattaaaacctgccaatccaagcgaattaagccaaccaagcggtccccttttgcgggcggctaatggtcagttctttttaaataaataggcaagagcctatgcattgcaatggaacataaattgagtttcaacattattaagttaactaaggctgttttcgggaggaggggttg

SEQ ID NO: 23860 - DNA, 2200 bp, Oryza sativa
gtcggcagggggacggcgccaaagaggctggcgccgtcctgttgaacaacggcgccagccactctggcgccccaaaaaggaccatttttaggataagtttttctaggggtctacttgcgaaataagtttttcaaaaggaccaaaatgtgaaaaatccagctatatattaacccgttcgtttctccatcaagatatggataaaaacttcgatactcatgacacgctttgtaaattgctaaactatacgttttcaatatgaaagtttatctaaaatatcatattaatttatttttaagtttgtaataactaaaactcagttaatcatatgttaataccatctcgttttgtgtaaaacacttcaacttcatcttcatcttcatttactggagaaaagaacaccacctattagaagaaaatagacatcttccgatcgaaatatttaaactgagaagaaaataatttcatgggaccatgtcttgtaataaatccaactgtcttattttaattagtagtacttatacctatgtgggtccaattaatcagataccggttttatatatagaattattttctaaattaagggatacgtgacacaaacgcatgtataaccatcatttcaaggtccatttagaactcatgaaaataaaagatactttaaaaaatggggaatgctcttgaatggtttcaaggtccatttagaactcatgaaaataaaagatactttaaaaaatggggaatgctcttgaatgggcacccgatccagactaaaaaatagaacggtcctcatgctatatctctcatgctccgccatcaactttgctacgttaaacattcatgcatgcactactgcagagtttctctctcatctcctcaacacgtgtaacattattttaaaactttaagtatttttttttcttataaactacttatccaatttatgatgcgattaaaatattatatttgttgcaattaaatctttatagaaagatctcacataattatattatgataaaaataatgtaaatgtttcacactattaaaatccaatgtttcatttataataagtagatgtttcaactagaattcgactatgttgcacattttaagtttttatgttgtaatgaataatttttgaatattgcacatggtattatttgaatacttcagtaagtaattttgacgtttcactagttcgcagatgttgtttgtaatgttttagtaagcatttcgtgatgtttcaccgtttataaatttatgttttatgtataatataaaaatatttcaattagcaatataatcgtacatatatttttagtcacaaatatagtcatgtctggtcttattttaaatattaattacaataaaaataaagatgcaaggaaaaagtacgaattaccccccgaactatcgcggtcgtccgaattacccccctgaaccacaaaaccggacattcttcaccctcaactatacaaaccggacaaattaccctatacaaaccgaacaaattacccccctcaacccaatctgcggtggttttggtctacgtggcgtacatgtgacagtccagtcagcattctatattaaaaataatgtggggcccacctgtcatacacactctctctctcactctcctcactatcttcctatctctcacggtcagcgacaggcgggggcagttgctgagggctgcagcctcggcgcggaggcagcgggggaggcggctgagggcggcggaggcgccgccggcggtggtgctgccgccgcgtcgccgctcagcctagatggtcaccggcgacacacgtgcggcggcggaagaaggcacgcggcgaaaggggagaggaggtgcgtgcggccagggcggcgactcgagacggttacttgggacacgggaagggcgatggcgacaggaatcgatgaggagaagggccgacggcggagcgtgattgcgctcggcggcggcgggaggggaggcacggcgcgggagctagtggggaggccgacggcaaaggcggcgggttggggtggttcaagggagctccaggagggtggtggcgcgaggaatcggcgagggagaccacggcggcgcacaatcgagcgcggcggcggtgaagcagagcaaaaggggaaacgacggtgcacaatcgagcgcggcgacgtcggacggtgacgcggaggcggtggctgagggcggcgggggcgg

SEQ ID NO: 23861 - DNA, 38904 bp, Oryza sativa
aggtcaccgccctcagccgctgccccagcctaccactgaccgtgagagagagaggaagagagaggaagagtgagagagagagcgtatgacaggtgggtcccacctttttttaatatagaatgctgactagactgccacgtgtacgccacgtggaccaaaaccaccgcggattgggtcgaggtgggtaattcgtccggtttgtatagttgggggtaaagaatgtccggttttgtggttcaaggggtaattcggatgaccgcgatagttcgggaggggtaattcgtactttttccaagatgcaattagattctagatcaaataaatagattacgagaaaaaatattttgaaggttgcaaaaagttcctagaaggcatataggattgtgcaagagagaaagatttagggcccctttgcttcgcaggataggaaaatcacatgaataggataaacgcatgaatcgaagtagtaacaccgaggcagaataccaggttacactaagaaaaatgctttgtagagatatttttctagtattatagaggcacttttcaaatgcctttacaatactatagagacattttaaaaaatgtctaataagtgtcttatggtgaattgtctctacaaacgaagagtcattttataaaatgtctataagatggtagaagcattttataaaatgtctataagatggtagaggcattttctagagacattaaattgtaccacaaacatatgaaaccaggcaaaaaaggagaataaaatagtttccttgcttttatcaagccttgaaacttaagatctcttggacaaaccatttttgtcttcaatgcactagccaactcaactccatgttattacttggttgtttgtgtctttagttacttatatttagtcctttagtacacattatcattctaaaaaatgtctctacatagtttaaaatgtctctacatagtttaaaatgtctcaagaaaatgcctttacatatcaggcgcattttacagtgccaaaagaatgcctttacaagataaaatctaataaactgagctgaaaatgtctctagagtaaaagttttctaggcaatttttaaagtgcctctataaagtgtctctacactataaaacttttgatcttagaaacaatttgcaaaactcctctacaaaagtacctctatatgaggtttttgttgcagtgttacatttggctcgtcagcacaactactacactaagaggataccaagccactatattttttaatgatactttgatggtttaaattatcgcataatctttctatcacgcatgatccctcaatttattttctattgaattagtcacttttaagtaagatttacaatatgtttgatcatatattgtaattttgcaactaatatttatgatgtttgattgtgcattataattctacaactacgtacattatgcataccaatatcacatacaagatgtcatcgatcaaccagtagatcaaatatagtaattacggatagatgggtgataatttggactgtatgaatcatacaaaacaataataatcattttgttgtatatcgccaatataatattgccattgctcgtgggttgccttggccgttcataagcaaattaaaccagagcttgaactggattttctttttcttattgtgaaatcaacactttttagaagtggagatgaagctgatggaggaacaaggctagccaaccaacgtgtggaagctattgatctagttgatatatgcgtttagaagctgaaccacaagcattgtaaacattagttattatcgacattggcctcgtgacctctatcttgccatcgattgagtgcaattctgtattgttggaattaatagatgggctaaggcccattcgaagattaattctttggaaaatcacaaaagcccacctcatgggatggcatgcatgtggagtttagtaccaccttgcttattctaggagagggggacctccttaaaagggagtataccctcctagccacttgaagtatgtgtggtggagagaagagggggaacacgcgctcgctcgcctcgcctggcaaggcaggcggcgcgtgcacggcatacgcgtcgaatggttcggaaaattggctcctcacccttacgcagatgcagtctccttttgcagttttgttttgctgcaggaaaattcggatttgttttgttgttggaaacattccgaaaaatccggtgcatgaaaacggctggagtccggataagttacgcgcgtcttatccggctcggttacgtagagtggagatcgtgcgggcgccctgatcaagcgatccatctctatataaaccgtgccgccgtcttcacgcaacacacgcgaaatccatctagggttttcctcctcctctgtgttgcgccgtcgctcgtagactactccatcccgcttgccagcgtgcaccggtgaaagggagagcaggtctccggaacctatgccttcgatgtcctgcaccgggagaaggcggcaataaggcttttgggaagcgcttcgcgcgactgctccctattcgttcgcgacggctcgccttcctctccgctcgcgtgctgcgcgccttcgtcgacgcttgcaaccgcgagtagttcctgccgagcaaccggtctttccgccacctcggtacatgttcgacatgttgcgcatatttgatctgttcatgttttactgcttagtttacatgtgtagatataatgatgcgttaatgctagtatacatctgtaatgtcatgatttatttatggaatatattaaatcattatatgcctatattctcaacaatccaaaaaccttattataggcgctgtgattttactatggctggttttgccgatgcactgaggccggataaatttaccggtatgcactttaagagatggcagatcagggtcactctgtggctgacagctatgaaatgcttctgggtaagtactggcaagcctatgggcgttcttaatgctgatcagcagaaagaattcgatgaggccactactctctttgtgggatgcattcttagcgtgcttggcgatcgtcttgtcgaggtgtatatgcatatgaccgacgctaaggagttgtgggatgcactgaatactaaattcggtgctactgatgctagcaatgatctgtatatcatggagcagtttcatgactacaagatggctgacaaccattttgtagtcgaataggctcatgagatacaaaccatggctaaggaactcgaactccttaagtgtgtcttacccgacgaatttgtggtcgggtgcattattgcgaaactaccttcatcttggagaggtttctgtactgcactcaaacacaagagacaggaatactccattgaggggttgatagcgtctcttgatgttgaggagaaagctcgggaaaaagatgccgcgtctaagggcgatggtgggcggtccactgccaatgttgtgcacaaggcctagaacaagagcaaggggaaatacaaagctcagcagaccaccaacttcaagaagaagaagaacaataacaatcctaatcaggatgagaggacttgctttgtgtgtggtcaacctggctatctggcaagaaagtgtccacaacacaaggggatgaaggcacctgcagggcagacctctaagtctgccaatgtgaccattggcaacactggagatggaagcgggtatggtaatttacctactgttttttcagttaatcagtctactaattggtgggttgatacaggggccaatatacatgtttgtgctgacatctcattgttttcttcttatcaggccgcacggggttccaccgtcctaatggggaatgggtcacatgattctatcgacaggaatcttgttagtggctcccgtctgactagagacggatttaagttggtttttgagtctaataaagtagtcgtgtctaaacatggatattttattggtaaaggttatgagtgcggaggcctgttctgcttttccctttttgatttctgcaataagtctgtgaaccatatttctggcagtgtggatgatgaggctaatgtatggcactcacgtttatgtcatattacttttggcttgatgtctcggctttccagcatgtgcttaattcctaagttttccattgtcaaaggttctaagtgccatagttgtgtgcaatcaaagcaacctcgcaagcctcacaaggctgctgaggagagaaacttggcacctctagaactcctacactcagatctctgtgaaatgaatgggtgttgacgaagggtggaaaacgatatttcatgacgttgattgatgatgctactagattttgctatgtgtacttgttgaaaacgaaagacgaggctctagactattttaaaatttataaggcagaagttgaaaatcaacttgacagaaagataaaaagactttggtctgatcgtggtggagagtttttctcaaacgagtttgacttattctgtaaggaacatggcattatacatgagaggacgcctccctattctcccgagtctaatgggattgctgaaaggaagaaccgcacactgaccgacttggtgaatgccatgttggacactgcgggactacctaaggcatggtggggggaggcattgttgacctcgaatcatgtgttaaacagagttcctaacagaaataaggacaaaacaccatatgagatatggattgggagaaaaccatcactttcttacttgcgcacatggggttgcttggcgaaaatcaatgtaccaataacgaagaagcgcaaacttggacctaagactatggactgtgtctttctgggatatgctcaccacagcattgcctatagatttttaatagttaaatctgaggtacctgacatgcatgttggtacaattatggagtctcgtgatgctatcttctttgagagctttttcccaatgaaggatacacatagtagttctagccaaccctctgaaataattcccagttcaatcacaccaccagaacaaactgaatatacacatgaatatgtcactaaggatgatgacagtgaagctcctcgaaggagcaaaagacaaaggatggctaagtcttttggtgatgatttcactgtgtacctcgtggatgacactcctaagtcaatttcagaagcatacgcatctcctgatgcagactactggaaggaggctgtccgtagtgaaatggattccattatcgctaacgggacttgggaggtgacagagcgaccctatgggtgtaaacctgtggggtgcaagtgggtgttcaagaagaagctcaggcctgacggtactattgaaagtacaaggctcggcttgttgctaagggctatactcaaaaagaaggcaaaaatttctttgacacttactcacctgttgctagattgaccacaattcgtgtgctactttccctagcagcctcacatggtcttctcgttcatcaaatggacgttaagacaacttttcttaatggagagctggatgaggacatctatatgaatcaacctgatgggtttgtagttgaaggtcaagaaggcaaagtgtgcaaattgttgaagtctttgtatggtctgaaacaagctcctaagcaatggcatgagaaatttgacaaaacattgacatctgcaggctttgcagtcaatgaggtagataaatgtgtgtactatcaccatggtgggggtgagggagttattccgtgcttgtatgttgatgacatactgatatttgggacaaaccttgaggtgataaatgaggttaaatcattcttgtctcaaaattttgatatgaaggatttgggagtagctgatgttatcttaaacatgaagctaattagaagtgagaatgggattacactcttgcagtcccattatgtggagaagatcttgaatcgctttggctacattgataataagccttctccaacaccttatgatcctagtttgttgcttcgcaagaacaagagaattgctaggaatcaactgcaatactcccaaatcattggctcattgatgtacctggctagtgcaactaggcctgatatctcctttgctatgagcaagttgagccggtttacctctaatccaggagatgatcactggcgtgcgcttgagcgagtaatgcgctatctgaaaggtactatggaattggggtttcactattctgggtatcctacggtactggagggatatagtgattctaactggatctctgatatggatgagatcaaagccactagtggatatgtcttcacactgggtggtggtgctgtttcctggaggtcttgcaatcagactattttgacgaggtcaaccatggaagcagaactgacggcactggatactgctactgttgaggcagaatggctgcgtgatctattaatggatctgcctattgttgaaaaaccggtgccggctatccttatgaactgtgacaatcaaacggtaattctcaaagtgaatagttccaaggataatatgaaatcatctagacatgtgaaaagacaagtgaagtctgtcaggaaattgagaaactccggagttataacgttggattacatccaaacagctagaaacctggcagatcccttcacgaagggactatcacgaaatgtgatagataatgcatcgaaggagatgggtttgagacccatgtgagttatactatggtggtaacccagtctatgtgatcggagatcccgtgaattagaacctgggaagaacaaaccattagtaaactagatgagagtaccaatctataccctttctaagtgaagatgcatgtactctcgtgagctgcaaggcaggttggctatgccttaatgagttctgttggctttaattagcgaagatgctgtcctgcagagcattcttgaaagaactcacctttgtaagcttgactgttggtcgcagtctatgaagattttgggtgaatcttctaggaagtttactaaagacctaggagtatgacttatacgctccacccgaggggtagactacagacggtctagtaccagataagactctgagtgaaacttgcttgcacaagactttcaattcaaggcgtagtccattgttcaagttgttagtaagtgtagcttagagttctaggtggatgttcaaccttaatcggtctccatcgaaccactggtatataaatagtatattggaaaaggcaaatctcagtgggattttgagatttggtgggggattgttggaattaatagatgggctaaggcccactcgaagattaattctttggaaaatcccaaaagcccacctcatgggatggcatgcatgtggagtttagtaccaccttgcttattctaggagaggggacctccttaaaagggaggatgccctcctagccacttgaagcatgtgtggtggagagaagaggggggaacacacgcgcgcgcgcgctcgctcgcctcgcctagcaggcggcgcgcgtgcacgacgtacgcgtcgaatggtccgcaaaattggctcctcacccttgcgcagatgcagcctccttttgcagttttgttttgctgcaggaaaatttggatttgttttgttgttggaaacattccgaaaaatccggtgcgtgaaaacagcgtggagtccggataagttacacgcgacttatccggctcggttacgcagagtggagatcgtgcgggcgccctgatcaagcgacctatctctatataaaccgtgccgccgccttcacacaacacacgcgaaatcaatctagggtttgcctcctcctctgtgttgcgccgtcgctcgtagactactccatcctgctcgccagcgtgcaccggcaatcgggagagcaggtctccggaacctttgccttcgacgtcctgcaccgggagaaggcggaaataaggtttttgggaagcgcttcgcgcgactgctccctgttcgtccacgatggctcgccttcctctctgctcgcctgctgcgcgccttcgtcgacgcttgcaaccgcgagtagttcctgccgagcaaccgatctttccgccacctcggtacgtgttcgacatgttgcgcatatttgatctattcatgttttactgcttagtttacatgtgtagatctaatgatgcgttaatgctagtatatatctgtaatgtcatgatttatttatggaatatattaaatcattatatgcctatattctcaacatgtatgtgacatggaaaattcatagggtcatctttgccgaaagggagtatctatagatatgttgacacatttttttagtaaaaaaaatggtccatttgttttagtaaaaaaattggtccattttattcactagaatagctagagatgaatgatcaagctcaaccaaccttaaacttaaaccatttacttgcacaacaattagaagttcttgtttacctattaactacatgcttacccatatgccaactgtcttactttgttaggatgcttttacactacaaacgactacacgccatagtgcttttacataaaaattgcagtgtaattaggatataaacaattatagtgtaactaggatgtaattatattgcatatggataatataatttctatgtttttcgtgaagttagcatagattaattaactagttaggtttctgagagtggaatctgcccactcaagtttaagttctaaacttgatatgtgtgttcgaatttacggcttattattctttcaactaaaggcgatgtatccattaacattgagaggcatgtgatgactttattaatcttatgatataaaaaccaactagattcattacattgagcagttggaactaggggtggtaacagaacaagatccatggttccttccataaatcttatctgggaaaatatatggtagaaacttagaaactgccgttggatcgaaaaatggatttataagattcgtccacgtcatcacgagtaaaaattttactcatagtaaattttttactcatgagtaaatctatgagtgaaaattttgctcgtgatgacatggataaatcttgcacgtctattttttaattcaacggtagttttcaagttttcacaacatatatataaaagtatagttataaagttggacccattatcgcctctagataggaatagaatttcacagcgttggccatgggttgcaagtagctgcccagattagttaatcggtccttatcccacgatgcccctgcaatcctgcatgaatcttgcaaaggatcaagtggcccaaaaaacgtctgcaacctggccagaaatctatagacataattccagcaaatccattgccaaaatgggattttacatcaattctaacggcaattaatactccctaattctaatatgttaaaaactacaagttatagcaacttgtatccaatagcaccaatatacaacctcttcttttttttttagaaacacggtacaaacgcaggcgctcacaacgcgcgtacactcacccctatcccactggtggagaaaccctttgtagtcccggttcgtaacccccctttagtcctggtttccaaaccgggagtaccaatccgggactaaagatcgctatctttagtcccgggtgaaataaccgggagtaaagatcgatctttagtcccggttggtaacaccaaccgggactaaagatcgagctgactttttttttttttgcatgcccctgttgctgcatggtttatatatatatatatatatatataaaccatgcatatatatgtttcaatacatatatatgcatacatatatatatatatgtatttatacatatatatgttatgcaaatgcatatgtatatagatatatatatgaacaaaatatatttacattatagaaaatgtgtacacatgcatatagaaacatatgtagtcatgtattaattacaatccattatatgtcctagctagctacgatttcgacgtagtagtactcgctgctagctcagaagctaaggaccggtgaattgtgtttccgtcgtagtagaattcacccttgggatcaaggatttcttcgttgatgaatcccatgagttgttcttgaaccgccgcgataaattccttgtgtgtggtcaggttatccctcatgcgaataaactatatgaatgtatgaaattgattagtaattaaacaagaaatcgctacgtaatgaaattttgaatttatttgtacgtacatcgagctctcttgtggtgatgatttggtctgcaaggcagtggcaatactcgcacacgtaatagccgcacaagttagttccctgcttttgctttgcgcactacaaataaatgacaaacaacgagagatctaattaatatacacttgtatgtatttgaatcggagaaatataaatgtagaggatgtgtactcacaggaaatttgaacttccgcctaagtctttctctccatttgccgcggaccaaatgacggaaccgataccaagccctacatggagtttaaagctatgattcgtagtagcaattaacataacaagattttcttaattaacaaaggaacttatgatggtacctgtctataagtttgaaaaccttgtcaaacgtagactcttttttatccattgagtcatatacgttgacggtgcaggcctccaggtcgaagagtaaaagcacccagtggaatctgcaatgtgcgtgggatgcattacatatgaaacacttagcaagttcgtacgggaatgaaatttggtatgtaggaagacagtaaaaataaactaactctgtgttgtatggcaacagtatgaacgtcttgtaatgctgcgccttcaggagatggacgagattgtcctctgtttcttgtggatattggtcgagcattgcgacgtttactttccgagggtcgatgaatccagtatcgaaaaccctccgccgtcgggccctttgaatctccattctacaacgataaaagggagtatattattttctatggtctacttatatacaaggacctaattaattaaaggagacgtatagtaagaaatctaactgaacgatatacttacaaaatccagcaactcataatagatacgtcgagggcgtccagctggtatagttcgtagattcccctgaaattgatccagagaatgtcatctccttgcaagaagtccgtgtccctgatcctcgctccgatcatctctctaccggtggcgctcatctccatgtacagctgatggaacttgtacatttgtgtgggtagggactgcagcagctcaggcttgacaagcggtttaccgagttcgtacatgtatttcacttccgccttttcgattggtgcgactcctagcaattgatccgtagttagaccggtgtcagtaataaattgttctatcgtcatttctttaccggtcaccaacggctcgatctcctggtttggttgctctccaagctgagggactggtttggactttccagaagatgctttcttcagcgttcgctcatagtccgatagcttgatggccttcttgacagatgcagacatacccctgaagaagttcctgacactggggtctataggaatcttcttttctggacttcgaggcttgaattgtctcttgacttctaatgcaacgtaagcgtcaagctcctcttgcgtgcaatcgtaccccgggtccttgttcttggcggcgtcaactttcgccttctttgttgcccttgtgtgggcaagcggtggagctgggggggcccttgactttgaaggtgccggaagaggagcttgcgggggagtaggtgtaggagcacgaggaggagtcggtgcaggatcctgaggagtcgatgctggagcctgaggtggagacggtgctagcggagcatgaggaggagacggtgcaggatcctgaggaggagatggcggagccggaggagatggtgcatgagacgccgcttgtcgcccagggaggatgatgtaccgcctgtgccatagaataatggcatggcatgtgtctcgtagatgcgtctcaccgtctcctccagggtaatccagctcgaggtcctcgtacgcgccttcgaccaactcaacttcgaccttggagtatcctgctggaatcggcctgcagtggtaagtacctgaagggtccgttgggatggccatgcccgacgccaccttcatgttgtgagagattatttattagtaatcaacatatataagcagcaactagcggaatggctaaatcttacctttattgataagttcttgaaaggaatatgcagctcacatggtgtccgctgagtgatgtcatcaacgggacaggtcgattcgtcctgtgtttgcatggcgtccatgctctgtgatcctacctgccccgttgaggcgcagctgctacagtttcctgacgggctcaccattgcaggaggaatggtcggctggggatcatgggaccgatgtgcggccatgcgttcatcaaccttccttgccacctcctcttgcatgttgagttcgtagctcgatacccggaactctaggtctgcaatcttcgcctcggtatctctcttgctcctcatccgactcctgtacgtgtggatgtcctccttgaaaccaatcttccaaggaatcacccctttccctcaagttcgtcctggatgctctggagtctgcagggcgagtgtcagctcgtccctatctctgtctggtcggaacgtgccctgagaggaggcttccactgcatctgttagtcgtcgcgcagcctcttgtatctgatagccgaagaccagtgagccatcagctgggttgagcgttccaccgtgagcatagtaccagaacttcgatcgttccggccaattggctgttgccggttcgatacccctctcaatcaagctagcctccatctgctcccacttcggcatcgcgacgctatagcctcctgaccccaagtggtgatggtacttcttcttggcggcattttctttgtttctttccatcatcgcctgcccttgttcacctgtcttatatgcaacgaactcgtcccagtgatcccttagctttgggaatgtgtcgaagttcggtgtctgccccttcagtatatacttctggtacagatctcccttgaagctctgaaactgttctgccattttcttcagagtccaccttttcactttgtcctctgtacccgcaggaagggtgaatgtctcgagcattgtggtccacagcatctctttctccgaatctgggacaaagctctcatgatctccgcgtgcccttgttcttcgccagtacaccgtactgacaggcacgttatcccgcacaacccaaccgctgtgacgtacatagttcttggcggcttcggccggggcactaggacgtccatcttcttccacttccgttatgatgtgccgaccctcaagcttcttcgctgcacctcgttgcccgcgtgccctcttctgtccaacggagggttgactaccactagcctcctcctcctggttcccctccacatccctttccacgtgcccctgctggttcccctccgcatccctctccacgttcccttcctcgttcaagtactggtttggatcctcgttcccctcttcttcattccagtactggctgcttccctccgcgattgtatcgtacaatatctgttcctcatcggggtcagccatctgttgatacatgaaacatctgctaagtcacgagacatttatgttttaacaatctaagtcatgtatgctaagtgtaaatgtcgtacattagaaccctacacaaccttacgtgctaagtctaattacaaatcgtgatataagctaagtctaggtgacgtatattatacaaccctagctagtaaataattatatactaagtctaattacaaataaaataatcttatattaaaactcaaataatattacatgctaatactaaaatagtcatgtatatgctaagtgtttcgtgcgtatatgctaagtctaattaagactacaatagtcaattgctacttgtcgcaccaattccgtagtcaataattacataccaagtctaattacaaataaagtaatattatattaaaactcaaataatattacatgctaagactaaaatagtaatgtatgctaagtgtttcgtgcgtatatgctaagtctaattaagactacaatagtcaattgctaggagtcgcaccaattccgtagtcaataatgtcatactaagtctaatttgcaataaaataatcttatattaaaactcaaataatattagaacactacacaatcttatatgataagtctaattacaggtctaataatcttaattaattgcattacaaatataacaatcatttatattattacgtcacttgcctgctccaattccttctagggcaagctcttccactcaggcttgacggacgactccgacaacacgtcttttctgcaagatacaaaaaaatgtattaggataaatgcgaagtaacatatatatatatatatatatacatatatatatatatatacatatatatatatatatatatatattgcatttcacgttaacgttcgtcctcgttcgttcgctcgttcacgttccctagctcgttcacgttcgttcgctcgttctcattcacgttcgttcgctcgttctcattcacgttcgttccctcgttctcgcttgtcttcgttcgatcgttctcgttctcgctctcgttcgttcgatcgttctcgttctcgttcacgttgtcgcggcaacgtacgttgacgtgttcgttctcgctctcgttcgttcgatcgttctcgttctcgttcgttaacggcggtgtggcggcatcggggcggcggttggcgcggcggcgtggcgacggcggcggcggcgtggcgttgtggggccgtggcggcggcggcgtggcgtggcggcggtggcgtggcgtggcgtgggcgcggcgtggcggcggcggcattgcgcgcgcggcggcgaaggcggcggcggcgtggcgacggcggcggcggcatggcgttggcatgcggcggcggcgttgcgcggcgtagaaggcggcggcgtggcgcatcgtcgtcgtggcgcggcctctcgtggcgggcggcgcgacggagagagatcgagattggagagatcgagatgcatgaagggagatctggcggcggcggctctcaccccagagatgcggcggcagcggaggagacggaggcggcggcgaggacgacgagctcgagacgacggagagatacggcggccgtcggcgcggggatttgccctaggcagtggcggcgaaggagagaggccgagagagatcgatcggccgaaaacgtttaagtgttggtgaagaagacgagggcgcaccgggaatatatatacccctggatctttacttccggttgttctcaacaaccgggactaaagatatctttagtttcggttgttctcaacaaccgggagtaaatatcttttcccgctatttcgaaattctttttaaacccggttagggttaagaaccgggactaaagattatagcactgcatatgattttcgcttacatatgtgtttataaaatagaagttaatgcattaacattatttaaagtacaaagattaatgacaattacttcgaaaaattatttttggctgtaataaattaagtggataaatcgtaataagcaaatataattaataaaaattccaataatcatatatacttagcatatatatgaatgatattattatattggtaaaaactctaattaagatatgtatgtacatactgcatgatttaaaattaataaaaattgtaatcatcatatgtacttagtgtaggaattatattaaattaaatgctaaaaactctaattaacatatgtaaatgccacatgcatgattttaaccttttaaaaattcgaatagtcatatataagtagcatatgaaagatagtaaattaaattgtgaaaaactctaatatatgaatgatagttttaaaaatatattaaatttaatacttttaaaaattctccagtcaattataattagcatatgaatgatagtaaattaaatgttaaaaactctaattaatatatgaaattgccacttgcgtgatttaaaacttttaaaaatcctctagtcaattataattagcatatgaatgctagtaaattaaatgttaaaaactctaattaacatacatatgaaattgccacctgtgtgatttaaaacttttaaaaattgtaagtatcacatataactagcatatacatgatttaaacttgttgaaacctctaataatcgtgcgtaattaatatatgccatacatcaattgatttatatggataatcaatacatccaaaatagtttacatcgtgtacacaataattacggcacgtactttctcctcactattgttccctccttgtgatcgctgcgtgagtaaggggtgtcttcatttgataggaggatgctagggtcaatcgtcaccgtgaaagggggttgcccatccaactgatcgtaatcctcgtcagtcttgtcctcaactccgacgatttttcttttgcctgggagaaccacttgacgcttaggctcatcaggccctctgcccttctttcctttgctagacatgtccttcacgaaaaagacttgcgttacatcattggcaaggacaaaaggttcgtccgagtatccaaccttgttaaggtcaacagttgtcatcccactgtcatcaatcattacgcctccaccagtcaacctaacccattggcaccggaacagaggaaccttgagaggaccatagtcaagttcccatatgtcctcgatagcaccgtaatacgtggcagttgttccatcgtgtcccatggcatcgacacgaacaacgctgttttaggtttgtgaacttcttctccttcgtgcttattattcgcttgatattcgtggagtatccagacggtacctttatgctctccaagcattcaaacatactttccttctctgccttgctaagagtgtagctggctggactcaagtaatggcttcctttctcctttggttccgggtgaaggtcgccgcgttgttccatatgcttcagatcattacgtgcttccagtgtatctttcgactttccgtatacacctaggaagccaagaaggtttacgcaaaggttcttagtgaggtgcatcacgtcgattgcgtggcgtacgtccaagaattcccaatatggtaactcccaaaatatagagttctttttccacatcgccgcgtgaccatcttcgctctctatatgctggcttccaggcccctttccgaacactactttaagatctttaaccatagcaaacactgttttcccgctgcgatgtttaggcttcgtacggtggtcggccttatgttcgaagtgcttgcctttcttccgtaccgggtggtttgctgcaaggaatcgacgatgacccatgtatacaaccttcctacagtgcttaagatacgtactttctgtttcatccatacagtgagtgcaagccttgtaccccttgttggactgtccggataggttgctaagtgcaggccaatcgttgatggttacgaacagcagcgctcgtaggttaaactcctcctgtttgtcctcgtcccacacggggacaccttccttcttccacaactgtttaagatcttcgaccagtggtcttaggtacacgtcaatgtcgttaccaggttgcttggggccttgaataataatcggcatcattatgtacttcctcttcatgcatagccaggggggaggttgtagatacacatcgtaacgggccaagtgctatggccgctgctcatctctccaaaaggattcatgccatccgtactcaaaccaaaccgtatgtttcgtgcgtcctttccaaattctttaaattttctgtcgatgtttcaccactgcgaaccatcggcggggtgtctcagcatcccgtcctgttgacgctcttcagcgtgccatcgcaacattctagcattccccttgttcctgaacaaacgccttagccgtggtattatagggaaataccacatcaccttagcaggaattctcttctttgttagctgcccgtcaacttctcctggatcgtcccgtctaatcttgtatcgtagtgctttgcaaacagggcatgcttctaggttctcacactcctcaccgcgatataggatacaatcgttcggacatgcgtgaatcttatgaacttccagtcctaacgggcagactatcttcttagcctcgtacgttgtctcgggcaatttgtttccccccggaagaatgttcttgacgagtttcaataaatcgccaaatgccttgtcactaaccccattttttgccttccattgcaacaactccagagtggtatccaactttttgtgcccctgctcgcaacctgggtacaacgaagttctgtggtcctccaacatcttgtccaatttatgggcctccttttcactttcccagtcctccctggcgtcctgcaacatctgaccaagatcatccgcaacgtcgttaccatcagcagctatttcctcctcgcccgtttgatttccttcaaatccaacatactgagcaaagtccggaatattgtcgtcttccacttcatcttcttccatttcaacaccttgctctccgtgggatgtccaacaattatagcttggcatgaaccccgactcaaacaagtggaaatgaatagtcctggatgcagaatactccttctgattcttacacttattgcatggacaacaaataaaacccctttgcctgttagcttcggccactctcaaaaaatagtgcacgccgtcaataaactctttggaccgccggtcagcgtacatccattgccgatccatctacatgagtcaaaaaaaccgcacacaaataattattcttacaataatgagagtcatacaataattataagatatctttattcatacaaaaatcataaaatattacaccaaataattcttaaaaactatttgtaaagttttaaactaattttaatgtgttttacttcttttaattttcattttagtttgttttctattatttaagattaactttcactagagttttccttctcaactattttataaaaccttgtttagcaaatgaactaaatttctatatattctttcttccccacacacattttctctctcatcaacttacaactaaattttggagacaaaaaaaagtgtgcaaaatataggtgcaaatgtagtatgacaaaaaaaaacattggaggatgaagttgcaaaccttttaggcacctccgatttgtatgtaatcaccaaaataaattcaatagaaattttggcatgacctcccctcttttttgaagtaattttgaagcttgctcgggcagctggaggaggaagaagacatatatataggggtgggactttagtcccggttggtagcaccaaccggggctaaagatcaccgggatcattagtcccggttggtattaagatctttagtcccggttggtaacaccaaccggggctaaagatcaccgggataccaaccgggactaaagatcccgggggggtctgataggtcctgacagcattcgaaccgggactaaagatgatctttagtcccggttggtaacacaaaccgggactaaagatcaaatatgcccgtttcccttttgaaccaggactaaagatcatctttagccctggtttttattgcatccgggactattgtggaaatcggccgaccgacgaaagatggtttctccaccagtgacaggaccttgataatttaggtccagcaatcaccagcaatgtctttcatttaaaatcacttgtcatctttcaaaaactccatgttcaaataccgccgaccagcccacgaaaaaaaaacatatgtaacgctttcgaatcacgtagcaatgtaatcaaatacaaactgatttgtgttgaactaatcagaccttcagaattgagcatgcctcttgctcgattcatcgattgtgattcagtcagggatatagttatgtgtgtctggtggtggctcagtgggtggcggatgttgattgctcggctcggtggcgtgctatgagcaatgttgagcgcaatagcggcaccgagaggggtgggggaggtggtgttaggccagtgtcgatggcgtggaggcggcggatccctgacaaaataggctttgatggcagctcggcggaggtcatgtcttgcagagacaatgccgttgtggcaacgactcttcggcaagataagctatggctgcttggcggttgctgtggtttgcaatgatgacgatgtagtagcggtggtcctccggtgagataagctttggtggctcggtagagcggtgacaacttttggcgatataagctatgacaactcagcataggtggctctctgcagcgatgatggcatggcaatggtggaatctgtgaaggagtaggttgtccaggaggcatgagtttttgcttggcaactacaaggtagttggcggactagttttgctttctttctttactcaatggcggatcaaaggagcttttgtagttgatgcaacaatagtgagagggtgtggcaattgaagggtgggctagcctcgcatctccttaaaattttaagcagggaaaaaagtttggtgctagtattctagtttttctttccagttgttcgtttgtctatgtttcttggttatgagatttagagtgtaagaactcgtgtaacatttgtctatgtatatccacttgtgaatatagaggccgaatttctatccattatcttgaaaaaaagactttcaggaaaaaaagagttcaatgtttaagatgttgggattgaatcactcaatttccctttggaaccattcactaattccactcacggtaatattgctcggtagtaagaatatactctctccgtttcacaatgtaagtcattctagcatttcttatattcatgttgatgttaatgaatctaaatatattatcaatatgaatgtgagaaatactagaatgacttacattctgaaacggaggaagtactatatatactctcccataaaacacattgttaatatattcatttaagttctaaaatgattataactcctctgcatccatttcaggttgtgatagggacaaattgcaatcgccagcaattacaactgtaaactagcagacaatgtatcaaaaattttggaaacagttttgctatttcacttgtgacagatttttgggctcctatttttcactttttcatccatagtatcttgcatcaagattcgtattctagcttgtatatccaacatgcacttatacccagtcatatagcacttatactcaattggaatgcacttatactcatttaaaatgcacttatactcaattacaaactataaagcaccaaaattagattttataatagttcttttctctagatttatggtttttgacatgcttgtctctttttcatttcatttaaaacgtgctatattcattgattgaaaattctgcaagatttaaagctataaatgtaaagcaagatcaatagataattaggtagtcccttttgcaacttagactgtgttcgtttgggatggttgggaaccaaactcctccgcacagaaaacggagcaatccattagcacgtgattaattaagtattagctattttttttcaaaaatggaacagtataatttttttaaacaactttcgtatagaaacttttttgcaaaaaacgcaccaaaataacagtttaaaaagcgtgcgcgtggaaaacgagaaggggagttgggaaggaaacgaactgagtcagtcaggttgagcctctgcttttgttgatatcctcttaatgtcctggttaattatttgaagctaatgatatgcaaaactttggactgaagccgatgcatacatagttgctgcttggttcagttttcaaaaaaaaaaaaagaagaaaggttgagatacatacttgtccttgatccggtagatattgttaagggttcacttgaccaaaagggctctagctaacacatgccaagaatttcaggacccggtcacccagacatgaaaaattgaaaactctaatcacttgcaacgcaaagataaccacggattttcctggcgaataccaatgatatgatattttgacattttctccaagatagttttaattagaatacactccctttgtcttaaaacactattgttttagacgaaaaatttctatactaattaatgttccatcaccaccacccaactaccatacggaacccacaaaactgtgggttgcttatcttttagcctctacatatcatagatcccaatattatgattttttcatctttacaaaatgacaacaaaattatcataatgataatatattagataattaaaaaaataattgcaacgcacaggcattgtgctaatgtcttataaaaaccgtatttttacagtgggttcactaaatctttttaatactactttatcattaccttctctttagctatcgagtaattgtcaacattgccagtcatttaaaaaatagtcagttatctaaagatagagcgtttttttttaatttcaatctatgtaagctaccgttttatcattttaatctaatttggattacttccccttttggtaaaaaggaaaaaactgagcacggatatagttggccaaaagacccatagctcgacgacccggtctacggcacggagatttggtccgatcgaagcacagtatggcccaactgttgtcgggcccataccggcccaacctgattgttgggccatgccggagtctcttccttgacacgatggaccggtctggcacagctcggtccaatagatgtgagaggcaaaatagacttatttcaaccatgtatgatatgaccccaagaaatgaggaaggcaaattagacttgttccaagaaggagcacgatagacttgtcgtgccttggggctggcctgacatggcccaagtcttattgggctatacctgaactgttggtgcagcctgtgggcaggcacaacataacccgacagtatgtcaatcgggccatgcctggttgtgcccaggcagactgggctgtgcggtacatttggccatctataacccccatattcaacaaagacacacaactttccgagtagcggtattttttccaagtcaacttatgctggccattttgcagcgggtccagtcaacttatatgggcactgttatattgtgtcgtctccttcggttttgctagaccagaaagacttgttaatcaaaggcaggctattaattagcactggattcttcagagcttaatgctcattcgatcaggcagaagtggcctaagcaaatgccatttaactaatttcttcaaagatatactagcagtattatattttgactcctaatttgacttccgtatccaagaaaaagtcccaatggctgtggaaggaaaaaaaaaactgtattaatttcttgaccaagttactctttgttgcttccatagatgattgatctctcccatttcgtggctatatgtgatctctagtagtgtcttccatttctctgacatggttttcctttttattaattagattagatagtttgaatgtttgatatctcaaattgcagctgcatcaaatctttcccgccttagccttgtaggttgattccatttcttgtccatggcgagagcggattcagctggcgctggcgctccagaagccattgatggcgagctggtggagctggagctcggggagagaaacaatggcgtccctcccgtcgccgaggaagaaggcggcgagccaagacccggtggccggccgccggcgtcggggcgccgcctcctcaggcgactcagcccggcatccgtggcgcgcgcgtgcgggcggtggctgaggcacccggcgcacctcgccctgctggcgtgggcgctctgcgtcgcggcgtcgggcgccatgctcgcgctcctcctcctcggcgccctcgacggcgcgttcccgcgcaagtcggcccgcaaccggtggatcgaggtgaacaaccaggtgctcaacgcgctcttcaccctcatgagcatctaccagcacccggcgctcttccaccacgccgccatgctcctccggtggcgcccggacgacgtcaaggcgctcaggaaggcgtaccgccgccgccggaaggccgccgccgccggagacggcgcaggggggtgggagcggcttcacatgtccgtggtggtcgcgctcctccacgtcgcctgcttcgcgcagtacgccatgtgcggcctctactggggctactcccgcaaggcccgcccggacgccgccgagacctcgctcgccgtgatcggcgccgcgacgccggcgctcgcgggcctgtacgcgtacttcggcccgctcgggaggaggaagcccgggacggcgacgagcgcgcgccaccaggaggaacccgacgaccttgagctcgccgccgccgccgccgccgacgtcgtggtcgcggagtgggccggcgggctgctcgacgtcggcgacgacccgacggcgtggtggctgtcgtgcctctgcacgttctgcgtgttcgggtggaacatggagcggatgggcctcgggaacaagcacgtgcacgccgtcacgttcgcgctcctctgcttcgcgccgctctgggtgctcaacgtcgccgccatgaacatccgagacgaggccgtcggcgacgcggtcggcgcggtggcggtggcgctctgcgcgctcggcctcctctacggcggctactggcgggcgcggatgcggcggcggttcgggctcctccccgggcggcacggcggcggcggcgcgtgctgcggctcgccgtcctcgctcgccgactacctgcggtggatgttctgctggagctgcgcgctggcgcaggaggtgaggacggcgaacgtcctgctcctcgacgccgacgaggctggcggcgccggagggggaagctcaagctccggcggcggcgggcgaggtgacgccactctgctgcagccgttgccgcgggagaacggggtgaagctggcattccatcatgcagctgcagtgccagtggacacggacgcggcctacgggccgccggtgaacggctcgccacaccgcggcagcggcggcggcggcgatgagtcgccgttgctgcagaggcagcagggtcgcgagtctcaggctgaggaaatgaggccgcctctgcagccattgatgacggaagcagaatgccgacgggttcagtaataatgccaggagcaatgcgtgcgacagagtccagaaatgatacgaatatactagtcgatttttttgccctttttctctctctctttcagcttgttcttcaaattgcatttcaaacattcaatttcgaaactgtcaatatttcttaagattgcatttcaaagatccaacctcgaaattgatgaacagagaggctcaagaacattttgtgttccatgtctctcttctttgctctttcaaacaaaaagatatttgcttggatccaataaaaagtagctgataccttacggtatcaaatcgtttccgatcgttagatctaacagtgtataccttgcccagctaaattcaatgattagaaatgatttagtatcctaaggtactggtacctcgtgatacttttttctggctgtagcaaaatctcgaggaacagtgcaacactatcattagactcatttggtcgttttttttttggtgactcatttggtcgttaattatacaacctttgccaatcacttaatcacatgccgaagcttttaaccacgcagttaattatcactttaatcacgtttccatgagtgatcagatggcgaggacgagggcagggaggttcttgcgagcccggtcaggcagcctgctctgccacaactgctccgactgcgacctcgagcacggcgccgccgcctcggctcccttgccgcctccgccgccgccgagcctggtgacgacgagcgcggtgttgcagtactcgcggacgccggtgacgcggccgccggggccgaccgtccacgcgtgcacccagtacagcttccccgtggcgtccgtcccctccgccagcaccgtctccccgaaggcgtccacgccgcggaccttgaacgggagccccgccgcgccgccgccgccgccggtgaggaggcgcatgagcaccagatgctggtgcgcgcggggcccgtggaaccaccagtccacgtccgggttcagcagccgccgcacggcgtccccgtcgccgcgctccagcgcgcggtacagctcctccaccaccgccttgctgctgctcaccaccacctcctcctcgccgccgccgccggcatcggcggcgtcgccgttcgcgtgtaccttgtcgctagccagctctgctgctgctgctgcgaagcgagcgatcgatcgaattggggggaagggaggaggaggttggcaatggcgaatgtgaggttggcgagtgccctttatataggggagagttttggatttgtgtgtgctagtggtaatttgttgggaacccatgtgagtaggattccaaaagcatggaatttcctttttgtctcagcttaagcaaagaggtaatgcgattcagtttttaaggcattttttgttgcatgatactacttcaaatgttattcatccatccaaccgttgacggaaaaaatatactgaaacatatccggatactattctctgataccttacacatattagttgcacaaaaaccaggcgatcagtattctctccgtttcgtattataaattatttggagtatttctttaagtcaaactttataaaaaaattagcaatatttattacaaaacaaatatactataacagtactattcaatggtcgatttaatgaaattaatacgctaagaacataggataaacaagatgatttataatatgaaacatagggagtaatgttgataacctcttatccatgactgaaaacgagttctcgtgaaatagtaaatttattctatggtcgaaaatacatccttgaagtagtaaattagattaaatgtgaaaacaattaaaattgtattatgcatgaaggcttgctttgtgataaagtcaagagctttatttccatgatcccaatttggtgcatctctccagatattagttgtcaaagctctaaaatattggccacattggtatcattcgtccgacctatattattgagagatggtggacaggactttctctattttaatttatgaactactaattgcaaatacggtgtttgataaaaaaaaaagtggggcacgataagtggctaaggaaaccaatatcagattgctaacatgacattgaattcatagaacaaaacaattgaatgattgttttttatgaacatgaagtgggaggggtgaaattgtacagactgatgctgtggcaatatgttcatttatgaaaccaacacaatttaagcattgctggacaatttgctcatatgttaccaaagtgcaaaactctcataatagtggggaggaaattactttccctgtcaaaacacccattgttcagaagcaaacataggaaaaaccaccaagaatatgccacacccaaccttatatattttccctattgattccaggcacgctcaaagctaataagtctccattttaacctaggccagaaattcgataggaaacggattccactaggaactacctaagatgcattcgacacatattcctttgtctcgcgtttcttaattattcttttgcaatctgatgaagaatatgactccagaataccggcaaattgcagtttctatctacccaagttgctttctttcattttcttttcttttctgcagaattcaagcagtgtatcacccaaggctgcatcgatcggtgaaggctctattcgatgatcagaattaacacggaaattaaaggttaggatttgagtgtcaattagcctgtaacgcactagttagctttcctgaatcctcgcagcattggccagtttctacatgaacagctcatgagtgcgtttcagaggcgtggcaacttgccgaggaaaaaagggggaaaaaatgaaaagaaagaacactcaagagcatacattacgtgcatgacccaattaaactactctcgagaaaagttaatcagaggttattgtctgattgattcgagtgattgatatacctgcatgcaatccaaggctttaattaaacaaacaaagtcaagagatatatactagctgtttttttttaattattgtagttgcaagatgttgttgtggattaaaagtggctttttgttaagagtgacttgtggaaattaacgtaagctttcaatctttcatgcatgcatgaacaagctgttagtgctttccttttgttcaagctgatctcctcgctgaaaatgcgtgtaagtatctgacatcttcatcctccctgaaacgttttgtgtgtggcctgaaaacctgccatggaatgtggtggtaactgaggcttgatgcaggggatcatgatcatcagatgaccatgcattcatggattaaagtggggttggagaacggatgactgaattaattgcatcactagttaaagcaattgctaataattttcagtttatcttataactaccacctctgttctgctctaaatataaacatttcaatgattcaaattttatacacaatatttacattttttagattactacttatcccatcaattatctcctgtttaaatttatccttattttacaccaactagtgtttgcaatttcggtaaaaaaatgatatttatgaacggtggtcatctgaatttcgtgaattttgatggttcttttttttcatgaaatcattaaaaaatttagcagtttttgactgaattttaataaaatctgaccaaattcaaagagtgcaaaaaaatcgaacgcgatatttcctctttgttttttttttggggtggggggtgggattggaaatttcgaaccgaagttgcataacactaaccccaaccacccctcacattatagtcttttcttctcaaaacttaatgtatactagacaacctagaatgtttatactggggaacggaggaaggagctgataacaagatcgtttttgtgagttggcttgaatatatagttctattcctgttaatagctagccactttggtcccatagtcttacgaaagggtaagattgataggtgatgtttcagaaaggccaaggtcatatgcaccatgttagctaggattgtcctaatttcctttgccaatatatctttgatctacctgggctgtcgtagtcgccgaaagttttaccaacatctaatgcatatattaatttgtaatctctcaatctgtctccagtaccacttctgctgacagagatcaacatcttcccctggcagattatctttgccgacagattactgatatccataaatccatttaccatcatgccatgccacatgttaaagtggaccatcatggcaacttttctttactaggattaattatacatgtattgtacgttgaccctttggtcaaacatgtactcccctggtcttgaaatataagggttcctatgtttattcgaagtcaaactatcgccattctaacccaatatatataaagaatattaatattcgtgatgtcaaatgagcatcatttgagccattataaaatatactttcatatatagtgtacgcatgtggcagatgtgttaatacttgctctagtaaatttggtcaaacttagaataatttggcttaagataaacccatggtttacttatgttagaatggagacggagttaattacacttaattaatatggttagtaatttatccagctcattttttctgttaccttgttactttcatgtagagcagggacatctggttatttaaaatttaatagcactatatggacaagtctataccaaatcaaccacacgatttatataaggaacggtaccgatgggaagcattgagcgaaaaacgaagaaacaatctcaccagccgccgggagactgaattaatcctaaccaaatatcctccaacacaaggaaggtacaattcaaaatttttgttactcctctcatatgcatggccagcaatcaagaaaattaactggcctttaccaatcatttttcaagataaaaatctatggatcatacctaatccaaaattaataatttgttctgtggatgtgctcataatattctgaccatgtgatgcatcggacgataagcacccaatatatgcttataagataagggaatcctcaacagaataagcaagagaggatcagaggaatgctggtaaatggctacacagaattatattacagcatcaagaatagttctcctcctcgtctccatattggtggcaaatattgcccataggacaagttagcaatcctaggcgatcagcatctccaagaaaaataaaggggagaaacaaattgaaagagtcctaggtgagtgaaattgtgaaaatgtgaaatggacaacctgaggaagtaacatctgatagatgatgtcaccatcctacataccatctgcagtcagcagagagcgaacatggttggaaatttgtcagccaagcaatggttactggttaggttcttcagagacattcttcatactgccttttggaatatatcttactccatttgtcctaaaataccataactttagcatttcaaatttgtctcaaaatataacaacttctccacctacattctcttcttaactaagcacaacatatcttctcctatttaatttctctacctatttttcttaactaattacaactatccactattcaatttcccacctccatagggtctgttcttttctccggtactccaactataacttcgtcgttttccgttagaaatctttttaaactgttaaatgatatttttttattttcttaaatcaaataaatctttttaagtttatattagttaatacttaattaattgtgttttaattaatgaactttctagtttcacgtgcggctaaaaatctccttaaaaacaaacaaacataaccttaataccgtgtctaagcctaaaattttttatattttagaatgaaaatagtagttatcttttaggacagagttagtagatatatttatagcacttactagtgttgatctgtaccatgtacaaaatctgcaaaaaccctaccagtaatcacgtgttgagagaaatctgcccgcacaaaatcaataacccacaagttaatcagcagtatcgatctgcagccaccatagatgataccaccatatacatttctagaaacaatgttgtttaattttggtaggatatcacaggagaaccgataattacactctctctacacatttggatgcataaatcatcatcagctgtagcttgaccgacctaacctaaccaaaacatcacatcatcaaaatcagtgtgtatcaaacaattagggccaacatctttgcaggcaattaggagtactctatgcacgcacagcagttcacacttctgtgtcacatcagcattgatataggatatcaattataaaaaatcatgtacgtgtgcattattgattatcgttagaatcttcagatgagcggtatcaaggttcagttaagccagtgtttcttctagctggctactttggtggccacaatttttaatagaatgctgagacggagccaggtggcatatatatctttggtactaataatacatttcagtctctgcgcatctgttgattactcatttatatagtggttcacatcatcagtgtttttttttcacttttgaggaaaataatgctgatcattcacagaagagaacgacgaaaagggtatagcatgcatacaacaaatgttgttgagaggaaatatataaccacaaattatgtaaaaatcttcatgaaaaaggtaaaaatatatttaatctcggcttttttaaaaaatccattagctagctcaatctgtgggaggtgtagatttgtacaacaaccatgacccaacattgagaacgttatctttcgctagcatgaatttagtgcaactaaagattaatttgccaaataaaaagccataggtgccgtattttgttgcgttttcaatgtaatgatagtggtgatggtacttacaacacggcgtggggaagaagtcggcgaggacgtcaccgagattggcgatgcaacaagtgccagtgttggagaacaccggccggcgaccttgatgccttgcaacctggaagaataccggtgaatggaatcaccaattcaccatatgggtgaagatccctacaaggagagaatcgcactacggaatcccctccagcgattttctaaggatcgcgtgtcttaggggttttgggagagtggaagtagagagaccgtcatccttccaacagccggactcctgctttttgtatcactggggaactggaggcgattgaaaatagaagataattaagagcgcaatcgatcaatgtgcttaatttgcaattaagaaaattaacagaaatttaattgcattaattgcacgggccaacagatgtaattagctgtgtccatgattctctctgccgaaagattatttcccaacatttagttatcagacacctatcctttcagttggtactttcaccattttcaacttttggacatgatgtttgactgttcatattattaaaaattcagtgtgaacatgcaaaacacaagtcattttaaaatatctttaaccatgcacaagccacaacaaaataaattatatgtaataactatttttaaagataaatggtcaaatgtcatgacaaaaactaacaatgtcattcatttagaaacagtaccacttaggaccaaaattttcacccacaaaacggtaatccaaccgccacctgcatatactatgtacttcctccgtccccaaattgttgtctttataggatttaaaatttatcctatcaatcacttctcatttaattttatccttattcaaccctcaatcacgatcccactatcaaacatacatcatttttctaccctcaatcacgatcccactatcaaacatacatcatttaataaaggacattacaatttttctatcaaagcttaatcaatgctaaacaacctatagtgacaactattttgggacggaagaagtatatctctagctacaactcaaaatgcgcagggccggccctggccctatgcagccgaggcgaccgccgggggcccatgatggtggggggccaactctgaaaatttaaaatccttcgatgaagtagatctttggtcgcactgcaagatttttgcgaaaatatttaaggcccctttgaatcaaaggattcatgtaggaatttcataggattcaaatcctataggaaattatcctatttggccctttgattcaaaggattgaagctctccaaatcctatgaaattcctatagaatggcacattgcatgtggattttggaggaaatttagcaagagctccaacctctttgaaaatttcttttgagtctatctctctcatccgattcctgtgtttttcctgcgctccaatcaaacgaccattcctgtgtttttcatgtgttttgcaatcctctgttttacacttcaattcctaccagaatcctgtgtttttcctattcctctgttttttctaccctgcgattcaaaggggcccttactcatgagaactcatccgatgtttagatcaatgatttttattcagaatcttcgatgtccgcgcctgagattctgaagtctgttatggatacagattgctatccaaatgtttcagttgcttatcgaattctcttaactgtacctatgacggtagcttcagctgaaagaagtttatcaaaattgaggttgttgaagaactatttgagatcaactatgtcgcaagaaaggttaaatggcttggttatgtgctctatcgagaatgatatcttggacactattgatcttaataccgttcttgatgattttgcatcaagaaatatccaaagaagtatcttttcataagaagcaatgaatatgatggggttctatttttcactaaggtaatgatattagttctaaggtattattttggtcgactttatttctcaataattaccagacatgttaaatttaatatatggatatatttattttcgttttgcaagtaaaattagcgtctatatatatcacaaaattttttatatagtttagagggcccatcacgataagtttgcctagggccctcaaaatcataggaccggccctgaaaatgcgtgtgccctttcgtcacatgtgcgttcatgcaccgtctctagtgatacttgcaaattgtaaccatctttttttttgcataggtccgcgtcagtgattcatatgttgtctagcttaatttttcatttggtaggtttccaccgtcatatatattcgttgttctctccctattggacacaatccgaggaggatcacgaatactaacatgggacatgtgccccctcccaaaatttttttttcaagatttctaagtgaccattacattacaaaattgccccctctttctaatatgtcaatgtgccaagtcagcattgcataccaaaaaaatcaaaataaatttgggatctagtatacatatgagtcactaaatctaagatacctttaatttactggagttaattggcaacttgttctatctacttggagttaatctaggaagaatgcattaattggaagatgtgttcttccaattaatgcacacatccagtggcagccacgatgttgtcaatgtagcaatccatgaaaagcacacgggaatgatttttccatggatgccctaggtatgacactaaagcgctaattggaacctcactggccatgagacataccttgggcgtccgggaaagaaccactccgatgtggttttgcataggtacattttagtttctagtgcaaatttctatctattagaatataaagtttgtagcaaattacaatcatctttgcaatgtacaatcattgccagtggttcatctctgtcctagtatattctctccactcctcttggacatgggttgtatatcacagtacagggctacaaagattgaaatggggccatgtggccccccccccggccacacacacatacaaagtttatttttttgcaatatttgaaccaaatatagcatttgtttaattagagctgattaaactttaaaattggcccctatttctaatgtgtgtcaatgtcctttaaatatatataaaaaaatctagcttaagcttggccactagctagcatcacccttgctagtggttcggatctatacaactcattttttctccttgaatggatcagtgtcgtcacggatttgtatcctttgtattaaccctagttacggtttacggtttgctgttctttatcctagccgtctatttctgagaaaatgtagaatttccttggtccttattataacatctatatatgctcctatttcccatctctaaactcataggtaagtttgtagttcagtttctctaccgccaattgcctccccgccgtgctatctctatatcatttctcaactctcatgttgtcatgcaaatagagatcagtgaagaatgcagcaacatgcgcgtgtgctcataatgctattgttggagaaaatgctcaaaatctaacaacaatctttgggtatctgtatataggaccagcattttttttctaacttcgtgcaatttgctgctatttgttcgtattagtttgaaatttatgctagcaattgatctctgtagatgctggtttactcttcaggttgtgctttttgctaaaaattaatactagcattttgttctgagttaattaagaggtgtaatgttcacttgatcattgggtttttggggagtttttccggttatcatcagtacaagttttgttcaatgcaaagaagttgcatcctcaccggcaacatggcaagtaggacagagttagccatggatgacaatgactctcacctttgatatctagagtaccaggtgatggaggccaaatatgaaagaaggaaacctcaccgttgttttcagtggcgtccttgagcctgagcgggctgtacgaccgaatagggcccccaaattttaagggtccataaaatattaagtatgtcctatatataataatattagaggctttaattttgttaatttgcagtctaaatagtagtaaaacaagacccaaaacactgcagaaggtgaaccgatccaacttccatcgtactcccgtccaggcgtccgcgtcgtcgcgtatcgccgaagtcccgacgccgcagccgcttcgtctcctctccccagtcccctacggcctccgcttctacttcatcgctgatgattggctgattgccacgcccgtttttaattttactataaaaaattactaggctactagagccccattttaatattttgcacggggacccgatttggccgggacgcccctggttgttttgaaacacccctaatacattgtatttgcttgctgctagcggtagtgattaattattgtgtctttcttttaattcttattattacatggtaatgaggatatatttttgcttgttacggagttttgtatcatatcttagtataaagttgatgtccactaacttctaaatctcaatatatatgtaaatgtgtcacattattacccagtagcaattattatctatagtactttaaataacataaaaatgtgtaacatcatcactcctagcaattattatctagagtattttaaataacatgcaaatataacatatcatttacaattttgttgacatgcaagcaacgtcaaattaatatctctatattatttttacattatttaaacatatacacatatcatttataacgtataatatgtattcatccacatatcccgtagtaaattaaacgtgagaaatacaactagttattatagttggtactccgacctcggatctttacatagttaagcctgtatatatattgcagcatttcaacatcaaagcagcacatttagatgtctgtcttttttttcaaaaaaaaaaaaagatatagtgcagtatagtactacacgacgtacacgttcgcatgaattcgggggcccactttccagcgagacgccaggtggggccgacccagcgcgccaggaaggattgatgcatgcgtgggcccacgtgtcagatggcgagcacgaggccaggcagcgacctgtcgtcgtcgtcgtcgccgccgccgcgcccacgttggctctgccagcacacggcggcgcgccggcgaactcctcctccgtcgagctgcggccggcagtggccgccgccgccgacgtcccggacggtgacggaggtgttgaagtactcgcggaggcgggtgatgcggccgccctcgacggcccaggcgtggacccagtacgcgcgtggcccctcccacccttccgccaccacccacccgccgccgcgccccaccgccgccacctgccgcggcacgaacacgaaggacgacgccgacgcagcctcggcctccccggtcaggcgccgccgcatgtgctcgcaccgcctcggcccgtggaaccaccagtccacgtcgcccgccagcacggccgacgccgccgccccgtcccccgccgccaccgccgcgtacagcgactccaccagcctctcgttctccctcgccgtcatcatcgcctcctcctccgcttccaactccatggccatccgatcggttagttcttgggagatgatcgatgcgtcgatgtggtcgagcaggtgtggtgcatggaaggatgagctaagctaggcgagagtgagggctatttatagggggtttgatttcttgaggaggtggggcccacagggggtggaaagcttgtgaatgaagtatccgtgcaatcacctaattcggtgcaactatgtaactctcatcctacaccgttggatcgagaaatggacgctcccagtaaattttaacttatgagtgaatctacgagttaaattttaacttataatgatgtggataatggtataggatgagagttgtattattacattgaattaggtgattgcaccggatacttccccgtggataatagggttaggtttgtgagatttggagtgaactagctagctgggtagtggtagagtacgtaattaagtgatgaagatttgctgctgggggtttgaatatcctaatgattgtgaatgcaaatggcgatggaggtgtgtcggggagacatcaacatctataccgactagtgaggtttcgcctgggagcgtccagaactgaaatgactattctgccctttatattccttgtgcaggataacaccgttgttgacttttatcacgacatttgagcgtttgttttatttaaaaataataatataaatatcatttattttgtcatgacttgttatattattaattaaaaaaatttaagcctagcttatattttaccatatttatattaaacttgtttaaacattgttttaaaaatcaacagcagcatccctttagaaatagaggtagtatattgcaaagtgagcgtagctcaactagtttcttgtggtggaaacagcccacccggattctaatcctagatttgacaacgaggtgtatgtggtgacttcgtcaatctcaagatatgccggcccaattatatggaggtgctcatagggataaggtctgcgtgtgtgcgttcataggatcactggtggagaaaccatctttcgtcggtcggccgatttccacaatagtcccggatgcaataaaaaccggggctaaagatgatctttagtcccggttcaaaagggaaacgggtatatttgatctttagtcccagtttgtgttaccaaccgggactaaacatcatctttagtcccggttcgaatgctgtcaggacctgtcaggcccccccgggatctttagtcccggt

SEQ ID NO: 23862 - DNA, 18238 bp, Oryza sativa
cttgagaggggtatcgaaccgaccaccgctaaatggccggatcgatcgaaattctggtactatgctcacggtggaacgcttaacccagttgatggctccctagtcttcagcgatcagaggctgccagtcgactaacggatgcagtggaagcctcttctcagggcacgttccgacctgacagtgagaaggacgagctatcactcgccctgcagactcccgatcatctaggacgaacacgagggaaaggggtgatccttggaagattggattcaaggaggacatccacacgtacaggagtcggatgaggagcaagagagataccgaggcgaagattgcagatcttgagtacagggtatcgagctacgagctcagcattcaagaggaggtggcaaggaaggtggataaacgcatggccgcacatcggtcccaggatccccagccgtacattcctcctgcaatggtcagcccatcaggcaatcgtagcagctgcgcctcaacggggcaggtaggatcacagagcatggtcgccatgcaaactcaggacgaaaccacctaccccgttgatgagatcactcagcggacaccatgtgagctacatattcccttcaagaacttatcaatcaaggtatgctcgtagttttatgatttttgacttgtctattccgcaagttgctgcttatgttgattactaatagataacctctcaccacgtgaaggtggtgtcgggaatggccatcccaacggacccttcagggacttaccactgcaggccgattcctgcaggatactcgaaggtcaaagttgagttggtggaagccgcgtacgaggacctcgagttggactaccctggaggagacggtgagacgcatctacgagacacaagccacgccattatactatggtgcaagcggtacatcatcctccctgggcgagaagcggcgtctcgtgcaccatctcctccggctccgccatctcctcctcaggctccagcaccgtctccacctcaggctcctgcaccgattcttcctcaggctcctacaccgactccgcatcaggctcctactcaagcttctgcagtgactcctcttcaggctcctgcgccgactcctcctcaagctccttgtccatctccttccaagtcaaggtcccaccaagctccaccgcctgtccgcacaagggcaacaaagaaggtgaaagttgacgccgccgaaaacaaggagccggcgtacaattgcatgcaagaggagcttgacgcttatgtggcagcagaagtcaagaggcaattgaagccttgaagtccagaaaagaagattcctatagactcgagtgctaggaagttcttcaggggtatgtctgcacatgccaaggaggctataaagctatcggactataagcgaacacttaagaaagcatattctggaaagtccaaaccaatccctcagcttggagagcaaccaaaccaggaggttgagccgttggtgacaggtgaagaatttggaataaaagaatttatttctgacaccgggctaactacggatcaattgctacgaggtgcaccaatcccaaagacggaagtgaaatacaagcatgaactcagtaaatcgcttgtcaagcctgagcagctgcagtccctaccgacacagatgtacaaatttcatcaattgtacatggaaatgagcgccaccggtagagagataattggagcgaggattagggacacggacttcttgctaggagaagatattctctggatcaatttcaagagtatctacaaactataccaactggacgccctcgacgtctctattatgagttgttggattttgtaagtatcgttcagttagatttcttattacatttcctttaattaattaggtccttgtatataagtacaccatatataatatatacttccttttatcgttgtagaatggagattcaaagggcccgacggtggggggttttcgatactagattcatcgaccctcggaaagtaaacgtctcaatgatcgacaagtatccggaagcaatagaggacaatctcgtccatctcttaaaggcgcagcattacaagacattcatactatttccgtacaacacacagttagtttttactatcttcctaccaaatttcattcccgtacgtacatgctaagtgttttatatgtcatgcatccgacacacattgcagattccactgggtccttttactcttcgacttggaggcctgcgtagttaatgtaaatgactcaatggataaaaaagagtctacgtttgaccagctttttgaacttatagacaggtaatgtcataagttccaatgttattacgaatcttgatataattaattgctactacgaatcatagctttaaactccatgtagggcttagtatcagttccgtcatttggtccacggcaattggaaagaaagacttaggaggaagtttaaatttcctatgagtacacatgctctacatttatattgaatctccaattcaaatacaagtgtatattaattagatctctcgctgtttgtcaggtatatatagtgcgcaaagtaagaacagggaactaacttgtgcggctattacgtgtgcgagtattgccactgccttgcagaccaaatcatcaccacaagagagcttaatgtacgtacaaataaattcaaaatttcattgcgtacgtatcgatttgttgtttactaattaatttcatacatttataggttattcgtatgaggtataacctcgcacacaaggaatttatcatggcggttcaagaacaactcatgggattcatcaacgaacaagtcattgatccccagggtgaattctactacgacggaaatacaattcataagtcgttagcttctgagataacgactactacatcgaagtcgtagctagcaaggacataatgaattgtaattaatacatgtctatttttctatatgtttacatttactttagtgtaaatatatattttggtcatatatatgcactcattttaagtgctttaatatatatatacatatgcatttgcatacatatatgtataaatacatatatattatgcatgtatatgtattgaaacatatataaatataatatatatatatatatatatatatatataactactatacaacaccttaaggtgctacgtattaaacgaagcgtgatacagacctcacatcccacaccacaccatcctcccccaccacaccaagatgttcagtaattttttaactcgcgaacgaaaatatagagcgctaccttattggataagagccataggaaggtgcgtagtaaaatatttactcacgagccctgtgcagccaccctcttgcatctcgagatgttcaataatatttttacttcattaaagtatgagtatttataccataggaaattctatccaaccattccttccagcatcaatcactccatttttttgggatctatagcacggcaatctcaatcgtgattctagcagaggaaaggacgacgcccccttcaccgcgtgctcgccagcgagggcttgatggcggtggccaccgacgacgatgaagatgttgaagagatgcagggctaccggatcggaaggattggtagtgcctcatgcaaggaagacagactagtccagatgggatctgcagttggaacacggtcttctctggtgcatttgtgttgttctttggtctttagagcaaatctttatttttttttggctgtatttgatctatttttagttcttgaatttttagctctcaattcgtcagcactcctgatgatatttggtttgatagctaggttagtaggttgtgcacttctgcaaacaatgctgcagtgtcccttcctccggggtggggaaggtcacgatcgaccgcgctcggcgggcggcagcgacggactgcaggcccggcgagcctctcaggtcgccgttgatggggatggaggccttcgacacagctgcagcatccccttcgtccatgtatgatggcgctagatgtagctccaatcggttcctaggcgttgagtttcaaatttgtactgatgcagtgatgcttattcctggaattgctggatttcttccgtgtgattcattacgtacgtgtgccaggttcggccggccggcactgttcccgtcctcggggaagctcatggagtcatggtgtcgcaagtcgcaactgcgtgcagtggcccatcgccgtcgaccttgagactaacatttggccttcactgaacttcgcgccgtcgtcgatacctcctgccaggctgcctcatggcagcgacaagcaagacatcggcaggagtcaaaatgctagcagtagctgccgtttagttttttttatgcattatatagatggacctacagctgccctgtaaatttgttactactagtagcacatttatgttgtcataaaaatttactgtaccttttttttactatataccagcagcgatctcgcttgatgcacacattttcgtctacgtcgttgccatgattgcacgtggtgagctccggctaggccatgtcgaacagcacgaataactcactggcaagcgaggattggtactcaccactacgacgctaaaactacgcaaccatcttccctttttctttaaacgacgacgaaaaaaatgttcacccccattttttccggatctgccatcagttcgtgtggatggaataattcctttctttccgtcactttaactgcgattcaattctccctgcgatcacatttttatctgcttcaaaacaaaagtcattttttaactacacatgccgagtatttttataactacaaaatcatctggggttggaaccgctagatctgcacttagttttttcaaataacagtcaaaatttaactatttatttcacacagcacgaaagatgtttacaacccataagttattttttacctattaaatccgacgatcaaaacaattctcatgcaccacgatcaaaacaactctcatgcaccgtacaagttattttttaactatacacgttcaaaaactctatttttattattaaatgaaagtaaaattatcaacctcatgtcgattaaggcccagagtaatattttaacttataacatgaggcagtaattattttactcagccttcacaaggagtggtgtacaggcaaggcaaattagaggagagatgatccagtgattttttctacctgccgtacaatttttttactcattaagcgttcacatgaccagacgagtaatttttttaactcgggacaaatgggatgggaaaagactttgctggcggtggtagcagtaaaagcggtccaagaggatgcggtatatgagaaaagcgaggaatccggaggcgagcgctgagaggcgcgctacttccttcgtagcgctacacacgcgctgtgtagcaccaccccgcgcgtatatatatatatatatatatatatatatatatatatatgcataaaccatgcagcaacagggccatgcaaataaaaaaaatggcacctcgatctttagtcccggttatttcacccaggactaaagatagcgatcttcagtcccggattgtttaaaccgggattaaagggggttaccaactgggactaataagggtttctctaccagtgtttactattatattgttaatttaattaccctagaaacaatagcatagctattgggaccatttggataggctaatccgggacagatgggaacataaaagccaaaaggatacttcgatggagatgcatgcattgcactgcaatttgcagtgatggcaatttgagccacatgtctgtcttatctgattggattagagggaaccgaatccgaattcacttcagtttcataattaacatgtgcctttagcaaagtatatactataggatagcagcaagcaacaagtagcaaaaaggtcagtgtccgggcatgcatgcttgttgcttgtacgtgccgtgtaggccagataagatgataaatggaataattaatggatgattggttatttcctaggatttctccataagatttttttcatgatgtttactcaatcaggttagtttctgttatatgttttatacatacagatgttgtcctgcatgagtgactgaccagtgatcatcaccaccttaacaaaagaagaacaaaagtttgatatttttctttgagaactaaaggagtacattctcttgtaaaacagtctaatagtacagtgactacagtagagaatatatcgtacaaactaaatctaacttaattacgagaaaatcatttttgttggatgggggagaattgctactctactctaataagttatataaatatgtaattagaagaaaaaatggtgtccattacgacttcgtcattctcaagatatgcaggctcatttctcagaggtacacatcggggtataatgtatgtgcgtttatgagcgagtgtatgtatattatgaacgtctacccttatactatgtttataaaaaaaatgtcgagtaaaaaaacgaaggcagtgtggaataatttacccatcgaagacaggatatagtaaacttagggtgtgtttgaggagaaggggattgaggagattgggaagatacgcaaaatgaggtgagccattagctcatgattaattgaatattaactattttaaatttcaaaaatggattaatatgattttttaaaacaacttttctatagaaaatttttgcaaaaaacacaccgtttaatagtttcaaaagcgtgcgcgtggaaaactgagactcaatctcccctatctcccccgaaagaacgatgccttagacagttgaggcatagaccaccgtatgctggggaatttaactatttgccattattagattcggcagttatccaaatacccctcttaggtttgcacatattattttgcccttcttaagaaatgtcttcttaactatttgccacttttacccacgtggcatgctaacatggcaacggagggtagaaaccggtgtgggacccactagtcagcctctcctctctccttctctccctccggtccagcgtggcgccatcatgatggtggaggaggtagagcagcggcgacgaataaggagaagcagcggcagacggggctcctcgcggtagtggtggatgcagagcggcgacgccagcggaggaggaggcgtagcagcggcagacaagctcctcgtggaggcagtgaaggcggagtggcggcgtcgcggaggaggcgtagcacggcactggcggaggaggaggcgtagcggcggcggacgagctcctcgcaacggccgggcaggtaaagcggtggtgccggcagaggaaaaggcatagcggtggcggacaggctcctcacggtggcggcgctggcggaagaggtatagtggcggcggatgggctcctcgcaacggtggaggaggcagagcggcggcaccagaggaggaggcatagcggcagtggtgggcgtggtgcggctgacggtgaccgaactggtgcgctccatcatgacgctgttgctggtccggtcgctggcgaggatgaaccccggcgtcatcgaggagcccgtccgccgttgctcctcctcatccgtcaccgctgctccatcatggtggcgccacgctagaccggagggagagaagaaggagagatgagaggctgattagtgggttccacactggtttctaccctccgttgccatgttggcatgccacgtgggcaaaagtggtaaatagttaagaagacatctcttaagggggtaaaatatgagcatactaagggcccctttgatttggaagaaaaacataggaattttgaaatagttcaatcatataggaaaatttcctatgaagccttttgaaacaaaggattgaatcctatccaatcctttaaaattcctatgaaatgaataatcctatagagattttgtagaaaatttagcaagagcttcaacctcttggtaatttttcattgaatctatctctctcatccaattcctatgtttttcctacgattcaatcaaactattattcctgtgtttttcctacgttttgcaatcatctgttttacacttgtactcctatcaaaatacgtttttcctattactactttttctcaatcctgcgatttaaagggacctaaaagagatatttgataattggacttaatcctgcgatttaaagggacctaaaagaggtatttgataattctcaaatctaaaagcggcaaatagttaaatttaccctgtatgctcgcacccggccgtatatgtcgcgtcctcctctccaaggcagctaccacacccacacgcgaagcttccagtcgcggtcggtcggggtctcaataatatctggccgtgaaagtgacaaattaattagcaagatccaacaagaattcgagatcgagctagctagcagctgtagcacgcgacgacgcgagaccatcaccggcaacttgcgaatccatcgatcttgatcgatcaaatcggtaacctttaccgcctacgatgcacatctgcacgtacgtgtgcactgcgtgcgcggctggcgctcagggtttacattaccgccgcggttaccggtcctaccgaggtacggtaatagaaaaatcacagtaacctccttaaattcaaataaatttaaaaataatttaaacttttgataaatttttacacggtattgtacggtttttcacggttaccgtgcttaccaccagggcacggtaaccctggcccccgacagtttagaaaaccctgacggctctccagcgatcgtaaaaaactcaatcctacgtaaagtacgtgtacatctatcccatggcctcgatcgcccgagctcctttctttctttttcttcatacttatacttatattatagattttatctcaattttatacgaaaacattttatatggaatttattttaaaatattggataaatttacttaatattataataattagaacttaattaatcatgcgttaattttttttatttttttaaactaattttacttttattttcagtagaaccaaaggccattcttacgcagggattatacgtacctactcttcggtcctgtttggataataatcctccggaatcttgttatttaggagtattaatcgtagattactgacaaaacccattctataacctctaggctattttgcgagacgaatctaacgaggtatattaatctatgatttgctacagtgatgctacagtaatcatccactaatcatggattaatatacatcattaaattcgtctcgcaaaatagtttaggggttataaaatcggttttgtcgataatctacgtttaatactactaaataacaagattttggagggctatttgatagcttgagtatccaaacaagaccttctcagtgagcggctgtgccatttgccagcattcaccggtgacctgaccgccatcgatcgccatgcatgccatccgacatgccaaactaatattgaaaaaaaaaacgaaaatatacgtcgattacttctagtacagtatatatgctgctgcctacgtgcagtatccaccttttccaacttggattcagattcagacgcgtgcactgctgtgctatgccgtgcatgcatcccacgactattcttcttgacgtgctcctctagctttcccaataattaatgacgatagtcactgttacctctatctcaaaatatatcaataggatataacctaatactttatcttctttatattacatatgaaataagtcaaacttatttaaatttaattaaatttacagaaaaatattatagtacttctaactgaaaacaagcatattatcaatatatattaaatgttagatttaatgaaaataatttgatattgttaatgttgctatttttctatattacaaaagtttgactatagaaaaatcaaagcgacttataatacgaaacggaggaaggattacgaatctggatatgcggcacatttttagattcgtacgtattactaagctatgccaaatacgatactatttggttatattttaggatagaaatagaactctcataatttatactgttagtatataagtaataatagaagaaattaattaacacaacactacaacagtaatcagcagcaagatagaacacagctagctctagtttaagtgtaactaggcaacaagctattcatttgctacttgcagtagcggactgaacgaatcaattgaatatatcttgtgagcttacttcaaacagttcagcacatgcttataattaataaatccatgcatatataggttgactgcccaagaccaaaacgtgcatcatatctatatatatgcgacttctctacgagagaatattttcaaacatgcatatatagttgaagtccatgcttgcatggaaatgcaccaattaaattgaatcaaacctcgaatatatccatcgatccatgagaccgtgaccacatcttgactagtatatatatatcctcgtatcatcgagctcatgtctcaccgattcgtgacagttttagattcgacatgaaaatgaaatcgaccaatggaatactagtactttaagactttgaagtgagctaggcagtagtttgtttgggctggatggttgaataatggaattcaaagttctacagtgcacatgaaagattaccactcacaactgttttatctatttatttattttttttgtcatcctatccaatgatatatccaatgatagttgaagtggcagcttatcggactagaaagctggggatcaactaaacaacagagaatcacgtgaaagggacttataaattcaatgaaagcaaagtgttaaagtttgttgtgtttatttatcgatctttggtaaagctaatgagatcacgttttacaattttataattaatgacacggtcatatatacattaaccgtaccgatctaggataattcagacatggctcagcttatctgaattctggttattaataagcaaaataaataagcatgcatgtaccagacaacgatttttcttctgttacaggtttgcgagttttacaccataataggatcaatttatcattgacactgtaccaaggtttacatcattatcactatcagttatctgtgattctcagttacgtatacttgcaagacttgacttcatgcatgctgaatcgaagttatcaagttgacctaacctaattgtttgagatcattaattatatagattataactgtaatatagtgagcacatggatggtctgctaggatcaataattggttagctagtagatggttccatggatgtcattgcaaacgtcaatgcatataggtcaagctaacataggaccaacagttatgcttcacttgtcaaaagagatattttcttttcctttcttcttttcttctttttccatgcgtgtgaaagagattttcaaagagaaggggatctatatgtctgtctaaacagaatttacctctttatgagaccggccagctgggttgctttagtaccctacagtttgttaaatgttaatcactatcttttctccctgtttaaattgcatacatgcatggtatatcatataacttttcttgaaagctagcaacttaattgcttgatagattgctagatatgcatgagtcagtcaactactcaaccacatgggtcctgtttctagatgatctagtaacggttgtcatgcatatgcaacaggataatggcactgtcaataacaaatactaacagtacaaagaatgtgatagatgatcggtatgtgcatgcagctgctaatgcaggagaaagtcaaaacggatgatgattagttcatgccatccaaaactagaggaattttgaaggatttaattcctgaggaaaaaaaactcatgttgtcctttggaacaaagaaataactccctcaaagtcttcaaaattcctatgtttacttttccgacagaaaagactcatatatttttcccatgtgccatccaaacgttagttttgaaactttttttgtctttaattcctatcgaatccaacggccatgacactttgttcccatattattattctgttcatgtatttacaatccaaccagagtcgtcttcaagtcctgttgtttttctctctgaacaataactttgtcatagctatgcaaatggcggattcacctcccggacagcactagcggctacccggctttgcgtgttcggccactggattcactgtggtaattaaagtccaccaattcaccgtctttcccggacaaaattagcaggttaaaattaattagatcttggtgtaaacggcgaggattgggcgttagccatcggtaatctgttgtggcttgcttgtttgccttcaaaatggacgtggaccactccaagtctccaaccatcggaatcaatggaatctcctagattaatgacaaaatcgtatatattttttcagcataaactggatcatgacttgatgattagcaaactgagcatatacacataggtttagtggcagtgtggcacggctttaattagacttatccaggttttctgaaagtcacagttgaataacttatgaaaaataacttcgtcatgacgttcttcccaagcatgtttctagattcctttgctctactggtcaaacccaaattaaacttatctgaaaatagttttggtcaagccaaatagtagtagtcagtgagcacatcagcatggggacgacgacagatgagttatgctgatgcacgtgtacaatctggacatttcaatattatctatcttggtgacagtagcataaattagtcaatgcgtttgatcaatcaaacaattaatcaattaaggtcatgggattgacagtgatcctgtgctggaaattagtttaagagcgaggattatatatatttaagctatctacaggctgattatatttgccgtgagcaatcataataagtaattaatttaatggtcaatgaaatgatccacctgaaggctgaactcctctttgcttggaacgtcatgtgtccttgtcggttctaggctgcttctggctgggcgttaattaatttgcttctggaggaaacccaagagttaatcaacaagtcaaagatctctttccgggctttgttctattaatcccaatataaaagcgattggatagaattaagagaggataggtgtggaataacttcatttcaaatctacctcaatcccggtttaactgaacaagacctcaaataaagacatacatacatgatggatgataatgatgtagcagccattcagcccaaatggcaaacatccactacatctggtaagtactctttcatatatagcatttccagcaaaaaaaaaagaacacactataaaaatatatttaattatatatttaataaaactaatttagtgttataaatattgttatatttttctataaacatagtcagataaaaccaaaataatttacaatatgaaacggacggagtagtcggtagtgtaggctgcccttctaggcctttttcagctggcttgtgtgttgctggatgggctttcacgtgggccgtcatgctcagcacgtgggccagcccacacatctgactcacctagtcctttcaagagcaatagttttgcatccacatggttatcaaggaaatgaatgggacactttatgcatacattattttgttgtatgatacgtgaatttatgctccgtccatccttaaatatatttgatgccgttaatttttttaaatatgtttgacctttcgtcttattcaaaaaatttaagtaattattaattcatttcctatcatttgattcattgttaaatatgcttttatgtatacatatagttttacatatttcacaaaagttttttaataatatgaatggtcaaacatgtttaaaaaagtcaacggcatcaaatatttagagacggggggaatacattagtcaaggtgcagttctgaactaaaacatgcatcagtttctcgtggggacaacataaaagtagtttaattaattgctgctaaagaccggtttaattcttgagaaacatgtggagttcattgagcacgtccacatctttgtagataggcacacaaggatgcgtaaaattaaagagaacaccggtaagaggtgatcttactagcaaggagcatgctaaaaagagataaatgggaagaaaatgaggttagtttcatatttattttattgaataaagttgtgctagctaccatgtgttcaaatttcatcccaaagttattttagatacgaacaccatgttcttaaatttgaatctattttgtacacttgaaattgttaatatattacctttgagtaaaatacatggtagccgggcggtccttaaatttggaccagattcatgaatttgtaaaatacaacacatctacatctctagtcttggtttaatgtataccactcaaagtccaaagtgcatatgacatagctcacgcgccgatatggttatccacggttacgagaattatgtccttaggcctacactatagtattccccaaaactgactccaaccacccccaactcaacaaatatatatgtatttctcagcatctagaaaattcatagtatataagtcatgcgctaaaagtatatttgatagttctaagagtcacacgagggacctaaatgtaatgttcttgctacggttgacgaccacgtcaaggattaaaattccagaacgaaatttcggaacacccccccccccctcccataatattttttcagctgatatttttattttttttgtgaattttggcaatattttgttcaaatttttgaaaatttcgaaccaaaattttggtatatcagccccctcacatataaacgtccaaaccaaaagattaaaccctgggcaatatactttgaccacggtagatgtgtatttataagttcatagacctgtaccggccatgtattttacccacgagcttttaaatacttgcatcatctttactattataaaaattaaagttgttttttcagtattttgatacgtcatccatatatgagttggttttaaaatcgttcgcttttgaaaatacatatccgtatttgagtcggggggttttaattttgtccgcttttggaatgacagaaggagtcgtataagaaatccattaaagaaaactcgcatgttaatatgggataatcgaactccctaattatagctcatgattttctagactcacagtgaatttcacctttactaaaccatataacaataataagattaaaatagctttcatccgttgtaacgcacgggtattttttctagtctagtaataatttaacgggaatgctaggggatgagataccgtttcccaacatgatgcccctcctccacaaacgcgattctcacccatgcgacgcgcccgaagccatcagcgcgcgcccgtcccctgcctccgtcgtccccatcccctaccgccgcagcgcccgtcccccgccgccgccatccccatcccccaccgccgccaccgccgcgcccgcacccaccgccaccgccgccgtcgccgtcccttgccgccgcgcccgtcccctgccatcgccgccgcgcccgcacccaccaccgccgccgccgtcgccgtccctcgctgccgccgccgcgcccgtcccctactgtcgccgtcgccgttgccgtcctagtctacaggggacggctgcaggtggccggccgcgcgtcgggatgctcctctcccaacgggatgcacagttatatctactaggaatcatctgatacctggtaagtatcatccgatatctcttaagtatcgcgcgatacatagcagaaatcgtctgatacctgacatgatacttcgcgagtatcacgcgatacgtggtagaaatcgtctgatacctgacaggtatcacatgatacctcgcgagtatcacgcgatacgtggtagaaatcgcatgatacttgataagtatcacatgatactttgcaagtatcacctgaaacgtttgtagaatcgtctgatacctgataagcatcacacctgatacctactcgggatcatctcgttcgaaaacgggattccgttatatagcagcccccataatttaagaggcaaggttttgcgcttaccaaggtcaacgtgctaagagcaggtacaatagcaggctattagccagctataaacatattttaataagataaagatgagagagaaaagtagcgggctacatatctgtagccaactgtagcacggactccaagacgcattgtgtgtatgacaggtgggaccatatattaatagtatagtaagcaattattatatgaattgactattagattggttataaatgatttggagctagcagtgggctatactattaaacttgctctaaactatgctgattagactgaacaaacctaaatttaaccagatgttatggatttcgaccgaagttctttttttttttagataattcgacctaagttcttaaaaaaaaaaccatgtaagcgtcgctgaagaaagtactaatagatgatccttcactttatgaagcttataacttgtttaacatgttgaacctaataaagcgtcatcgaaagtgaaggatgattgttaaacttgcctggaaaacgtggttggatctagacgaaaatctgtccgtaaagcagcccgaaatccttgttagtatccaaatcaaagagagcgcatgtgttgtcatggagaaaaggacacatgccaggatgaaccttcttctagagtatgacattaaattgctgaaaattcagtgattcgggtggactgctcttattcagtcagcttggggacagaggtcagaggggttagtgctttgattgtagcaggtttaattacttactccttcccggttaataatacatactagtgccacatcacttgaccagattgtcacatgtcgtggagttagtgttagttctcaaaacaaaaaataaaaataaaaaaagaaacaagagtgcactgctgttgttagtgtgcagttgcactttgttaattacctggacaatggcttcagctggttctcattgaaacctagtcagagatgtagatacatcaaacatggctgtactttttctccactgattgatcatgtaggtttttttcactgagcatgataaattgagatataaattagtaattggaatccaagaagaaatatgattgtaattcctaccttctggtctcactcactgatcaagtaattgggagctaggtcggcctgccagctactactgtttgttttcagggatgtaaaactgcatgcataccatatgttgtagatctttctccccatgttttgatgtaagcatcatttgttgcactttatatcagaggatggaggaatccacatctgcatatcgtttacaagtcagtaaattgcttgcagcatggggaacctgaagtgatgtgattccctgcctaaactagatgggacgacgagggacttaaagtggacctattcctttattgggtcttacagcgatgggccgggcaggctatccaagacttgttgggcctagtggaatcaacgaccagactttcagctcttccgaacaggagaaatttggaggattttcgtacggaataagttcacattaggtcccttaatttgttctgaaatttatctctgaaccgaatactaggtatagaccgtcccccaactcacagcagtgtcaattttagtccctcggaagtataatgaccggtttcagctgacatggcggttgagtcaagcgtgcgacccacatgtcagaacaacatagtctaaataaaaaataaaaattggtggaccccacctgtaagcgacacataatctccttcctctctcttctctcaaccttttctcgacagcataggccggagcagagcgtcagcgctatgacgcgtgaagccatggggcgtaagcggcggcatgaaggagcacggcggccattggcggagcagttgcatctcctacggccgcgtgcctcattccccttctttcctctctgtccccagaggcaggcggcgattggcgagatgagctgggtggcagcgacgactggctagagagggcgatgggtggcaagagaggagctagcggcggcggcaagagaggagctgggcgcgggagagagcagtcatttggaaagacgttgtcgtcttctccggcgtcgctttcttcaacatcttcttcggctggctactaaaaaacactatcggcgcctgtgcg

SEQ ID NO: 23863 - DNA, 12265 bp, Oryza sativa
cactgccaccaggcaccagcctttccatgggaccttggccatcgcctccctccattgtgacaggagagagacccctcctgccaccttctcccgcctatgtgccactcgcacccgctcctccgtgtcacatatggtctttcacagtcccacttcctcctccgccagagcagctgccgccaccgcagtgccaaccccaggccctttctcctcacacaactcctctccccctcctcctcatcctcgtgggagctaagcacacccttaggggtggtggagcggtggagaaggtgctagtggcaaacaaggggattgcgtgcagggtgatgcggacgcgcgtggaggcttgggagccccaccgtggcagtccactgtgttgttgatcgctgggcactgcacgtgagtgccaccgacaaggctgtgtggcttggcccgctgcccacaagggaaagctacctcaacatcgtcatcattgttggcgctgcgctctgcatcggcgccacctaatttccgctgcggtggcattggttggctaggacggaagagagatggggaaggaagagaggggagagagggaagagagaaggaagatgttggtttaccgacctgtggggtccacgagatctttattatttgtttttgctattatgccacatagccgaaaccgtcttgggaccttatttgcactgattttagaagttaagagacgcatcatatttggttttacggttcaatgacgagtttaaaactcgacgataaattgagggaaccaaagtaaacttattccttttcgtacaaattgaacctgtaaaaattcctctcttaagagccctcacattgtgatcgtgccagattaccccgatcatcagcccagcccatcaatgatttttctccgttccaaagatcacgttgggatccagtttatttatgtgtatacgccaacactttgaactgaaattatgatcgtgtctgcctgttcagtcatctcgcttagcttaagccaaagtcaatgtggttatttcaagaaaatctagctaaacatgcttacatgtagactacgatggaaacagaattcatatcagttaagaagagagatatctgaattcatgggtgcagaaataattatgacaactcgaagggccaaggaacacaatgatttttatcaatgacataactaccaaagacaacagaaattattgtcattgtggagctactagcattgattcgagctgaattttgcaaaaaataataaatgcaaataatccaacacccagtgaggaaaagaaagaatgttgtaactcggcagacaaccatttagcccataaaccaatacaagactgttcaccatggggaacctgaagcatatgcaagcaagaacccataaaatggactcaaactagctaagtttgaaataatgaacctgtaagcaccaagcaccactaaattgacatttttccctctgtttttggggcaatattgaatacattgtgtgttccaagtatccaaacggttttacaaaatttacttgatagctcacatggcagactccagccgaaagaagccccaatctcacacaaattggtaaaattgacgagggtttgacaaccagatttatcattacctgaaacactcaatcattaaacacgtgtgaaattctgatatacatggtatgtcgacactgtattagggcaaaactgaatacaattgatgctgaaggacatgtagaacaaaccaagtttttcatgatattattctattcaaactgaatattatgcacagccatgttgtacaaaatccaaacaagccaatgcaattgcaattccaacacggaggaagttttaaaattatgtggccctctcataataaaattcctacgtccaactagggataaacataaatatgggacaatctcacaacttagacaaataaagagaaacagcaccaatcaaactttcttaccctgccattcttctatctaaactcacaattgattctttcattgttattgcttctcatcatcattcatttcatcagaatctgagtcactggcattatatcctgaaaaggagaaaaaaaatgatacattagcaaaaatgttcacagcctagaagaagcagtttttatattatatattaaaaaacatactaaacattgtaatacccggacgctttgtgccaactttccagactgaaggcctgtatctagatgccttctcagcccacgctcttcccttgtaaaatgaaaaagaaacaaaataagtgcaaagtataatcaaaacatagtattcaactattatgatgcagttactggacatgtctgtattccacaaaaatacaccacatgcagaaagaggatagggaaaaaaatcgaaatagtatgacgaataaactgtactgtatctatataaaactcatttcacagtatctatataaaaccgtaacctaactcagatgtgaaatgttttccctttaataattcaaccaaatgaatttatcgtctgtgcaagcatgttcattagcactagcaaatatgaaacaacagccatgaatttctttgatctttcttctttcataacctggttattctcctctagggtccagctcctcacaacttgctctaaagagatgtcccttggctgagttatataggcaatattttgatcctgtggtttaagaaagctctaaggttgagagtaacagttacttacaaaaacaactaagcactgaagtacacttccattaagtgccttggaaggatgatgacaaaagctatgggtagtcaagcataaatgcttaggaaagatagtgaaatcaatagggacaaaagacccccaaaaatgcctccaggtcttatatttttcaacaagatggcaaactaaataggccttatcaaatcaacagaggaagtaacataaaatgagttaacaaattcaaacaatcagtgatagctactaccaaatagaacatcaaatcatcaatcaactgccataaaagcagcaacactagtataaaacatttacacaaacaagaaataacacccaaatgtggagaacccatttccatgacataaatcaattgaaacttaacatacccaaggaacagaagtctaactgttcaagaaaaaacttgcaagaaggatggcacagagaataaacacaacataaaaagggctaatctgcatgtgaaccatcttctgtatcaagtttcctcattaagctagcaaagctcaaatatccattgaatccatctcaacacatcaacatttagttagttgccttatcaatggttgaaaagaataaacataaaatcaacaaagcagaaaaaaggaaccccaaacataatccatcatttgtccaaaattgcccaattattcaactgaagcacaaacaatggtgcattatttagatatggaaatcaatgaattaaaaataggaaaggatagcattttcaaaccctttttgtatcacgagaattttcctagttcttacctttttcctacaaaatcttttgatgtcctaaatttcagaaatggccttaaaggttacggataccccaaaggttttgctctccaactaatgaaacatgactaccacatcactcccagataggaaggcaagtcacttgaagctaagcacaaatctagcaatttgtacagtggtgtttcctccatggttggagctggagactgttggacatctcagaataaatatatataaatgggtaccaaagcaaacatagcctcttaggttgtgatgagtcaatagtgttggtatgagatatgtgcatctatctggccaaatgaggtggtggtagaagataaagtttgtgttcttttaattgtcgaatcaaaattatctttcccatactggtgctgaggttttttatataattattatgggggtatgccacgtgtgacctagacaatggtaacctccagtatatgattgcatcagccccatttgtggtcagtaatgggttgggcattcatctccataaccacacctccctatacatttttaaagttgttgggattttctatatagtatatagtattgttcttaggcgtatttcactttgtacatgcaatatttagcattaatacctcctcactccaagaatattacatacagattaaaaactaacaaaggcaaagaaagctatgctatcatcaaaaaggtataaactttagccagccaaatcctccatgataaagcagcaatcaactccaaatataaatgaagccagcaaatagaggacagaaaaaataatgttgcaccttctgtttctaaccaaagaatacactccaaataccaaccaaaacaaaacagtatttctctctgtcgtgaggaaaaaaaagaaaactaacaatggctgagaacagaacagatcctcccataaaagtgtatgcaaggaaccagaaacaaatgagcacccctgcccatattctaattattttcttcctttcaaaattgaccacaattgctaaagaaaggaaaaaaaacacttggttgaattctacaaattgaaccgggccactaccatacatgttgccacttcccaccctgaagttcaaacaccagctaaaaaaaaatattccacggctctgacaaaaataagtcgcaacttctagttaaaactatgctaataataattgtaataatcgatacgttaaaactctacccaaaaggaggaattgctatcaccatattgcatacaatactttacaagaaccagattagaaccacaaaagcttgtgcatcagcacaagaaaacagcacggaagcagttcacgacccgaacccgaccaaagtaactagatagtatcatcgacacacaaaaaaaaaagaaaaaaaaactatgcttgcaactcgcaagaactaacatagacagggttttggtaaaaaaaaggaggcgtcccctacccccatgtcttcctactccagaaacaagttgtaatcagagtcgcacccttatattcaaatctaagaagcaaggcactagagaaatctaataaataatgcagtgataaacggtgcgcacgaaaggaatcacatcgtgtttaagctaacgccttccccggatctcgattcagccgagcaaaataactttgatctagagatggttgagacctataaacggggaggagcaggagcagctcgatcctcctccggtctctagcacgcaggggcacataaccagcggatcaaatcacgcaccaccaccaccaaaggaagaaaaagacaaggtggggggaaccatgggggggggggggggtggggcggggatggatgggcatgggcgcaccttgtgctcgttcttggggatgccgtagccggagtggtacatctgcgcgacgagcacctgcatggcggagtcgccgcggcgggcctccttgagcgcgtcctggaaccagcgctgcacgcagtcgcccaccacctccgacagcggcttcctctcctcctccaccgccccgccgttcaccccctccatgtgccgccgctaccgccctatgccgcttcgccgctcggcgaggcgaggcgcggtcgggtttcttctccggcagtggcgccgccgccgccgccgcaagaggaaggttagttggggaggcggcgcgaggagagagaattttacaaaataaacggcgggaggggaggggttttgtgtaaaattgtcggggattttgcctttttttttttctttttctgcaagttgcgggttttttttctcttttctttacctcgacacgggacggcgcacgcggttttttcaaaggggagggggtttggttgcctgccgtgcggggaaatcgcttcgcccccgattcaaatgccgccgtttatttgtgtaggattcgaattcggatagaacatgtttcagctagaaattgggaaagaaaaacatgtttcaccaagaaattcggacggaaaacgtttatggttctctatgtgggtcggtacctgagtcggatacaagatgttttctatccgagacaaatacggcataatattcataaacataagttttttttgcttttagaaatacataaggagtcgtataagaaattctttcaaaaaaaactcgcatgctaactggtaccgagagtcgaatttctaattgctttagaattcttatcagatcataagaaaacaatatataggatatgatcatatatatttggatatttggatgggaatgtttatatatcagttaatttttggatcatcggatatgctttaagattcgtgcagaggcattaatcctagctctcctcctcttgttcccctcgcatcgcgcattccgccgccaccactcccatcatgcattcctccgcctgatcccccgccgccaccgccccaccgcatcgtcgcccgccttgccggagggtgtcaacggcgccggcgaaaccccccttccccccggccagcctccttctcctccccactccttcctcctcgagccatcggcggcgagatgcccccaccaccaacgccggcccaccgccctcctccagcttcgctgctccggcgcctcgccgcccaccgccgggctgtcgcctcccccggccatccctctagagccggcgaactcctccccttccctctcacaccccaccccgggaccttaatctgtaggtcctctgccggagtctaggatgtcgtcgacgccggagaagaagagaggtcatcggagttggaggaaaagacttggagtacgaatcttgaagctcatccgatggcccaaaatctgtaagatttgaggatgcaatttctatggacggaaggttagcaattccgatccaacgaatagaaaaaaaccataaggtgattggacaaactctcgtaaatatatttacgtaatgagaaattaatcttgtgagtcaaaccataaggtgattggacaaactctcgtaaatatatttacctaatgagaaattaatcttgtgagtcaggcggccgacctgatgcgtaatttaatgctaaaagctaatggtggcatgtcactttcggtacatggatagaagtggctgccacgttggaaattaaaggaagagatttgcacgtacgagcggatagggattggaatttcctttcagcatcgacgacgacgtatgatcattaacgactaggttatctggtcatcgatcctttcctttcgttgtagagtgtagacgagaaaaatacaggcgctacagtatactaagtaaaatactcgtgcttctctacatgtaaaaagaatcgttaaacactaaaagacatagtaaaacatgtcgtatatcaacattggtacaagacatataaatgatttatataggctaagtatcgataaaaaatctctaaagataagtaggacgcatgaaaaccattattgcataaaaaaacattattacatattaatatactcatattctcataatgctcgttctctcttaacacttacgtagcaaagtgtgtgatctcatttctaaattcatgtgcgtatttgtgtagagaccgatcgtggcatgtgtaaaagatagatagcatacacgttctaatttgtcatgtctcatggacgacaataaaaaaaatcttacctacttaaaaatatcgttttttacaattgcaccatgtgctcaatttgttttttccatgccatctgttcatcatccgattttctatgtgatattttttatagcaaaatattggtattggtcatccaatattttcggtgattttttatagcaaaacatccgtatttgtaataggtgaaaataattttatgttagtttccgaagttgaaagatgaagttgtcgataaacactaccatatatcaaatatttattttgttatattcttagcacgatgcatgttcaactcactctgcatatagtgccatagtatattttttcttttaatttcatttgtttttgtcatagaaacaactataaggtttggatttagaaatactttttgaaatggtctattaataaaattaaataaaacataaaaaggtaagaaaaaaaatccatagtaaacggttgaaatcgcgtgggcacggaatcggacagcgcgagcacgtgtgcggacggacgacgatattattttatcaggtgtagagaagtacaggttactcatcctgtattgcaggattagtacagtgtacatgcatatgcttatagcgtatgtgcgtgtatctttcgtataattaaaaaaatcttcttcgtcaccagatataggcacacattcatcatagatacggccgtagttactctctccaccaatcactacaacaaactaaaactattattttattattttaagacgttttacttaagtcgctctgtaagtcgtctctgcttttacaagtaaaattaaaataggaacgatatttgagacgctttattagttgaggacatagtttaagacgttttattagttgaggacatagtttttaagacactttacaggttagcacaacattaaatcgtttagagatgaatattgagacgttttggaacgtgacagatgagttttgagattgtttctaatcgtcatcgtaaaaaccattataataatattataattatttggacaaaaaaatttgaatatttaatatttaatctcgtatctgctagataataaaaaataaataataaccctttcatccaggctcaaacacaccacctgcaggttgtaaagtctagacactaaccaactcattaccatggataattttgaatgtcaatacacagttttttttttatattgtaactctgcaaacatgcgtcatgtggtaatcagaagtgggttggccctgcacagcacttcatttgttgggccgaatggatgactgacagctggccttcatgcctgtgatcgatcgtgtgtatccgcgacagggacctgtgattttcgtcccatacgcgatctcttctgattttctgatcttgccgcgatcacagatcgagccgcgccaccggccaacgcttgacccggcacctggctaccccacgcggccacgccctgacgcccacgctgccacgcacgaccagcaggcaggagcccccacaccggcaagcccacgccgccgccttggccgctgctgcagcctggagcgtgtgccgccgccgcgaggagccgtcgtcgagtcgatcagccgattagccgtccgcaccaacaattttaggttatctatttgtgtacttttttagttactgattttatatgttttaagatgttttattaatatatcatgataaattttttggtgatttggtctattatattatatatacttacattatatatattagaattattagatttactgtgtttaaaaaaaatagatcggaccacccatatcctaaatcctaaatccaccactgatgagcaatggatgctaggagctgaaacaagccgtcgtctccttccttctgtctcctatccagccccaggtccaaaatgttaatctctcatttagtgatttagacatttttattccctatttacgttggttaatcgttaaatgccaagagtactgttcactacaaattggttggcttgatttaatttgttttatgctagcgagagaatacggagatcacaaatgtcagaccttcatatgatttataattcttacgactaacttgaatcaatttaaatgagagaagatataagaaccataaagattaaggtggatcgaaatgatagatataagtaccgcaaagatgaagctaccttttaccagttgtatattgaacttctgctatgaaacttgagtagtattaacataataagtttatgtatccatctttatgcccttctcaaatctcccaatcaacttctcgttgttcttatttaagtcagaattggtcagtggatcaattgctagtgccagcgttaagactttacatagtgtttattcaattaattatgtgaataatagtcagagaaaaaatgatttttgtgacttgggaaatactgttcatactttatgcacattttggacatgtttttgtaaagttgatgaaaataatgttaattaccaggttcatgttttttctcttattacttcagcataccatataactagtgatggatcgagattggatgagtgaacccagaacatctgcttcctataaagatggtgtagcacatttcctatccattgcatttcgtgatgttccagatgatgccaaggtcctttgtccttgtgtgaattgtagaaacagaataacacagaattatgatagagttaaaacacatttgagatgtgctggaattcttcaaagctataccaagtggattcaccatggtgagaaatatgatgcaccgtcattagtattcgctcctgtatctggcaaccctaggaatattcctatttccggtgctcataagagcaatgttgtagaagttggggatggaagatcggataacatggaaggactactaaacactgcatttggcagggaagatagctttgagtctatatcgagtgcttctatcgatgatgatggtatttattttgagtctagctatgcagaacctaatatggttgaggatgagaataatacatttggagattgccataatgggggggaacaagatatgttcacaaggttgttgaaggatgcaaaaacaaaactatatcatgggtgtgataaattttcgaggttatcattcttagtcaatttgtataacctaaaatgcatacatggatggacacaagaatcttttacagcactacttggtttgcaatctgatgcacttcctcaagaggcagatttaccgaagaattgttatgaagcaaaaaaaatcatccgtggtttaggtcttggctatcagaaaatccatgcttgtcataaagattgtgtgctctttcgaggtgacaaagctaaccaagagtcttgcgatgtatgtggttcctcccgctggataactgataaaaatgggtatccagttgaatcaaaaggaaagaagaaaccagctaaagtgttgcgttatttcccattaataccaagaatccaaagactattttcaactgaacaaacttcaggagagatgcgatggcacgaggagggccatacaaaagatggattgctacggcaccctgctgatggtgaggcttggaatgatttaaatactcgttatcctggtttttctgctgatgcccgcaatgtgcggcttggtcttgcaagtgatggattcaaccctttcaggaatatgagttcaaagcatagtacttggccagtgatgcttattccttttaatctcccgccttggatttgcatgaaacaaacatcgttaattttgtccatgatcattcctggaccacattcacctgggaatgatatagatgtatatttggagcccttgttgatgagctcttgcaactatggcaaggtgtggaaacttatgatgcttctgcaaggaagaaattttctcttcgagctgcattattatggacattgaatgactttcctgcattagcttacctatatggttggagcactggagggaaatatgcatgtccatcttgtgctacacttacaaaatcatttcgtcttaaaaaaggtggcaaattttgttacatgggtcatcgtcgatggttgccaccggatcacaaatatcgagaattgggtagtcagtttgatggcactgaagagaaggaaattgcaccaaaaacattgaatggaacttctgttttagaaatgctgcagggcagagtatttgtatttggtaagaaggtaagcatagccaaaatgtcaaaaaggaaaagacaagcaaaaaaaaaacactaatgacaaagggagcaatcggaaactcaacggtaagagaaagacatgtaaggagaaatcaagtgataacccaagtaagtctaaaaagaaacctgaggattggttgaaaaagaggtcaatattctttaagctagaatactgggagtgcaacaaattaaggcacaatctagatgtgatgcatatagagaaaaatgtatgtgataatttaattagaactttgttggatattagttcaaaaacaaaggatgatcttaatgcacgacttgacttggtaaatattggcattcgcccagaacttcaccctacaatagatgataaaggaaagcaaatattgcacctgcaccctttaccatgtcaagagaaaaaaaaagagattctgtgttcagtaattcagaacattaagactcctgatcgttatgcatcaaatatttctaggtgtgtcaacatgaaagattgcactcttaatggtctaaaaagtcgggctgcaggaat

SEQ ID NO: 23864 - DNA, 1275 bp, Oryza sativa
acaaattgagcctccatttgctacatttatactcagtcagaatcagttctttcatcatcagagttattattgctcggctgaaggtcgttgttgcggaattgctctacaacatcacttgcaatcttgtcagccgcactttgagcattactgataagatcaagagcagcttcttcgcttgtcccgtctgcaaagccatcaatggcgtcaatttcaatcctcgggtacaaggatttggtcatcgccaatgccatactagctcccatacttccagctttcttgatattcttgaagtatacatccggtgctactctcagcttgtcaaagatttcggttgcgtcaaatgcactcggaccactgtcattaaggaacatagcttggacaagtggtgtagcgacattggcgacttcgtctattgctccttcaagcttcttgatcttaccaaccaggacatcaaactgagcttgagatttgattttacggtctacaaaacacatttataataagaatctgctgcattaaagagaggacagttcaaattgtcagctggcagtaccttcaacctccttcaaggctgagtccctttccgcagcaagttctaccttgtcttctttcaaggcttcaatctgtttctccatttgtgccatcctggtagcttgtgctgtttgaaatccaaatatttgaggatacagctatgatagcataaattaatgggacagatctagaagattaccttttgatgaaccactcagctcgaagtttgaatcctggagctgggcaattcggtcccttaactccttctctgtctttttggcgtactccttggcctcatgcagctggtccctaactgcttcaagagttcccaaatgaggaaccagcttttccaaagttgtagtcttggcctcattgcgaagatggattctctgcatgatggatcatggttcagttctgctaaagagagaacaaagttattaaaggcggtcacccggaagatttacatttacaatgcaagtggcttctccaagtgctttcttcagctggcacacttcctcatcttctttttgacgatttataacgatgccggcaacttgcgagttctcgtcccaccatttgagcaagataggaggacgggagtcactagctacctttatgcggagaatttcttcttcgtcgccgtctggtggacctgatgtattcccaagacattagacgaacaagctggaattattcagaactgcatcactcgagaagatgagttacctgaagatgtgcctggct

SEQ ID NO: 23865 - DNA, 30560 bp, Oryza sativa
gaagatttcagatacatacctgcggaggcggattgaatgcgttatatggcacaactggcagctggtgtgagtagctgacgacaatagcattcgagaatatcttgtacatcctctccttcatgatcttaaaatccagagaatctgggtcttcacggtttggatcgtgcttgccgtcaaattcaaaagctgtgcgggatctttctttgatgggagccaatcggcacttaatgaaatgccgagtgatttgctctccctgcaagccttgttctttgagttttagcatgcgttccatcaactccaaggcttgggccgcttcatctccaatcggaagagagttccaggtatcctggtacaccggaggaagacaggagtactcgggaagagcaggctcaggattctgaacataaaaccagttcgcatgccaccccttgtttgaggtcttgaagggcatagagaaatacttctggctcagagttccccttagctgaaatcctgcccctccgactacgcatggcttgctcttgttcggttggggcttgagaaagaagatccggcgaaacagagcgaagtggggtctgattcccaaaaaggcttcacaaacatggatgaaattggcgatatggactatggaatttgggtttaggtgatgcaagctgattccataaaagtttaaaatcccgcggaaaaatttcgaggtcggaagagcgaagccgccatagaagaaatgcgagaagactacgatctcatgtgtatcgggggtcggaaaagcctcaccgcacgctggccgccacccgatgatctccttggctgggagaacgccgtgcgccaccatctccttcaggttctcttccgttacgtcggacgccgcccattggccttcgaagctttccttctcttccgccatcgattttacccgaatgcgctgatttgattcgagggatggctggggagaagtgagggattgaggcggtggatcacgggaagggttttgatgcacttttcgaaggtggatttgagtggagtggtgaaccctagttcgccggcgcagttctgcactgtagcaaggagtggggaaaatggcgagagttccggcggggaagacgaagcgtcgcttggatctcgggatttcttgttaagggtatcggaggtgcaaatgggcctaggcctgaacagtacttcagcccaatacttttaacagcgtggcccattgtgttccttagggacttaggcatattttgctttggcaatattatgcgcacaatagtgttcagcccaatgctgataaaatcctttttatgcggtcatataattctttggaattattgcaatgcaaattaaaaggtgcccgacagaaaggtgttatactgctttttgttagctttattaggctacaaaagctgtctgggttaatttggaatgacttgtttttatcatagtcacttccttggtatgttatatacctattttcattatggtaaatagtcatagcctaggctgttagacttattcattaccataatttttataatacctggtgggtaatctttagagtttttattcggatgcctgtcaagtgtgttcattcgtgaaccttttagagtgttaaccactcggatttcttttgttgtggctaaaaagcagtcggctagaatgcctctttaggcgccgcatatgcttttgtcatatgatgcatggttgtgctattattttgttctcaactatatgtttagtttgttaactaatcacatagttgggggctacacctaattaggtgcatctattcgatgcaccatattctttaccttttcgccctttacagtcttcgtcttcgctactcggcgggccttggcatgaaaagtttgaagcactcggattatttttgagatggctacgatggatgactgcaaaggtctcgggggctactgtggagattatggatatcccatatctacacggcgacggtatttggactaggtacaggatacctaatgtagatagaatatcttatttgtatctcgggtttgtttcttaacttgtgtatcaaggaaacaccctgagacttagtcggttacgactatatttcatctgtatttgcatattccgttagggatatagattatcttttgtaaaacggactcttccccatatataaggggggtccgggtgcctctagtggcagaggttggattttctccaaatcatacaatcaataatacactcgtcggattcatccccggacaggagtagggtattacttcttttataagaaggcctgaacctgtataaatcctttgtcttcaaacccatacactttcctagcttgatagccaccccctttcattattgccgaaatctagtttcgacaaggtgtatttcagggcgctctcacgatcgtaggacgtgtcccagagtcacagcccaaacaaattcggacatgaattgggcctgcgatacctgggccgggcgacgcaaatccgactcggtctcacggtttcgcgccgagaaaggccgaagcacactagcgtcttttggcgatcttaattaaggcgccaagctagccggccggtaacgcgcgtagtctgcaaattctgcatctccgcgacgagaaaggaagaaacaaatacgccggcgaggcgacgacaatgacaagccagccgcacgccggcgaggatggcggcgaccgcctgagcgcgctacccgactgcctcctccacgcaatcatgtcgttgctcccggcgcgacacgccgtgcagacatgcgcgctgtcgcggcggtggcgcgacctgtggcgctccatgccatgcctcgacatcgtcggcgacgagttcacgtcgtcgaccaccggcagcgtgaggtgggacaagttcgagagcttcgcaaccaacctgctcctcaaccacgacgccccgttcctcgacaggttccggcttcgtctacccagctcatggcacgtcaggggaggtgtacagcaacgcgacatcaaatcacactcacagcccgacgtgcgacagatcgagcgatggatcaaccgcggcgtccggttctaccgacccgtcgagctcgagatcaccatcggcgttggttatgacctcaagcttccaatcctcggcgccgtcgtcttctcccaccgactgaaatcattgcgtctctctcgccttgttctggaccgcggcttcggctacaccatccgttcgtggtgcccggtcttggaagccatggagctcaactcctgcatcttcgagttcgacgagatcactggcaatgcgctcaggagtttggccattgatggctgctcccgacgtggtctgcaggtgcctgatgatgcattgtgtgtcacggcgccaaagcttacctcccttcggctcaagttttcgatacatgatttcagcgtgtttttggttgatcgaatgggtttcctcgttgatgcgtcgatctgtaaaatgttttcgtccacgaccaactttggaaacaatgtatgcaacttgtagaagtcgaattagaatccatgtccagtttgcttgggagtctactcaacgtgacaaagcttaatttgtcctgcattcagctatcggtatgcgtaacccctcttgatgcttgaataatattacttgttcgcttcaagatttagatggaaatgtactactcctaattaattactaatctctgaattgacatatgcacccaagtttccttctgtgtattaaattcctttcggctgcgcttcaatttgtctggagcctcactgttactccctccatttcaagttgattaagtttgtagataaatatagtaatatttatgacactaaattagttccattaaatctataattgaatatattttcataatatatttgtcttgagttaaaaatattactattttttctattaacttgaatcaattttgactttgatcaaagtttttttttctgaggagaacaacggcaggagatctgccggaatttaattagaaggaagaaaaaacagtacaaaaccagttcagtccagaaaattaaaagaaaacggtacaacaatacacagcacgaaacaaaagaaactatggaagcctaaaagccgagcaacggagatcaagatcttgttttactatatatgccactgctctctctaagattgaaatgttgttgaaaattctcctgtttctttctaaccaaacattccactaagtggtaagcagagctcctctcatcgccttcttttgctccttcgatcccacgcaatcgatttgggcccaccaatcagaggttccaacagagaggccaacattgtttgtaggtaaatgttgccaggaagtaactagagacgaaacttccttgaagaaggggcattcgctaaacagatgattagtgtcttcaaaggcgcttgtgcataaactacaaatccaattgcacggccagtgtcttctcaacaagttttgagccataagagttttctggtggaggactagccagccaaaaaatttaagtttcggctcagccggcgccttccagagcgaagagaaatctaaggaaacaaaagatccttgatattggaaaagataagcactcttacttgtgtaaactttggattcattccagttccaagagatgtcatcaagacgcggggtaagcaggactccctgaagcatgctcccaaagtgaacaagttcgtggatttcttctactgatgttatttgcctgaaagagatcagccagttattgttatggagctcttgatggacgcttttttgctttctttttgccaacttgaaacacagtggtgcaatgtcttttgggctgctgttttgtagccaattgtcatgccaaaagcttgtttttgcgccattacctagctcaattgtcgttgctgcctgaaacaaccttttatctgtatcatcacagggaacgctcatgccagcccatggtttgttttcatccttccaaccgagccaaagccaacgaagacgaaaggctcgcgaaaacctctctaaatccaggatgcccaaaccacccaaaacttttggcttacacaccgtctgccaattaactaaactgctgcctgggttggttttgtcagggtcttctcctttccaaagaaaagatctcctaaagcgatcaattctttttatcacccatttgggcacttgcaatgcggtgaagtgatgaattggcatagagcttaggaccgattggaccagcgttttccttccggctgaagtaaagaacctccctttccagccaggaattcgcaagccaattttttcgattagcggtaggaagtcgattttccttagctttcggatatggagtggcaggccaaggtagcgacaagggaattgctttaccattccagggaaatttgcaagaagagatacgaggttgatgttttcacatctgatcgggtagatctctgtcttactgatgtttgtgtgaaggccagaggtttgcgcaaagaaagttaggagtctcataagcaccgataagtctgaagcgtgaggcttcacaaaaactgccacgtcgtctgcatacagggagcacctgaatctgtcaaaactcccacccattggagagagaagtgatgcattttcagccgccttaagaattcgatgaaaaggttccattgctaggatgaacaacatcggcgagagcggatccccttgtctaaggcctcggacatggtttattgattgccccggagatccattgagaagcacttgggaggaagaggttgcaagtaaattggaaatccagtttagccaacgagttccaaatccaaactgatgaagcacatcaagaaggtagggccaacaaaccgtgtcaaaagctttggcgatgtcaattttgataaacagactcgttttcttcgttctatgtaaatattgtaccatgttttttacgaagacgaaattatcatggatagccctttttcgaacgaaggcactctggttgggggagacaagctcacacagtcttggcgctagcctgtttgccaaaattttggaaattatcttagagaaactatggattaggcttatcggtcgatactgttcagctcccaaagcatcttcttttttgggaaggagacaaatgaaggctgagtttagttcctttagccgcaaagtgttaagatcaaaaaacgatcttactgccgataacaaatcttctttaatgatctcccacgctgatttgaaaaaagcaccaatgaacccatccggccccggagccttctcgggtggcattgagaaaacagttttcttcagttcttcttctgtgatgtcttattctaaatcgccaaggtccagggagagcaaatccatcatgttccagttaatccctgacgttctttgaaaacgagttccaattctttccttgaagaaacgcagcagttcctcttctttgtcttgtgctgaaattgcaatcccagatggcgtgtgcaaggattgaataaaattttttcttcttctggaattggccttgatgtgaaaaaattttgaattaacatctccctctttgatccaggtctgcctagagcgttgtctgatctggattttgtttagaactgataaagccagaatcctatttttgaggttagacaccaggaggcgctcatcgtctgacaaggtcctagtttcctgagctacgtccagctgaaagaccacttcagatgcaaccgcaagttgtaacttaatgtcacccacttggctccgactccatccctttaaatctcgagcgagacgtcgaagtttgatgcggaaaatagctaggcaattagtggcaaggatcggccgttgccatgagtcttgcactgcttccaagaacccaggaattttgagccaaaaagattcaaatctgaagcttgggaatttcgatcatttctcatttcctaccagaaggagaggcgcatgatctgaacatgctgaagacaaaggatacaaattggaaccctcaaacattaaatcccagtcagttgtgacaaaagcacggtcgatcttggtttaagttgggtttgcaccttcccctgcccaagtaaaacgacgaccagggagttgaagctccttaacctgaattttgtctagcagaccacgaaagcgctgcatcattcgtctatttaggcgatcgttgtttttgtcagaggctttatagatgagattaaaatcaccgatgatcagccattcagatttcatggagggctgcaggctctctatctctgagagaaaaaccactttgtcagcttctagttgaggcccatacacaactgtgattgaccactgtagcccctcttctcgcatggtcacagttgcagacagagagtattgtccaaggataacatcagaaggagaaaagaaattttcattgcaagctagcaacagaccacccttggtgccgtccgccggaagggccacacattgccgcacaaaattttggcccaaactgctgagaacaacacgatcatttaaagaggcaatcttagtttcttggagacaaacaatagtagcaccatattattgcaaaataattttcacggcgtcttgcttcgcctttgaattcaggcccctaacattccaattaaacaggtagacattgtcttgtgacattgaaacatgagctgctgcaactacatctttggttgatgaggaaaggaacaaagcttttgccgaaacacaaccagccaaactggaagaaacacaggcaaaaggtgacgctacaactctgctttaacacagcaagcaacaggcagaagtaggtcaagcacaaaaggctcttcatgggtgttgtgcagcccatcttcatcctgaggcgttctgctcacaggggcgcgaccgccaccttcttctttgcagccttcagacggatggtcttgcatccccccttctccacgagctcagcgattgtcttcaaggaggatggagagagaggcttcctgtagcgctgcaaataaatctttttgatgttatcatcaaaggaagcatgatcatccaaaatgcaaaacttatttgacaggatttcttgagcaagagtttcaagttttgctcccgcccgcttcttgcgaaggaggcgcttactgtggcgttgcgccgaggagatggcaggaattgtcaccttagcatagcttggacaacgagcattgacgtcgggagcaggtagcagcggctgctgaagaggagtcgagagagcagagatgaactcttccaccctgttgccctgcctcgccaccagcccggcttgagtctgcacatccgtcgccaccccattggtatgcggagtcccctgttctgcaaaagaagaaagtacaaaaacaggagaagccacacggggaggagcattgtctggtgagtagatggaatgctgcacggacgcctcatgcaacattgggtcaagatgactctccagaacggaaaggacatctccctgcccctcacttggctccctagaccgaccgcttctgctacgaggacccgagcgttcccggttgcgcgggcgccccctgtcttcattgccctgacgccggccgtcatctctctctggctctctgctgcagcttgaggatcggcgcccaagccgatcccacagggagcgactcctgtgatgggacctacttggcttgtctctgtctttgtcgtcgtcatcatcagtcggccctcttgaaggatcaggctcagctctacaaggcagaggatactctctatatcgagtaccgtcatcttggacatcatactcccacttataggcatgggctttgcgagtgaggaggtcttcaagagtatccacatgaacgaggacattgtaggtccaccccttctttgtgtctgacggcggcgggttgcgaagcggctccaagtccggcagaggaatgtccgtggacagaccttcctcatcagcagaagtgatggcgaaagtgccaccacgagggattgccctgggctcatcagtccaaatccaaagatcataggtgcagctgtagttgcgccggcgggagtattcttcaacatattgaaccgagcacttgcgcccgattatcttggtcgcggcttcttcagtgcggccattgggatgccctcaatgcagatgcgagcgcggtagcaaaaccgtgcctcggtaccatgcaggctctcgtcccagggacgaaagaggtacactctgccagaggcagtagagagcctgggctaacgaagaattgcatcgtggtcactctgatttgaacaagtgatgaagaagtcttccgggtgaaacttggtgaactgaatgtcagcgcacctgatgcgaaaagctgagcggacatcgtctgcaaaagtgttgagctcaacctttccttcattcgcccccacttgccaagccacaagagaacgggctgagaagcgctctctgttcctctcaatttcaccagtggcagacatcacaacggaatcaagaagaggacgagcggttagatcatccatggcgagaggattggagggagtggggatggagcggggagggaagcgaagtggagccaaaggggggaaagctgcagtggatagcccatggggaaccgaaggggatttatagtcagctttcttgctacagctggaagctcgatgaccgaaattcaaacatcgccaacagcgaagaggatctctacaatcaaacacttgatgctctgtgctcagacaccagaagcatttaccttccatatgctgcaggaagcgcgccctccttgactgcagatactctttgttgttgggaggattgaatgcagaggattttctccaccagtgcttccctctgacctctttccaagaatctgaattcacttgaatgcctcctgtaccttgcctggaagctgaaagattttgagaagacaactcaactcttcgcccactcttgaggatcttgaaatcctttacagctgcagcaggcgagcttgtaggcttcataggggaggatggtggctgcaacgaagttaagagggaggtactagcagctggaggacgaagaggagcggagagcacctcagagtaaaggcgcttaaatccctgagcacctgctttcggcgaaccatgaccttgaagggacagagcgagcgcagcagcagcgccggacccgggattgagcagatctgcattgagaaccttgcctgtgctgacctcaaccaaatcttgaaccgaatcccctggagaggagacagcccaaggtgcagtcgccggcctagggagcactggagacgtggtctgacccggggggaaaagctctagggttggggaagctaaggacgctggtggatctgagggagaggagaaaaacagggagggcgacagggacagggatgagcgatgacgacgatggcgggggtgagtgtctggacttaaaggatctggtcatgatgtggatgtgggggagaaaggggagaaggagagagagagggagctcaccggaggtggccgccggaaccgaagaggccgccggcgcgggtgcgtctagtcgcctaacctgtcgcgagagcatcctaactcgtctttcctttcaagagtagaagtatgacctgtaaacttgatcaaagtttaaacgatttataaactgaaacggagagagtagctctatctatcatatcactaagcttccagcttttgttttctcttgtgtagttttttatattgccattatattttttttcttatgtcccaaaatatatttattttttcatatttcttggataatatccttttactgatatactatactttttgagacctacttcataatgtcatactcaattgttctccaattttattacaggagaagcattctgacaactctacaaatgttccgacgtttcacaaactgactaccttgtgcttcgatgcatgtgatctggacaaaaatctagatatattgttgagttttctggagaatgctcctcatatggagaaagcaatattgcagaactgcaaggtactagttttctcttatttctgtttgtcttgttactctccattttgttggctacttggtttatcttctcacggtgttcgtgtgtgatgctctcacagattccaaataattcgagaaagaggaaaataatggcaagggcaaataggaccctgatttctcccgagcacgaaaacgtgacagttttggcgtttcagtacttttaagcttatcaagatcgcatataaaaacgacaatatcaaagatgtgattgaacttttactgtgcaattcgacagaacttgagaacagcacaatcatcctcacaagacattaaattgtttgagttgtattcgcgtgcagcttgttggtatgtcacttttgaattgttttttaccaattgtatgcccaaatgtatacaaatatatagcaaaattgtttgtttatccgacatgaagtgtcctgggtggttacattatcatccattgtgggttggataaacgagagtgatgacatcggaattcctgttccgccccactgcatttggtccggtccattagttagattcagccataagtaggcccaattttctaggaataaagttcacctgtcgtccctcaactttaccccaggtttgtttgacatcccccatccatcatcacacttaaaattagggatccggatagacctccaggggtccggtcagatcaattttgcatttgaatttgtcaatatcagtagtaccaaatttgatcgtaaacagaaatctcaatccttacatcgaacatatcgtgtttgagttacatttaggccatccttgattttgtttttatggcatggctttgatataagctaggttcgattgttcacaaaacttagtagcatgtcctacgttgtaacgggctataagtagcaatgactataagaagattagggataaaatatttggtagttacctataaatgctacgtgtaggagcgcgttgcctgccgtggagaaggggaggaaagtaagacaactttacttttaacagtactacaaattgttaaacataaaattgcttcatacatactaccttcgtctcaaaataaaacaacctagtacaacataagacacattctaatactataaatctgttgttataccatagtagggaaggagtataacattagaaatttaattgtccataaacaaaaatttttagctgtgataatgatgtcataagtgggacaccgggttatttttgctctggatttgcattgactcagttctccataccgtgcaaaaactgcggaggccaagaacagcccgtttggttggagagagttttcaagagggattgaggctactaagtgttttgtttggttgggagacatggaaattttggtgggatgaggatagagaattgaggaaggaactccctccttttcaatacctgggtaggggcagttaattgggagggaattcctcctttactttgtctaagcaaatctcacccatccgtttttattactgatctagtctccaactaaactccctatcaatttccatcgcctctgccaaacaagatattatgattaaaaatcaaattcccatcttaattttatcatcaatttcctcgtgtaaactcccaatccccttccctcgagttcccgagcaagccggaaactctcatctgatcggccaccgtgcgttccacgggtccaaagtccaaaccctaccgtcttcttccgcgatctagcggtggcaacgcgcgcgcgcctgcatctctggaaagaaagaaagaaacaaacagagaggagaatacgaccccaacgaacgaacgccggcgatgaagcagccgtacgccgacgacgacggcgaccgcctgagcgcgctgccggactgcctcctccacacggtcatgtccttcctctcggcgcggcaggccgtgcggacgtgcgtgctgtcgcggcggtggcgcgggctgtggctgtccatgccgtgcctcaacatcgacggcgacgagtaccggccggccacggccggcggcggcggcggcgccaccatcaccgagaggtgggagaggctggagaacttcaccaccagcctgctcttcgcccacaacgcgccgttcctggacaggttccgcctccatctcccaaacttccagcgcatcacggctactcagcagcatcacgggcggcagatggagagatggatcctccgcggcttccggtaccggcccgccgcgctggagatcgccgtcggagtcgccgccgtcgcgttcaagctgcctctcctcggcacctcctcggctagccgcctcaagagattgcatctttccggcgtggttttggacggcggcttcggcgagtgcatccgctcatggtgccccgtcttggaagccatggagctcaaggcttgcatcttcgaggatctgaaggagatcgtctccagcacgatcaagagtttggccattgttgactgcagaagtgggcaccatactgatgcattggtttgtcgaatggattccctcgttgaagcatcgattagtggaacacgtttcggatccgactttgacaagacgacatccactttaataggcagtctaatcaacgtgagggaacttaatgtgtcgtggtttcagccagtggtatgtagtataacccatcttgacacatgaacattacttattcgcttcgacattcagattacttttacagaaattgtaggagaaccactttttccaagctagtttctatctactgcactcctttcaatcctagataacttgatctaccacaaaagcacctttttatgctatactttgttgaacctgtctgctttttcatattgctattataaatttcttctatctaacaataatcattacactatatataatgccttaccaactgtgtatggtcctattatgaggatcctatatatgatcatgtgatactcaattcagctccaatttatttcaggagttgaaatatggtgaatctgcgaactttcaaacatttcacgagctcactacattgaacatatatgaatgtgatctgggtcaaaatttacatatattgctgagttttctgcagaacactcctaacctcaagaaagttatattgcagaactgcgaggtactacttatactttctttcagtttgttttgttactctgctttcttgatttatcatcctagagtgatcctgtgtgatgccccaatagatttcaggtcattcgagaaagaggaaaagaacacccagggcaaacaggaaccagattcattccaagcgcagaagtctgataacttccaagtctgagatctcgaagataatgaagatgacatatgaagatgacggtgtcagtgaccttattgaacttttgttgcgcaattggagaaaacttgaggaccatactatcataatcaccaagatttgagtcttttgcatatggtgttatcatatgcctgattcttatgtcattttgtactatactgtgtgtatttttacaaatagtaactaaaaccatatatatgactaatgccagactggtgtgattaagggcattacctccaatgtatgctagtattaactgattccagtgagattcgtaaaatcactcttttatagtttcaagttgagaaatttaagtaaaacagccatttgattatttgatgatgctcctccctattgatcaattgacagttgacactgttaccatactacaggtgcaaggattagcttcattttctgttctgtcattccaatctattgattcctttcaaaatgataagtgccaatttgtcaagtttttatcctagaaatgcaaataaacatcttcatgatgctcttggaataatctgttgtgaggataatgttttgtgacactgcttgtgttgaaagtcatttattataaattggggaagacaaagtaattgattttcttgtccaaatatcgttgagcaaactataataggagaactaaactttctccctccattattgtaataacataggagaactaaactttctccctccattattgtaatcataaccagagatctaaataaaataccttggtagctggatgaaaactattccataggagaactaaactttctccctccattattgtaatcataaccagagatctaaataaaataccttggtagctggatgaaaactattccatgtcaatatgaagcgtacttcgaggcaaactcagcaatattcttattcgagctccctcctttcttcatggcttccttagctttcttcatccacctattagcatttttcctgtactctgccttcctctcactctctagaacctctctgatgcatctctccacctcttcttttctcaccatgccttccttgtcccgatgtacgcgtacaccatttccccatgcactttcaatgtacttcgctgtagttggttggtctgtccactgaggcatcgctaacagtggaacgccagtaacaattgcttctgttgttgagttccatccacagtgagttaagaaacagcctgttgattaatgaagaataatcagtttctacctgcagcttaattatttgaaactgtttactgcagatacttccgatagaattgacatgatacacacatcttatcgcccaagagttggattgacaagataggttacccattggataatttggttgaaggcagtaacttgagctaggtttgtgggatccaaaatacagatcttatgaaaatgactcagtatgccatgtgtaaataattagggacagtatgtccttgtagaattctatagctgccattagattttgtaggatcgaacagcaagaactaagccaaccagagggggggggggtgaatggttgtaggggtttacagatttaagtgaagaaacactccaatcaaactgatcagtatctatgcatcagttacaactagtgtattcgtgcttctgtctttctctgacaactacttttaactgtctctgcagcttatgtaattttgagagatatatggttcatatttattccaatatctagaactttcagtcttctattctcaccatatatctgtaatcgtagccttctgacattaattctgtctcatgaaatacttgaactagtagtttagtgaatgaactgaaattaacagcattattaccgatttgactcaaaatctgagttgaatatattacatttccacatttgaataaaaaataaatggggccacgagtaacatttaaccagattaaagatagttgctaacagttgcgtatttttgtgaataaaacatgactttttgtcccatacctgtggctttgtgagataagacctcaagctggggacaccaagaaacgattaggcccctctccttgcacttgtcacggagttcttctgatagcttgtgttcatcacaggacctcacgacccaaaggaacggtttaccggaattgcaaaatccattgcccagctcatctaactgagttgggtcaagatcagcaacagtcccataggaagcatagacaacagagcaagggggctgattatctagccacgccaagcaaggtgaagtgctgtcagaaatgttgaacccatagttcttgtttggttgtaagcgatcgtcatccaagtagaaggatggtacggtcggaccaatcgtcttaaaacgccatgctgatgccaagtaatctgcctcctgattaagtaacaacattgcagctatcaaatcttctaccttctccaattctctctggggcaaaacaacaaacagacgaggggcatgagcaggttgactcaccttcggctccaattcttggaaagaattgacgagcacgtcgtcggcgtcctccagcccgtcgaactggcccagcaccgcctccaggaacggcgggtacgactccggcgccttcacgaacgacggcacgtcctccggcccgagctccacgctcagcaacccccggagcgcgcccccgtccacgacgggcaacccaacgcgccccgcccagacctccccgtagatgacgtccacggcgcacggctgcgagaagaacgcggcggctggcaccccagcgccgcgcgccacgcgccccgcccacgggaggtgcgggtcgtacaccagcacgcggggcggcctccccgcggcggcctcggagcggaggaggacacccagggtctccgagcccacatccgccagccgccgggtgtactccctggcgtccccgcaggccgccatgccgccggagtcgaagccgtcggagatggcggcgacgcggaagggggcgagagggggcgggacggtggagagaacgtggcgggtggtgacgagcgtggggaggaagccgtggtgcgccgcgaggtggcggccgaactgcaggatcgggttgacgtggccttgcgcctcggggaaagcgaggaggaagacatggccgccggcgccgccgccgccgtcttgggtggaggaggtggtggtggccggtgcgttctccatctcggctgtttcgttttttcttctctgtgtcgcccgggaggccgggacatggaggagcatagtccaagactagtccatcctaccatttttggttttttcttctagcaaattattttacaaaattatggctatgattagttctcttcaaacttccaacttttccgtcacatcaaatatttgatatttgcatgaagtattaaatgtgaaaaaaaacaattgcacagtttgtatgtaaattatgagacgaatcttttgagcctaattacgtcatgatttgacaatgtggtgctgcagtaaacatttattaatgacggattaattaggcttaatagatttacctcgcagtttacaagcggaatctataatttattttgttatcggtgtacatttaatacttcaaatgtgtgtccgtatacttaaaaataaattttgaaatagaactaaacacggcatgtgttttcttttctgtgttagaaaagacaattttttaaaataattcttaacattttttaaattataccatctccaaaatatatatttgactatatttttcttattataatatataataaataaataaatttttattttttatagtatttcctaaaacaaatatatatatatttttatttagcatagattcttttaaatgtttagagaataaaattagctcgaagtctagataaaagaaaatctagatttatttttgattcataatgaaaaaaattgttgcaaaatttacatttagatgtcaaactaaatttacataattattatttgtgccatcttctctagtgtggttcattatttttccttgaccctctaatctttcccttaatttctattggtgtgctatgttatgagtttttaattttaaattaaaataaaagctctacgtattattatgaaaatcatcttagaatttagccttttcttttttcatgcacagttttttacatacaagtgtgctaacctatagaattaattgttgtaaccaatgctaatttaggttgcgttcaatctctttgttttgatatttttgacgcatgcaaaacgagaaatcacattagcacatgattaattaagtatcaataattataaacttgaaaattaggtttatttgattttttttaaataacttctatatataaattttttgcaaaaaaatatcatttaacagtttgaaaagcttgctaacggacaacgaggaagttgaagtttgaagttgagaaatagaactatgccttaatcatagggacttaaaaagtacaatgcatactttttttttgactaattttcagattataccaaaattaggtagtggttttgccttttgttttctgaattttgtaaatctttctacagtcatatgcagagtgggactgtagattgcttggaaagccttttatattttcatagttctattgctagttctattccctatgtatttttttttattttctttgctctcacacatgtgaggcaggcactggaaagttccagaaaaaatccagctttactatttttcattgatccaatcctacggcttcctgcttttttttctccatcagacggttcagctttcgttgctgacgtggatcaattgagtgctatttttggattcacagttcacctatagagatttcttctgaaaaatatacctataggctcggacattctctgtatacaattccgtattttcaatagcccaggatttagagaactcggattaatatctgtagcattactgctattaattagcattgctctgtttgtgtgcttggtgatgctctgttcgtgtattggtgttgccaaaggaagcggagaggaaatgggctccatgacggacagaaggctgcagagaaggggaaagagcaaggaagcagagaaggggctctgactttctcgcctgcaaacaacacactgccgctgcctcgaggctggttgattttcactaatactccaatcgttagggccgatgtgatacctctgcgtaattatgtgcctccgtaccaccaaaaaatccattccattctaagatggatttagtggcgataaaaaataactaaaatattcttaattaaaaaatagtaaaaattatatgtaggtaaaaaatattgaagggataaaacttctcgttttacgtgatgagggtaggtaggataatagaagttggttttagtgggataaaattcaaattatagaagttgagtttttttgggagtagaaattaatccctatatcatttgtttatcatcacgttgccacactttgtccccctgtttagttcccaaaatgttttccctaaaaacatcacatctaatctttggacacatgtacaaagcactaaatgtagatgaaaaaaaaactaattgcatagttaggggggaaatcgcgagatgaatcttttgagcctaattagtccatgattagtcataagtgctacagtaacccacatgtgcaaatagcggattaattaggctcaaaagattcgtctcgtggtttccaggcgagttatgaagttagttttttcattcgtgtccaaaaaccccttccgacatccggtcaaacgtccgatgtgacacccaaaaaattttatttcgcgaactaaacatgcccaaggctgagttcttatcccagttttcccaactcacctctctcattttccacgcgcacgtttttcaaactgctaaacggtgtgtttttttttaaaaaaaaattatatacgaaagtttgttttaaaaaatcatattaatctatttttttaaaaaagttaatacataattaattgtgcaataatacgtgctccgttttacgtaccggggaggaggggttcccaacacctcctcccgaaaacagcctaagccgatttactggcgccctcttactttaggctataagtttttttttgagaggctttaggctataagttgaaaaatcaaaaccaacagatatttttttttgtttggcttttataaagctgtcactcctaggctgtctttggtattaagggatggaaactaatcccttccgtatgaaaaaaatcccttccatataaaaaacggagtgatctattaacgtgtgattaattaagtattacctaccgtactttttttttaaaaaaaggatcaatataattttttaagcaactttcgtatataattttttttcaaaaaacacaccgtttaacaatttgaaaaacgtataagcgaaaaataaggagagtgggtttccaactctaggtgccaaacgcaaccttacactgttgagcaaaaagttgggttgaactagttttttttttcttatgtgaaatggagataagattttaccattaaacttaagccttaaaatcctttaacttattaacaaaaaacaaaaagtcgtcttaaaagcctaaccccaaataaagaggatcggttctttaagctaacctttttagcttttatatagttctattttgcttttattttatgtagtagttaataagcttgtgcccttttttaaggaaattctgtggctttcaagtctcgagggtaaggtgaagtcctatccgtaattcacaaaattgaaaggactactcgaacctggattaaattttggcttagtatagctaaaagaaaagtacgacgaacaaactgactatttgttggggcttaaactttttcgtttagctcatgagccccaaaaaaggcccatctgcgattcacatatgaaaagctactcaaatatggctgttgattttaatagtgcaggagtggtttatagctttaaatataacgaaccaaaatgttgatacaacacgtgcaacattaccctttacttgcaaatcaagtccaattcatgtttcatgccacgttcgccgtgccgattcccgacacggcgacaccccctgaaacagtgtacaccgcaaatttggaccatggagagagcaatcttggccgtcactccactgcactcctatttatccattaacaatccttgtgatgcaaaacacacacaccagccgccgcatggcagtaccagaaaccaacacaaaacaagatcatggggagcatgagcacaccggcggcgagcgccaacggcgggcaagtgctcctgttgccgttcccggcggcgcagggccacaccaacccgatgctccagttcgggcgccgcctcgcgtaccacggcctccgccccaccctcgtcaccacgcggtacgtgctctccaccacgccgccgccgggggaccccttccgcgtcgccgccatctccgacggcttcgacgacgccagcggcatggccgcgctcccggaccccggggagtacctccgcaccctggaggctcacggtgcacgcacgctggcggagctcctcctctccgaggcgcgcgcggggcggccggcgcgcgtgctggtgtacgacccgcacctgccgtgggcgcgccgcgtggcgcgcgccgccggcgtggccaccgctgcgttcctgtcgcagccgtgcgccgtcgacctcatctacggggaggtgtgcgcgcggcggctggcgctgccggtgacgccgacggacgcgagaggtctgtacgcgcggggtgtgcttggcgtcgagctggggcccgacgacgtgccgccgttcgttgcggcgccagagttgacaccagccttctgtgagcagtcgatcgagcagttcgccggactggaggacgacgacgacgtgctcgtcaactcattctctgacctcgagccaaaggtatagctgcgttcctttcactggcttgggaactcatttcctctgcacgaaaaacggaatgatccattagcacacgattaattaagtagtagctaatattttttcacaaatggattaatatggttcttttaagcacgttcgtatagaaactttctaaaaaaacattttaaaaagcgtgcgtgtggaacacgagagataggggttgggaacaaagagcaacgaatagtttagttcgtttctaggtgttcccaactctcccctctcgttttccgcgcgcacgctttttagacggttaaatggtatgtttttgcaaaaagtttcgatacgaaagttgcttaaaaatcatcttaatccatttttgaaaaaaacaattaactaatactcccttcgtttcacaatgtaagactttctaatattgtctacattcatatatatatatatatatatatatatatatatatatatatatatatatatatatatatatatatatatatatatatgttactgaatctagacaaataacacatatatttgtctagattcattaacatctatatgaatatgggcaaatgctagaaattcttacattatgaaacggatgaagtacttaattagtcacgtgctaatggatcgctccgttttccgtgcgggagggatcagttcccatcctcctaaaatgaagaagtgtgcttccatccaaacatactccattagtttcatattataaatcgtttgacttttttctagtcaaactttgttaaatttgatatagctcgtacaaaaattatcaacatataaaatatcaaaatagtttcattaactctaacattaaatatattttgataatatgtttgttttgtgttgaaattacttttatatttttctataaactcgaacaaacttaaataaatctgactagaataaagttaaacaacttataatatgaaacggagcgattaccatagatgatcattgtattgcaaaattgttacacatttttcttgggaaattaaaatgagcaggaggcagcatacatggagtcgacatggcgcgcgaagacgatcggcccgtcattgccttcgttctacctcgacgacggccggctgcggtcgaacacagcatacgggttcaatctcttcaggagcaccgtgccatgcatggaatggctggacaagcaacctcctcgctctgtcgtccttgtgtcgtacgggacagtctccaccttcgacgtagccaagctggaggagctcggcaatggcctttgcaactccggcaagccattcctttgggttgtcaggtccaatgaggagcacaagttatctgtccaactccgaaaaaagtgtgagaagagaggactaattgttcccttttgcccccagctggaggtgcttgctcacaaggccacaggtattggaactaaccaagaactcaaattatattaatcttgataacaaaaagtatacaaaagactagtgaataagtagtagacaacaatagctaaatgcaagtttttttttacctggcaccaaatatttatatgtaggttgtttcttgtcgcactgtggatggaactcgacattggaggcaattgttaatggcgtaccgcttgtggcaatgccacattgggctgaccaaccaaccatttcaaagtatgtggagagcttgtggggcatgggcgtgcgagtgcagctggacaagagcggcatcttacaaagggaagaggtagagagatgcatccgggaggtgatggatggtgacaggaaggaggactacaggaggaatgctacaaggttgatgaagaaagctaaggagtcaatgcaggaaggagggagctctgacaagaatattgctgaatttgctgcgaagtattcaaattgacaaaaattattgctgaaatctcaagcacctagctatcagagatattctagttctgacttctgaatacaattggtttttcttcctagagaagttcatggaggtcaaggtgctgatgttttccacgagtcagcagaagtaaattaagtttacagtgtgtgtaaaatggtaatttatactacttacaatttttattttataattgaagtgtcgttaacttatgtcctcgtcgagggcaacaagctaccttagagatatcacgataacaaatgaattatgtaagctttacatactttgagagtaccgggcatagcttgcttaccaaattacagaacatatatatgtgcatgcatcaatttcctctgataccggaaaaactgttatttatcctctcctctcaattctttctactaaaattcggcattacaacaatatatctctcttattaattacaagtttctatagtatataaagcaaaaaaaaaaataaagcgcaatgaaaaactcaagtaaataatatggttaaaaaggatgagacttcaatcctccatatcttccctatcgcacaaaaccatcaaccagagcactaccagtttatttaaaactgttactgaaattaatatcattctcagtttaatataacaatactaatatactattccaggtggtttattatatggtttagttaagatgaaattcactgtgggagttcacttagatatatatatttttagaaaatcatgagctgcagttaggagtccgattgtctcaagttagcatgcgattttttttaaacaaatttcttatatgattccttctatattaccaaaagtgaacggtcttaaaaaccgactcaaatacggatatgtattttcaaaagcaaacgaacttaaaaactgactcttacacggatgacgtaaaaaaaaccgataaaaatattttcaatttttataatagagatagtgattgtccactggtcggcccaagcacacctctaagagcaattgttttgtttgacagaaggacttcaagggcaggaatcccggtgagcaacttctcttcgaccacgcgaacacctatccattctgtgaggctgtgatagtcatagtccctggacaaagcgagtctccatttcgcctacaaacttgtcgtcgtcaagcgcgccagcacaaccaaaattaacttgcgcgccactctgcctctcaacccttcaaacacctagtataaagctcatcgtcgccgcgagcgagcttgctacctccaagtcaaatcaccaagtgattcgaacccatggcgagcatgaatgatcaacacggcggcgccaccgcccacgtcctgctcgtgccgttgccggcgcagggccacatgaacccgatgctccagttcggccgccgcctcgcctaccacggcctccgccccaccctcgtcgccacccgctacgtgctctccacgagccctcctcccggcgaccccttccgcgtcgccgccttctccgacggcttcgacgccggcggcatggcctcctgccccgaccccgtcgagtactgccgccgcctcgaggccgtcgggtcggagacgctggcgcgggtcatcgacgccgaggcgcgcgtggggagggccgcgaccgtgctcgtctacgacccccacatggcgtgggtgccgcgcgtggcgcgcgccgccggcgtccccacggccgcgttcctgtcgcagccgtgcgccgtggacgcgatctacggcgaggtgtgggccggccgcgttccgctgccgatggacgacgggggcgacctccggcggcgcggggtgctcagcgtcgacctcgcgacggcggacttgccgccattcgtggcggcgccggagctgtacccgaaatacctcgacgtctcgatccggcaattcgaggacctgctcgacgccgacgacgtgttcgtcaactcgttcaacgacctcgagccgatggaggccgagcacatggagtcgacatggcgagccaagaccgtcggcccgacgttgccgtccttcttcctcgacgacggccggctgccggcgaacaagaaccacggcatcgacatcttcaccggtgatgcgccgtgcatggaatggctggataagcaggcaccctgctcggttgttcttgcctcctatggcacggtctactctctcgacggcgccgagctcgaggagctcggcaatggcctctgcaattccggcaagccattcctctgggtggtgaggtcgagcgaggggcacaagttatctgaagagcttcgtggaaagtgcaaggagaaggggttaattgtgtcctggtgtccccagcttgaggtcctgaaacataaggcaacaggtatgaattgctaattaaaatgtcaattacaaagataaaaatgtttttttaatgatgtacttcctccgtttcatattataaaactttctaacattatccacactcatatatatgtgtttagattcattaatatctatataaatgtcgacaatgctagaaagtcttataatatgaaacggagggagtaataagtaaaggtaccacaccttgcagtgttaattggtaccctacgacaaatcatgagttagaaatagggtcgagttaatactttctctattttgaatatacagacactggtaaaagtactccatccgtccataaatatttgacgtatttgacttttttaaatatgtttgaccgctcgtgttattcaaaaacttttatgaaatatataaaactatatgtatacataaaagtatatttaacaataaatcaaacgatagaaaaagagttaataattatttaattttttaataagacgaatggtcaaacatatttaaaaaagtcaacggcattaaatatttatggacgaagggagtattatttattttattatgacttatcctctaatggtaacttacatttttttatatttatgcaatatttctaaataagataaatcattaaacttatatcgaaaagttgataggatcatatatttaaaaatagttgtattatgtttgcaatatttgattaaacctctgccacacaaattttttctgtgcaggttgtttcttgacgcattgtggatggaactcgacgatggaagcaattgctacggcggtgccaatggttgcgatgcctcagtcagcggaccaaccgactatagcgaagtacgtggaaaccgcatgggagattggtgtgagggcacaactagatgagaaaggctctgtcacgaaggaggaggtggagatatccatcaagaaagtgatggatgggaagagggcagtggagtacaagaggaatgcagctaagtggatgcaaaaagccaaggaagcagcacaagtaggcgggagctcagacaagaacattgctgaatttgtagcaaaatatttatcaaattagtatagctttgtatacatctggtttcttcatgtaaggatcttgtaacaccagcatgtaaaaaaaaattaaatagcagacgacaagatggagttagttttaatgtgtctacaaagattttggtagtataaaactaaatgagtggaaatttggtggtatgagacaaattttcccttcccaaagaccactaaaaatataaaaatataaagtaattaaacgagaaatcatcagtctacagatggtttgcgagttctacggaaaattaaaactcaatcggagatggattttcatctgtctaggagatattagctcgtttcttgcatgtcagcatgtcacttaaatagtttaaattttttaaaaagtaataaggtaggttaatataaaatatatcatttcataaagcatgttatgtaaaattcgacttccacaagttataaaaaataacaaattaaacagaaacttgttttcgtaccttcatagttatgtttgttatattttttttatctaaattcgtatttgtatagtgatatatcacatattaatctatatttattaatgttttgataacttaggtaataagtaattcaagaaacagggaattttccctcgacggaagaaaatcgttcccactacaatcttctgaaacatatacctacaggctcgaacattttctgtacgcaattccgtgcgttccatagcacaaaatttgtattgtttagattaacatgtgtagcattaccgctgtcaattagcattgttctgtctctgtgctctgttcttgcatgtatcggtgttgccaaaggaagcagagtggaagggggtcgccgtgagcccgtgactggaggggaaagggaaagagaaattttctttcacacccctaattttttagtcgatgctttctatgtccctaaattttcttcattccctttatgtttctcaattttgatttgcatcttttccataacattgccgaattggccattagttcgtttaataggtgtggagaagtctgttttaccattcaatatgtgagtaatatatagaaatttatcgactatattgatttggatcgatgttgaagtattgttgcactttgtctatattattcatcgaactttatcatatcattaatcatcatataatggtgttatgtggagtgtgatgatgtaagaatgaagttatagagttatattcatgcatagttaaatgtgtaattatgccacacacggttgtttttcatatgaagttccgatcaatattagtagattccatttcaatagtcccgtttccgatttaccgacgttaccgatatcgttaccgttttcgggtctacagttccgattccgttttcgagaaaaaaaatatgaaaataaaaatgccaaatggttttaatttccaaccttttccgaccgttttcatcctagatacgtgtctacatccacgggttttgtagagagccaaaaacaaacgtgtgatacaacacgtgcaacatgtcctttacttgcaaatcaagtccaattcctgtttcatgccaggttcgctgtcccgggccgacacatccctgaaacagtccaccgcaaattctgacccatacagaaagcaatcttgggcgccactcctacttatccgtctcgatcaaacacactcacatcagccagccagcagtaggcccagcacacacccacagtcctctatcacatcatggggagcatgagcacaccgccaccggcggcggtcacggtggcgaacgtccaacgtcggcgacgataaccatggcggcgggcgggtgctcctgttgccgttcccggcggcgcagggccacaccaacccgatgctccagttcgggcgccgcctcgcgtaccacggcctccgccccaccctcgtcaccacgcggtacgtgctctccaccacgccgccaccgggggaccccttccgcgtggccgccatctccgacggcttcgacgacgacgccggctgcatggccgcgcccccggactacggggagtaccaccgcagccttgaggctcacggtgcacggacgctggcggagctgctcgtctccgaggcccgtgcggggcggccggcgcgcgtgctggtgtacgacccgcacctgccgtgggcgcgccgcgtggcgcgcgacgacggcgtgggcgccgccgcgttcatgccgcagccctgcgccgtcgacctcatctacggggaggtgtgcgccgggcgcctcgcgctgccggtgacgccggcggacgtgagcggcctgtacacgcggggcgcgctcggcgtcgagctcgggcacgacgacctgccaccgttcgtcgcgacgccagagctgacaccggcgttctgtgagcagtcggtggcgcagttcgccgggctggaggacgccgacgacgtgctcgtcaactccttctccgacctcgagccaaaggtaatctagtgtatccagcttacattgcaacaaacaagatcatttcgtcccaaaattgttacacattttggctgtgaaatgagcaggaggcagcatacatggaggcgacatggcgcgcgaagacggtcggcccgttgttgccgtcgttctatatcggcgacggcccgctgccgtcgaacacggcgtacgggttcaacctcttcacgagcaccgtgccgtgcatggaatggctggacaagcagcctcctcgctctgtcgtgtttgtgtcgtatgggactttctccagctacgacgcagccaagctcgaggaggtcggcaatggcctttgcaattcaggcaagccattcctttgggttgtgaggtccaatgaggagcacaagttatctcgagaacttcgagagaagtgtgggaagagaggactaattgttcccttttgtccccagctggaggtgcttgctcacaaggccacaggtatgggaaccaacaaaaactcaaattaattattttgacaacaaaataattttcttccaggttgaaaataattgtcatttttataagacagatgtgaaactttaaaaatttgactataaataacatgtaaaatgttttttagaaatatgcaaaccatatgtataattaatctaaaaagtacttcaattcaataaaatcatatatttattggtgtttatatatatatgggaaatagaaaatattggtcaaagttatttttttttagcctggagggagtgtatag

SEQ ID NO: 23866 - DNA, 4233 bp, Oryza sativa
ggtgtaccgctagtggcaatgccatattgggctgaccaaccaaccatatcaaagtatatggagagcttgtggggcatgggtgtcagagtgtggcaggaaaagagtggcggcatacaaagggaagaagttgagaggtgcattcgggaggtgatggatggggataggaaggaggactataggaggagtgctgcaaggttttttttttttgagataatgcagcttctcatagattaattaagatcagacagcagtacctcccgaagagtctccgggattacagtacggtaggtattacaaactgtttgctcagaacattgagctaaaaggtgagccgcagcattagttacacgattaacatgaatgaaagagcagtccaaaaaaccagccgccaggaagtttatgtcagagacaagagcgccaaccattgaccggtcgcgtgttccagactgaatcttttggatgatagctaggcagtctaaagccaaaacaattttctggtgaccctcctccatcgccgtgcgcaacgcacagcgaatagccaaagcttctgccatttcaggttggatacaccccgagtgtcgctcattagcagcgaacaagcacagcccgctgtgatccagaaatagaaaccccaacccaaacgaattgactgactggaagacagcagcatctgtattaataagaatcgtaccttcaggcggaggcctccatctgggcactggccgaagagcatcacccctaaccgcttgcacagcacggcaacagtgttgttcaatcatctcgacataagccaagattttctggatgacctgtcttggatttgctaaggtaggattattcctggaatgatttctagcctcccatatatgctacaacgtgatagccagtgccgtcttttggatgcctgaacttctccccaggaaatcaaaaacccactgcttcatatttgacagctcagtcatgcatagcttcaaatcaaaatgttgcttagtgccatcccaaacacatacagcaaaagggcaaaggagaaagatgtgttcgattctgtcatccctttcgcaaaagcaacagccatcagtagcagggatatgccgccttctcagctggaaacctgaaggcaagcagtcatgcacaattttccaaagattgattaacattttccctggggcattgattctccaaagttccttccatctgtttgcactctcttgtaaacccgacgacattcccctgccattttcactttgcgcagccataaagatttctgatcttgcaaggttgtaagctgaacgcaccgagaaaacccctcttttgtcgtgtggctaggaaatgaaatcctctcctccatgtgcactaacaggaatttgtaggatctgttgggcagtagtttcgtcaaagaaagagaacaccttatcctcatcccactccccaatcgcatcattgactaagaagtccaccgtgacatcctcaggcaaagggaggagaggtctcaccatcgaaggtttgattcctggtatccaatgatccttgaggatttttaccgaagagccattcccaatgccccacctcacacctttcctaagcaaatcccttccaaagagaatactgggccaggtgaaggaagtggcagtgggtttgggagcattccagagatcagagttcgggaagtaccttcctttgagaaccctagcacagagcgaaacaagatcagtcacgattctccaaccctgtctagcaagcatagcttggttgaaaaggcccaggtctctgaaacccatcccccccagagatttcggcgtcgtcatccactcccaggaacgccaatgcattttcttcttcccgtcctcgaagccccaccaatggtcaaggatgcaggatttcattttctcacaagttgacacaggcagcttgaagcagctcataacataggtgggaatcgcctgcgcaacagctttgagcatcgtctccttcctggccctggacatcggcctatcgttccaaccattcactcttctccacactctttccgggaggaaatgaaaagagccagtggacgctcttccaatttcagttggcatgcctagatacgtgtcttggaggatctcaaccgaaacttggagtgtctccttcaccgagttctttatatcctcaagacagttctggccaaagaagatggaagatttctgaagattaattttctgtcctgaggccttgcagtatgcttggagtgcatctttcagtccttgaacactgtgcagatcgctcctagcaaagaagatgctgtcgtctgcaaagagcaggtgtgagattggtgggccaagacgaccgttcctaatgccctgaatcacccccattgattccttcttttgaaggatgctggatagcccttcagtgcagagcagaaagagataagggctgattggatccccttgtctcaaacccctcgacggagtaaccgggttcgttagctctccattgatcctaactgcataccttacagaggtgacacatcgcatgacagtttgaatccaaggatcagcgaagcccagcttcaaaagacatccatgcaggaaagaccactcaacacgatcataggctttcatcatatccacttttagagcaaagaaaggcttcttgcagtgttgcttcttaatggagtgaaggcactcatatgccactagggcgctatctattatcagtcgtcccagtacaaaagcactctggaactcagaaacccgagtgctgcaaggttgatgaagaaagctaaagaggcaatgcaggaaggaggaaggtctgacaagaatattgctgaatttgctgcgaagtattcgaaatgacaaaaatccagtgagaatggctattagcctagagatgttctagcttatgaataatttttttcctagaaaagttcatggaggtcgaggagctgatgttttccataattcagcagaagtaaattaagtttacggactgtgtaaaatggtactttatattacttacaatttttatttcataatgaaggtcatgtctagcataactccagaccccaaatcccttctgaatttgaagtttctatatcaaattatactgttttaaaatttcttatttcatctaaaataggaacaaatgattaatctaaatattatttacgtaatcaccgatccatagatttgcaggtacgaccatatttaagaaatctcgtatctagagctacgccaaacttgacctgaagtgtaattagcttatgtcttcgtcgaggacaacaagctagcatagacatatcgggataaaaaaaataattctttaaggtttccatactttgggagcacatggggttatgtctttctaaattacagaatacatgtgcattttattttcctccaccggacaaactgttatttatgttctccacttaatccatcctttctattagaactcgccattacaaaaatatctctctcctactaattactacctccatattttaatgtatgacgccgttgactttttatccaacgtttgaccattcgtcttattcaaagaatttatgcaattgtcatttattttattgtgactagattcatcatcaaatgttctttaagcatgatataaatattgtcatatttgcacgaaaattttgaataaaactaatggtcaaacgttagtcgaaaagtcaacggcgttatacattaaaatacggagggagtacaagtttccatactatacaaagctaaaaaatagcacaaggaaaaactcatgtaaataatatggttaaaaatgttgagacttcaatcttgcgtaactaccctatcgcacagaaccatcaaccggagcctcattgtcattgccggattatttaatgttgtttctggaaattatatcattctcagttttattaatgatactattcaggccggtttattaatgaattcattgtgatataaaaatactcctatttgttcatgataaaaaatagacagtggtgcttgttttcttaattaaccgatggtaaaaacagtcaaggcaggtcacaacgcgtgcatacataagtctaagcttggctcttgcgcagaagctatatatctctacatttcctctcacacgttgacacaacaatcctttcgctctccacagccattgatgtgaccgtttgcccaccgatatgcctccccctcctcacctccccaattctaccgcgtgcatgttattctgctctttcaaacatcgctgcat

SEQ ID NO: 23867 - DNA, 6097 bp, Oryza sativa
cgctgcgagcttgaggcacgagaccttgctacctcacaagttagattatctcatattctctttttttcttattgttgtgttttctctttgcacagtttttcgtctgctgcttttcttagcttgattgctataaacaaattgtggcaatgtggatttttgaaagcgtatgatttgttgaatgttgaattataacattagtatttatgtacttttgtttccaaagctagtatcactactacagaaaagggaattagtgccggttgggaaacccccttcggtgccggttttctcaaccggcacaagggaggcggcactgatttgaaataaaaaggtgccggttcattagaaccttttaggttcgacgaataaaaaaaagccggctcgatgcgttagctcgatcgagccaacgcatcgagccgagcagtccctcgtcccacatccagaagaatagaaagaacaagaaaattttttttggcaacattcatcccacaacatgcaaagatggaatcatccacatatcaaattttggcaacattcatcccacgacacaaattttggcactcaaatcaaatttatgcaataaaaaaaatcacacctcttcagtcgtcaccgtcgcacggtcagccgttgcgccacctcccatcgcgccgtctcccttcggcgagcccgccgcttgccgccaccaacctccccgcgagcccgccacccctaccgccgcctcccctcccgctagatctagtggaggggagggctcctccccgccggcgagccctccgccacctccccttcttgagccaccccacccgccgccaacgccagatccggccacccccgcctgtcgctgacgcctcccctcctgccggatctggcggaggggagggcgcagttgccgctaccgcctccgctggctgcgggagagaagggaggggagagagagagagaagagagcgagagagaagggagggagagaagagataaatattattcaagtggtgaataatcaatatttctctttttaatttttactcaaataagtgggctcgtcacggattggaggtgattgccaacggtgtgcccctttggcaatgcacaatgggctgatcaaccaaccattgcatactatatggagaccttgtggggcataggtgcgcggaggtgcaatgggacaagaatggtgccttatggagggaagaggtgcatcagcgaggtgacgatggatggggatcggaaagagaaatacaggcgaaatgctgggagcttgttgaataaagctaagaaagcaatgcaggagttcaggagggagctctagtaaaaatattactgaattcgctgcaaaatatttgaaatgaatagaattctttgaatgcattcttaattaatgagaatatccagtccagatgttatggaaattacaatttttttttcacttgaaaattatatagggagagcaaactgctagattactcaggattcagcagacataaattaactttacatagcaggtctaaaatgagttctttttcttataactggtatatatcataatagggataagacattttacgaagaattttccaccttttaagttatttacatagaacgataattaatattataaaaaaacggtgacatgtttccaaaatgttagctttgtaataccatgcatcagtagtaattttaatggtacataagtacaccaagacattatctaacaaaatacaccaagaagcataaaaatataaattattataattataaattataacactacaacagaaaccttaataggaaacggctcatagtcataggtgccaaactgccaattcatttaaaaccggcatctattgaccattttccactttcatgggataaaaaaaaattaaaaaccggcatctttaagaacatacaggtgccgattctagaaaaaaatcgatacctatactgatattatatgtgcatgttctttaaaagaccgcctataattaaaaaaaccggccaaccgagccgactggcgttatcctctgccgcctcctccttctccccgctactgcccttcttcctcctcctcctcatcgtactgccacccctccttcctcttcctcctcctcctccttagccaccaccaccactcctccttcctcctcttcttctccatccaaccaacgccactgtcaacacagggactgatccaccgccacgaccacggggttggcccggtcgtcgatgtgatggtgtcattctttgtctgtttgtgatgatggtgatctcagtgatgattgtgattgtgtttgatgtgaatgatggtgatctcagtgatgacggagagttggtcgaggcatcaagccagttttttttcattcctaggacctcaaaggtgttgctttgctgggtgccgttcgaaaatatggcacctatggtcatctcccaaccagcacaaatttccttttctatactccctccgtttcatattataagacattctagtattgcccacattcatatagatattaatgaatatgtacatatatgtctagatttataatatgaaacagagaaagtagtagtgtatgtgattactagtgatttcaacaatttgaattataaattatgacagtacatgttatttgttctacttataaccttaccagccatcttaattaattgtagcaaaggctcacttgctcatggacaatatatacttgacctattttatcagatccaacacatgttatccatgcatctcgtagataagtgcattataaattatatcttttgaacaaacaaagtatgaaccacagcaacacattattcatcaatccctatacatcatccacatcacacttgagctttccctatgcagtagggtaggaaggctccatggcgaggccacacatgccccttttgtcagaaatgtccttctccatcctcaagaaaccattctcaccccaagtcgtgccccaggagttcttcagcaaccaatacttggtaccatcactagccttgccatagccaatggccacaataccatggtccaagtcagtgccacatgagccggtcatcacaccacctttgtagaactggaatgtcatgtcgcctccatcgacagccacagacacaggttggttagccaccgccttcataagggcagcctcattgttggctggcacatcctcatagcccttgatcgatgcgacgctgttggatacactcttgcacttgtcgtctgctgctgcgtatgggtagttagactcggtggtgaggccgccattcttgatgatgaatttgaaggcgtcatccatgagcccaccttcgcagccctggtcctcaccatggacatcacatcaacaagctcttgttcagagagtgagataagtttgcccgtgctcagcttgacaataccttccatggctgccacggccgaaaacgcccaacaacaacctgcaataatcattcatgttcaatgcattggacacaatagatgtcatcacaaaacgctatcataaaagatactgaagaatgtcatctgagtagcctgaattttcttaccacattggccttgatccttgatgggagtgaccgcgcccttggttctccagtccacggtcgccggcagcgcatcaatgttaacattctcatacctgaatccagtaggaaccctagtcgtgctaggaatgaatcccttgttggtcttcatccacctgaactcgtcattggtgaggtcggcgaactggttcacaccaagccagaaattgtggttaccagcattgaacgactcgatgaaggcgacattggccttgaacacctcgaaccggcgggccttctcggcatcgtccctgtacacgcgcccgtactgcgccatccacctctcgtgcctcgccgccatggccgcgtcatcgctcagctcacgagctgctagaacagcgctgcagaggcagaggcagccgaggatggcgaagagcagagccttggccatggccatggtcgatcaggctttgtgacctgtgatccagctgctgttggttgctgctctgctgctgcttctgtgaactctgcttttggtttggtgaattggaactaggatgcattggtatatatagtcagtggtacgaacttatgtaagcacatacggtgcgtgtacgatgttgtgtttctgtgtaaacggcagtctgcgtagccgtgaagtatatacgcgtataaataaattattgtgcataggacgtacgtttcctgcagaacacagacgcctacattttaaattatgctgtgggggtttgttgaatgggaatatgaatacaaaattggaatttgagtgctccaaatttgccttggtgaatgtgtggctaaatgagacgtggttcacacggaatgaatgtgtttatcataggtaatggaggattagagtgatgtgtttatcctatggagagttttgcacattggggcaatcgaatttaggataacataactgaaaatagttgtattgcatataatagatagaacatggagtacaatatattttgagtactcgtatttacggctaattatttttttcaattctaggcgacgtacttattaacaacgaggtgctagagataactttatcactctcaagatatacaagttcagtcttttcgaggtgctaataaaggttgggtgtatatgtgcgtttatatgggtgtatgtgtattgtgagtatctacgtttgtaatgttgtttctcaaattaaaaaaaatgtatttttggagtttttttacagagagaaaatacagtattttggttgctcttaatcgaaattaaccagattaacgttactcccaaccaaattactagagtacttttaactctacatgagtccaccaaatcgatgtaatcaaagagaatttctccttgccgtaataaaattaatgtagattttgttctctcgctgttggatatttgggccagcagcaggtggagggcatagagagcacatctgtcagtctctggtctatctatactaatataaaaagtataagttgtgtctagcaatcctacaggtgaaatcacctcctcccatctcatccgtccatctaccatctcatctcatctaattcgtttcgctatcctcctcgctccaccgattccaacgattatagcgaccttatcctctccaccgtccacgcgcgattactccgcatgcgccatctctgccgcgcacctcgcctccgccgcattcaatccgtcgcgcatcatcgccacaacgacaaatcctcatatccgacgctctctcccaagcgtcgtcgctgctacctccactccgcctcggtcctcctcgcctcctcgctcctccctgcgtggcgccgctccgccgtcgtccccttgcttcgctccccctctcctcctcctcgcctcctcactcctcctcgcgtggcgcacgccgccgtcgtccccttccgccgccgcccagacgccgccgtcgtacccttccaccgctgcccggacgccgccgcccatacgttgccatcgtccccttccacagccggagccgcggtcttccccatcggccacacaaatcgcgccatggcaactcacaaaattccccacgcgtggaccaccaaggctccatcgcgctaatcccgcggtggctcccctaatcatgataacgccgtcgccgcgcctttgaacgctgctgcaccatccgtcatcatccgcacttccgccgccgtcgtcaccgcaatcagtatcctggtggtccagggtttccaccagtgccgctaccccgtctcgccctggttgtgcatactcccaccagcgtcgcagctccgtcgtcgccctgcaatcggtgcctcagtggtccagggctccgctggcgatgccaccccgtcgagccacggtggtcaagccttccgccgacactgagcctccatctttgtcgctgctctgtgagtcctctagtgttgccgccattggaaggggatagactcagcagctaggcctcccagccgtgtgcctccctctcttatgttggtgatacctgattcaactcaaatcgactcttttcaatccccatttttcctctttgtgaattttccccattagttctctagctgaattttcttat

SEQ ID NO: 23868 - DNA, 13942 bp, Oryza sativa
cataacataaagtttgctccgccttgaaatccgctcggcttcatctttgtcttgagggagttcttgagaagtcaaaaatcgtatgaggggttctcgccagtcggtttcaaccacagcgacgtcatgagtgcccgcaacttgagtggtatctttgtgaggtactgtcggcgtataaaggtgttcaacgaaaacatcagagggcgccacctcgcgcttggatccaaagttggcaagtctatcggcggcttcattattatgtcgaagaacatgactgagctcgagtccatcgaacttatcttccaatttgcgtacctcttgtcgatatgccatcatgttgtcgtcaaggcaggaccactctttcatgacttggttgacaaccagctgtgaatcacctcgaactattagacgctttatccctagggaaattgcaatccgcagtccatgaaggagggcctcatactcggcgacgttgtgggacgccgaaaaatgtatccaaagcacatagcttaatctttctccagttggggaaatcaaaaccactcctgctccagtgcccgaaagtcgttttgatccgtcaaaatgcatggtccagtgctccatgttctccgcgggggtatcctcctggcactcggtccattcggcgacaaaatcagctaacgcttgggacttgattgaaattcggggcttgaatgatatgtccaaagacatcaactccaaagcccacttagcaatacgtccgtttgcttcgcggttgtgcagtatatcaccgagtggaaatgatgtgaccaccgttaccgagtgaccttaaaagtagtgagatagcttcctggcagtaattaggataccatataacagcttctgaacctgagggtacctcgttttggagtcggctaggacctcgctgacaaaataaatcggtcgctggactttctggacatggccttcttcctcgcgctcgacggccaagactgtgctcacaacctgggaggtggctgatacgtacagcaacaacggctcctgcgggtgtggtgaggctaagactggtggctcggtgagaagtttcttgaaatcttcgaaggccttctgtgcttcgggtccccactggaagttatctgttttcttcagcagcttaaagaagggcatcccccgctcgccaagtcgcgaaacaaatcggctgagcgccgccatgcatccagtcagcttctgaacatctttctgggtacttggcggtttcatgttgaggatagcagtaactttctccgggttggcttggatgcccctatgagacaccataaagccaagcagcttccctgacggtactccgaaggtgcatttttcagggttcaatttcatcctgaaagcacggatgctcacgaaggtttcttctagatccgagatcaaatcatccttttgcttggtcttgacgactacatcatccacataggcttcaacgttgcggccgatctgcgttgagaagcatctttggatcatacgttgataagttgctcctgcgttttttagtccgaacggcatggtgacgtagcagtatgccccaaaaggcgtgatgaatgaagtcttcaaacagtcggattccttcagtcggatctgatgataccccgagtagcaatccaaaaaactgagaagctcacagccggcggtcgagtcgactacctggtcaatgcgaggcaacccaaaaggatctttagggcaggatttgttgaggtcagtataatcaacacacatgcgccattgccctgttttcttccgaactagaactgggtttgccagccagtcgggatgaaggacttctttgatgaagcctgctgctaacagcttggtcaattcctccttgatcgcgtctttcctgtcttgtgcaaatcggcggagtcgttgtttgataggcttggcgtcttctttgacatgtaaggagtgctcaatcacctctctaggaataccgggcatatcagatggtttccacgcaaagatatctttattgttctgaagaaaggtgatgagcgcgctttcctatttacaatctaactcagcgcctattacagcagttttagtaggatcagagggatctaggggaatcttcttagtcttggcttcgctttctccactttttgaagtcttggtaactggtatttctccttcgctcgccgtggctgcagccagtcggatatcctctcgggcagacgccatctcgtgagtgtgagccatgtcgcaactctccttgtcgcatgtgacggcttgcttgatgtcactccgtagggataggactcctcggggaccaggcatcttcatcatcatgtaagtgtagtgcgggacggccatgaacttggctaacgccgggcgtccgagtatggcatggtatgctgtctcgaaatcggcgacttcgaagctgatattctctgtgcgaaagttttcccgagtaccaaaagtgaccgggagggtgatctggccgagtggagttgcggataatcctggaatcactccgtgaaaaggcgcattgcttggttttaactcggagcgagggatctgcatatcatccagggtcttggcgaagaggatattgagtgcactgccaccatcaatgagggttctgcgaagcttgacattacggaccactgggtctagtaccagggggtaccgccccgggtggaccactcggtcaggatgatccgagcggtcaaacttgattgcaatctctgaccatcgaagatactggggcgtgtcgggctgaacagcattgatctcccgttcagtcaacttctgcttccgtttagactcataagccagggggccgccgaagatatggttgagctccttgcggtgatcttgaaatcctgccggggcgtcgccatcgtccttcttccttgacgtgctttgttcttcgtcagagttcttccgtgcagtcttggtgtattgatccgcgaattgcttgtagacgaaacaatctttggccacgtggttggagttaggatggtgcgggcattgggagttcatgatcttgtcgaacgtgttgacgcgcgaacgctgtcgagaagagtgactggcggttgcaacaagttccgcaggcttacgcttgcggtccttatgattgttacttccacctcctcccgtagccggcgtacccttgttttgcttccaactgggacccgactgctttgatgcggtgacggcgtcttcagctttggcgtactcgttggctttttcaaacatgagcttgactgtcctgggaggcttacgcccaaacttgccaactagttcttcgtggcgaatccctttggtgaacgcggcgatgataacgtcgtcggtgatgtcggagatcttgttacgttgttcagaaaatcgccggatgtaatctcgaagggattctccggacttctgaatgacgttgtagagatcatattgtgtgccgggacgctcgaaggtgccttggaagttggcgatgaagtggtcgcgtagttcggcccaagatccaattgtaccacggggcaatccatggagccaagatcgggcggaatccgctaaagccactggtaaatagttcgccatggccttgttgtcacctcctgctgcgcggattgcgagaccgtagacggtaagccacgatccagggttagtggtgccgtcatacttctctattccagtcggtttgaagccggctggccaatccactcgacgcagatcgtcggtgaaggctgctacttcgtcaaggtcgtcgtcgtggcggttcggcgaatgatgatagcctcgagctgctcggcgctgtatgattgtgtcgcgaagatcgacggggcggcgacgaggtggtgagcgaggccgttccactcggcgctccttatgaaggtcgggaggtgagtgaacagaccgctcgtcgtgtcccctgctcctgcggttggatcctgcgccggtgatgctgaggcttggatgacggtagtcatgagatcggaagtgggggactcggctgccagtcggcgtgtggacgctttcggagttaactgggaccgaagccgcaatcatggtcttcgtctggttcaagatgttgacgacgtggtcggattgattgagctcgttttggttgaggagggtgtcgagaagggtgatcgcggcaacggcattctgttgaggggtgcggaaaaccggtgtcccttcgacatcctgttggccgatgagatcacgcgctcggcgcccagcttccaaagctcgctgacgtcgatcctcagcctccttcgcggtccgctcacggtcctgctgctcacgccgtagccgttcttgttcttgtggttgatgctcttcctccagtcggtgacgttcttcggtctcccgggcttggcgttgctcctccgtctcattattggccatgaaaacgccaaagtagagaggggtgtagttgtcatctaggcttccgtcgaagtcgtcgaagtcgtcgaagtcgttgtagcgagaactaaattcgtcgtactccacgatgtcagtaggacgtgagtcgacggtgggagagctgttgtagtcatccagctgatccgtcgaaaccgtgccgagtggttggaggatgacgccgacttccctgaagctaggcgaaatcggcgttgaagccgacttccgcctaggcctacgggatgaagacgctgtcgtggtgaagacggccgctaaatcgtcggggagcttcatcaggactggtgggtaagccccatcatcttgatctggtgtcgttgaagaagatgcgatctcggccgagtggtttgaagccgactcggttaagatggtcttgaagtagctttcagccgcgttcgggaatccaaacgggaccgaaatccggttctctcccgaccggtctgattccgagtcgaggagagaaatcttgccgaagttgttggtgatgaagtcgaggctgtcgaaccgaaacgtctgcccgggagggaaaacgaggtcgtcgatgccggagatggaacccattgcactgatcggcgaaaagcttgacgctacccctacccggcgcgccaactgtcgaaactagatttcggcaataatgaaagggggtggctatcaagctaggaaagtgtatgggtttgaagacaaaggatttatacaggttcaggccttcttataaaagaagtaataccctactcctgtccggggatgaatccgccgagtgtattattgattgtatgatttggagaaaatccaacctctgccactagaggcacccggaccccccttatatatggggaagagtccgttttacaaaagataatctatatccctaacggaatatgcaaatacagatgaaatatagtcgtaaccgactaagtctcagggtgtttccttgatacacaagttaagaaacaaacccgagatacaaataagatattctatctacattaggtatcctgtacctagtccaaataccgtcgccgtatagatatgggatatccataatctccacacacctcctcgtcagtcccccgccgtgagcgtcgcgactcgaaaccctaccgtctttcgcgatctcgcggcagcgacacgcatctgactaccgcgccgacgccgccggtggcgatgggcgaggatcgcggcgacgactacctgggcacgctgccggactacctcctccacaaggtcatgtcgttcctcccggcgcggcaggccgtgcagacgtgcgtgctgtcgcggcggtggcgcgacctgtggcgctccatgccgtgcatcgacatcgacggcgacgagttcggcggcggcatggccaaggtcaggtgggagaagctgatggacttcgccaacaatctactcgagttcggcgacgtgcacgtgatcgacttcaaccccccgtttcttgagaggtttcgtcttcatctcgcccactcttggaccgcaccatacatacgcgcatggaagggctctcggctgatcgagtgttgcatcctcggcggattccggcaccgacccgccgccgccgagatcgccgtcggcgtcggcgtgccgttgttcaggctgccctggctaccatctgtgtctacttcccgactaaaaagattgcatctctctggcctagttttggacggttgcttcgatgagtgcatctgttcatcctgcccaatcttggaagccatggagctcaaatcttgctcatgcgaattcaacaagatcgaatctgccacgctgaagagtttggccatccatggatgcagaagttgcctcctggagtgtactacattggctatcaagacgccaaggctcacctcccttctcctgagaattacagtttattatgaacttagagtacgcttggtcgatccaatggattccttgatcgaagcatcgatccgtgagaagtcctacgagccgattaactttgacaacgatctatgcttgtcacttggtgccctagccagcgtcagaaatctcaagttatcgtggtctcgatcaatggtatttatattatcctcttattatagtccttgaatatatatcctcgtgcttgaatatatatcctcttggtgcattcgtttattcatgcaaaagtatgtcatttgtttaatccatgtaagaaacgacctctagggcttaaaatccattcaagtaataatgagtaaattgtattggtggtagacaaacttgttaggtgggtgcaaattagtacataaacttataaaacactcgttttagtacatgaacttgtctacttcgtgtgaacaaggaccaaaataacttgtcaatgttaattttacgaagttgacgttgattagaatgtgacgtgcatacgtgtagtaagcatgcataagacatgtaatatttataaatttggtctctactttatccttcattatggaaatgatgaatttcatatatttctaacctttatatcattgctcgctttttaaaatttttctactatcactatatcctattctatttttttattaaagaggtgtatatctaatagcaaccttcttagatatatatttacacagtatcctaatcagccaataaatcaataagattagctatgtagtaattttgccttcctccgcacgcaccagataagttaatacaccaaaacgagcattttatatgttcgtgcactagattgcacccacctgacaagtttgtgtataggcgatgcaattatatttactcaataataatctacttctacttgttatattaaactctggaccgaaatatgcacccatatttttctacattcgacgacagttttttagaaaccgttggagatccatgtgtcattgtattaagaaggataagagaaacagctctatattctcagccattcgcacagagaaaccaagcaggaaaaaaaagaaaagaaaaacgtttaaccgaataacttattttcgaataacttatttttctccactgcccaaccaccctgcagattatatatctatatatcctatacagttggaaccaaacactgaacatgcattaagccacatcactatacaaatcttgaccattggatcatccgttagagggcaagtatcataggtgatgtgaaactaaaaagttaaatgacatttaattctgttatgaacaaaacactaaatatgcactaaaccacatcgctttagaaatctagatcattggatcatccgatccgttagagggtttaggatcctaggtcatatgaaactaaagagcaatacatttaattttattatattcacatgtatttcatcatttcaattacgatacatccatttagcttttaccttttacgaaaagactatattgatcttcccagatatgaagtgttcatcaattcgtttattttgtttccttctttttccttagcttgcacatttgttaaaatccatttatcattacatagtcattccgcagaaacacacggggggtattatctcatatctaacaatgtatgccaccttcaccagttaaccaaccttacaaaactcttaatttatatttggtgtacttttgtacactattattataaatttcatccacatataattttataaatttgtatatgtcaacaaaattaatgtaagatgtttatatgtaggagatcttgtctaaattcgtagtattatgatgtgtcacatctgatcaatctcttgtattttgagatggatagaggatatgatattgccatatttacttatttttgctccaatttgcttcaggattcacaccatggagaatttccaaattttccaacgtttcaaaagctaactaccctgcacctatataaatgtaatatgtgcctaaatttgaatatactgttgagttttctccagaaagctcctagcttggagagagttatattgcagaactgcaaggtatactacttgtatctttttcctattttccttcacttgttacactgccgtgttaatctgtcttctaattatactgatctctgtgatgcctgaatagtttccagtagctcccagaaagaggaaaagatcaacaaaggtggatagacacaagattcctcccgagtgcaaaggtctgataacttcggaatctcgcgccttgaaacgtatcgagatcacttatcaagatgatgatttctgcaatcttattaaacttttctcgtgcaattggagaaaactagaggaatatactatcacactgaccaaggtttgagtcgttttcattccatatatgtttttctagcaactttaaatttagagcatatatagcttaagtcttaagagctagtagtaccaaatattttaatttaattagttcattgtctccggtagacatccgcttgtttgctagtactgtctaattagaacttaaaatagttggagtgtagtaccttattatcttcacgattgctctcagcctctcagttatttcttcgagtcttctcacttatatactattgcgttttttttctcatgtatcgccaattcgccatgcattcggtttggacactatttggttaattggttttgccaaaaacaaatatatatgctacatagaatgcctctaacacaattgcatgcgcggctgttccaaacacccttttcattttcatcaaattcggcacaagcatcggtggtgatgtgtctgaaatatatgcacatcacgtgtagaattaatctagtatttcataaatatatcatgacatgaaacatgtaaactagcaaaaccactgctgttgatctagaaatgtatgctagacagctacacataagtaaatctatggaacataacggagacgccgatggttttggttctgcaatggaagaggatccgctaatgcggagcaacactcaccacacgaacaacgcacagtaccgggtgttgacgacgacgcgtaatgcccgagagtagagcaagacgagtcacggtggatgaacaactagcgagcgagtacacgaagcgcttcccaaaaacttttttagcgccttctcctagtgcaggatatcgaagccgaaggtttcggagacctaccctctcaattgctggtgcacaccagcagacgggatggagtagactacgagtgatgttgctttacagaggaggcaaatccttgactgttttcgtgtgtttcgtggagccaacagcttagtttataaagagataactagatgtgtcgttaagatgctcgtacaatcttgtcagctcctcgcaagggaggtggaaagtgtgtctcttgttgccattggtcgacgagtgctgtcagtgttgaacataggcattggcctctgagccatggtgatgaacgctagcaactttgcatctagtagacgagggatgtaccggttgtcaaacggcatcacgcctcccgtgtgcccttgaatccacaacgtcctcataacttgtataaagaacaacgttacaaaaagttaaatgcattgacaactctacaatatattcaataaataataagcaaagagtatgttacccctccctccatgatcctgtgagctcagtgcatctccttgtagtgcaggtgtagaactagggtctccaccatcgtacatattagaatcacaaattagagacgtgtacatatgagtgaatcaaagaaaaatataagtaaattgcgcattctaataacctgtctactagaaacgttgaccaccctacaagtatgccaatgtttttttggccgatccaaagatttgtcgtgcttagggcatgttgttttattatgactaccttcgtggcatatggaacacctgttaggtatcatatgctcggaataaccatcattcgacttctatgaccgaccaattcttatccatgtcattgatgaacctcttagttcttccgccaggagtatcgatcatcttcgacaagtcgggtatgaactcctcaccgtcatcacttggccattgagtgggatcttggcttggctcgaacctaggggagtacgagcattgcacagcttccttggtagcttcgaaacacatccgagggggcacttcctcatccatacatcgtagtctacaaaactgatcattgggagcatggcatgtgatgcaatgccagatattgacatgtacaagtgttagttgtcacaaccatgcaatagtgtcggccacccccattgtgctgcagctgatgtaactccaccctgcttagtcacctcgtactttgctgtagaaaagtagaaacaagtcgtatgttgtcccatagtacgtactttttgtatttcaaactccttaattcttttcggccacctctcacacttttgtattgcagccatcgtggccttgtacctatcagcgaaccacttattgcagttgttgaacgtgtatgccacgatggatgttactggtagcctatgaatgcctttgagcatattgttgaaactctctgccatattgctagtcatgaagccgaatctacgagctccaacatcacagggccgtgcccacttatgcctctatcacataatgtatagtagccacttctttagttgagactcaaggaaatcaatgagatgcttcacttccttctcaaactctatctactcatttatttaacaaatacactctagatccttcatccggcgttcggttgccccgcacggtagaagttagcacagaagtgtcgcgtgcaccatctatgatgtacattacggtgacctgagagatgacattgttgattttgtgtagaatgtctttgtgcctatgtgagattatgcacacttttctattgagtctaatcaagcgtctccaaaccatactaatgaaccagtcaagaaggtacctcaattgctatcatcggacacaaagtggttgaaagcctctacacactgcccaaagaaccatgcgtcatgcccaaatacatgccttgttaccccatccactgttctcgacctttcttggtgaggctcaacaacataacgcactgtggggttattagccttaataacatttagaatcgtcggtagccgaacatatctctcatcccaatctccccatatgttcttcatagccacctactttgcacgccaagctttaccataagattgatggtggtgccatatggcctccacgacctcaactatagcagcaggagtcaaggtcagatcagcttggacaaatggttgcaacctgttaccgatgaacttcgaagttagtttcaagtgcttgttcaatgccactacaacacgtgtgctctacacctacactggtaaccctccacctcccatccttagtcttccttgcacaaacctcccacattgttaatgatttaccaatgcatgccaccatgtacttcttagaagcgtttgggtgcttcacatggaacgggcgatgcacactgatcgagtaactctgcagtcatatttgtgtgtgtgagagagagagagaggcgctactgaggcgaggagagaaagagaccgccgtgtggggctaagtccactacctgtgggccccgccgatgcgggtggcgttgtctttcgttgcgtcggcatgtcggccccgccaaccattcgatggcatgtcgtggccatcacgacctcagtgccaatgcgtttggtgttgaggactgaaagctcagcgccgtcagcccttgtgctaaacccggggttcaatttttgtgatagttttagcaaggacctattttgaaataagttccaaaaaatggccaaattgtgaaattttcgggtggtgggtgcccgcggtctcgtgccccgttctggtgaggtggttgtcccggtctggtgaggtggttgttgattctcacctcatttacgtgaactggtgggcttgcgatctcctaaagtgggcggtgattttacacctctcttatgcaaagtgatggcctcaacacacctattttgttccctctcttttcttcctctcctagtcattttgtgtttgctattggacactgtatctccctctctcttcctttatatctgtcacctcctcgctggaacattttgtgtccgccacgcgacactctatctccctctctttccctatatatttgtcaccaagagggctctctctatgtgtcttctacattctttagttggtaaagtaaaatgacttaggaaaaaaaaggtgcatgtctatttagatgagatgacattgaaggagtggtcgtattaccttgcataatccataaactgcataaagcccagatcccttatcagcctgtttcaatggttttaatgcttgatgtgtccaaaatgccaccctaggctctccccatggcacattacatccaggtgcatctacataatctaaatacaatagttgcaattttaggggaaaaaagcagtgagatgttacaatactaaaaacaaggtataaaggagagattaagcatgtagataattaccccgagaaaatatgtggatgctgaaatccaatcaatatattcttcttaatcttgtcctacacctatagtgctgcatttcttatagttgaaagcatgtgctcagcccaattgtactttgcaatgttgttaacatccaagcaaatagtgacatattgcatactaggttggtttgatgttgttggggcaatgatcttgtacaaagtaatcaacataaaagttgtgatgaacttgttatctgacggagcttggggctcctcaccgggagaccgcgcaggcccccctttgccggttcggccgggggcgctaagtgaggttcttcgccctcgatctgaggaatgttcgcgagagagaatcgcacaagacacgggcgatgtagacaggttcgggccgctgagaagcgtaataccctactcctgtgttctggtggatctatgtgtgaaggaaattacagagagttgaagagctagagagttcaggctctccaaatcgaattgccagcctccttttcttcggtgggcaaggtcctccttttatatctcaaggggataccacatgcaccacttctacctactcttcttttgggtggggacccaccctatcttgaccaaaacttggctcgtgccttgagcctggaaactaaatcacagcctgtgcttgagtgaggctcagtgccgtcactcgcctgacaccggagatcaccctgtcattccttcattaataggcggagatttgcaatggccaccgtccgtatgaccctccgatgggatgggtcatacctacctccactccgccggacgcagacgcaatgtgggagcacggttgtctgccgatgacgcgaccggcgtcagaccagtcacaaaccggtcattcttgtccaccacgcgttagtttagcatgccacacgtcggcccttcttcatacaatgacttccttgcaatggttgcgatgaagcctggaatgtatctggccgggactgacgtacctactccaagagttagcacgccggctccggctaggaacgagcgcctggaggctctcatcataccgacgggacggggcgaggcgtgtgtcaggccgcctgttgccacctaacccgcgatctgaccggtctgtgaccggtcacacactgcga

SEQ ID NO: 23869 - DNA, 5973 bp, Oryza sativa
tcaataactatcacttggttatcctcccgcatgtcgcgaatgtcaagggaggaggagtgaagcagtactaggtgggggagaggggagggatggagggatagttgaatggcatttgcgggtaatttctctacaagtcaatgggtacttctgaaattgggacagagttggagttgtggagcgaccaaaataccgctccacatagctagttcactttgtaggagcgatctggtttactccgctccacttttttttttttggagctggaccgtttggttgggctccagctagatcagaggtgaatctaggagctgtagctgcaccaagcaggccctagaagaacatcgtaggagaaaatctcatttactatcccacaaattgacaaaaattctaatcccttatataaggaatttatgaactacataaataactaatcaagcatgtaaataagcatatgataacttacagatgcactaggttgactttgaccagacgatctagtctcctcttcaaccctcaactatgccaacactcttccctctgtctccttccggtgaaccgtttaaaccctataacaagatcgaagcaaagggaagagtaatggagatgcgatctggtacaaatcggattgatcactactgaaataacggataccagtgatttacttttttttttctcatggcatactgatctgcacaacaatatactgacagatggatgtttgtattcaattcatgtatagtgcccatgttttacaagttaattactccactgccatcatgttacaataattttgttccatacattgctcctctcctgattaaccgtacacgttgttccacctacaaatacctctaggtacctcgtaaacacagtaaaagatctcatgctttttcttactgttggtaaaagcaagtcatagtacaatggaaaatgacatgagaatgcaaatacaatacgcaaaggactcaatgttttgtgagtattgttgtgttgttctcaagttttctgcgactgtacagcaaaagttcaatactgtcactgatatcgtcatctttatacgtgatcatgataagcttcaagtcctgggactcgaacattatcacactttcacgcttggaaggaccgtgcaagattagccttgccattattttactctttcttgaattatctggaatctattggaacaccacacatgatggtagtgagaggatagaccaaaagcagagtaacaagatgaacataaaaaaaaatagaagtaccttgcagtttgccaatataactttctccagattaggagcattctataaaaatctcgacaatatataaaaattttggcccagatcacatgcacagaagcgcaaggttgtcagcttttgaaatgtcagaatatttatagatttgctacaatgcttctcctgtaataattggaaggagaattgagtttgacatgatcaacattataaattagtttggaagtcattatagatgcgatagaagaagtaatagtacaaatataaatagatgcacctgacaaaacaaaaggtcaataatgtaatgagtgccaggcccaaagtataatataatagatagaagctagctgtgagctgggacaaactatagtgcaaaagaaatgtactccctctgtcgttaggaaaaattaagtatttgcaactcttagatgtggtaattaaaaatgatttgtcacgtagacccacacatcattgacacatgatggtccacatgtcatgatatatgggttgcaaatagttgaatgccaaatttaagagcggcaaatagttaaatctccccgtaaaatataacatctcgtaaagtttaaatttgtacctaacgcgcctcaagaaagaaaacatgtttgtttgacccctcctttcaataaccatgctaaaagataaaacttgctaggacgaaaggaatacattataaaatgaacttggtcttatatatatttcagtccaaagattaataactattacattctggcatcgatattaaagcgaataagtaaggcttgtcgatttatcaattgacagagtttttcatattaataatcatttttttcagcactagaacaatatctaatgactgatagtatgttttttcttcttgttatgaaacaaagactctcaccttaaacttgtaaaaaatgtttttgttatttatcatcatcgacatggatgttttttatccatacaagcataatgaaacatttagattcgtttcgtcagttcgatgcttcgacaagggaatccatctcatccactaaaaatacaacgagaccaataactgaataccataggcgaaaggaggtgagctttggcgccgtgacagccaaagcatctcttccagagcagtcatgaatggccaaactcttgagtgtgccacaaacaatctgactgaactcgaaccgtacagttcttgagctccatggattccaggacggggcaccgagaacggatacactcacggaatctgccgtccaaaaccatgctggaaagcagggtttgaaatttcggtaattttgccccccaccagcaagctcacatctcacccaaattttttggtttttttttttgcgaattttttgaatttgatcaaattttgttcaaattcattcaaaacagtcacaatttcaaataatttcggccaaaaaaaaaacgaaatttctgaaatttcggttcccctgactgaaaaaccaagttcgaaattgaaaaccctgctggaaagatgcaaagttttcaggcggcaagcagagatggcgccgaggagaggcagcccgaaccggtgaatggcgacggtttcgccaatggttaatctcgagcaccacgggccggcaccggaagccactgatgatccatcttctcttgtgtcgaggcatatatatgtcgggttgtcctacgatgtcacggtagtttgggagatgcagctggaatctgtcgaggcagtacggggcgttgtgggcgatgagcaggttggtggtgaaatcctccagctaatttgtccagctcaaccagctcgccgtggagtttgcaatcgtggacctcaactcgtggccatcgatgacgacgcacggcatggagcgccacaggtcacgccaccgccgggacagcgcgtacgtctgcacggcctgccgcgccgggaggaaggacacatgatcgtgtggacgaggcagtccggcaacgcgctcaggcggtcgccatcctcgtcggccttcggctggtcgagctcatcgccggtgttggtgttgtcgtcgcaagatcgatcgcaaaagatggtagagcttggatgcccaggtcgcagggacgctaccggcatgcagtcgtatgccattcgatcgaattgtatgtaacagatgggcttggttgaggcccaatgcattgggaggcttgtgcagtagttcccctaaattcaaaatatcatgtgattccgaaaccatgtttcttttccagtctcaaatatggttgaaaacatggaatacttgtagccagagctggagtttgaaactccaccatcggttccggtgttgaatttgatcagaagggttcgcattgcaacagccgcaaacgcatacctgtgttactgttggcttggagcactattctccctcgtaatacaggacattttgacttttttttctagtccaatatctttaggtttgatcaagtttaatcaagtttatatgaaaaattaacatcatctaaatcaccaaattagttttattcaatctaacattaaacatattttgacactctctccatttcatattataagtcgctttgatttttcttatagttagatgatttaaatttgaccaaatttatagaaaaatattaaaatattttcaatataaaacaaatatgttaaccaaatatattaaatgttatttttaataaaacgaatatgatgttgtagatgttgctaaacttttttataaatttcatcaaacttctttaagttaaacaaagaaaaaaatttaaacgactaataatgtgaagtggagggagtactatattttttttagggaggagggagtaatatatttgtttcatgttgaaaattttatgttttcttataattttggtcaagcatacataagtgtgactagaaaaagaatgaaaaaaaagtaccaattttgccatttatttttggcaagagcaaatggttaccaaatactcccttcttttcatattataagtcgtttgtctttttttaatcaaatttctttatgtttgactaaatttatagaaaaatttagtaaattggggtgttgttaagaaggaaattggaaaattttgtaaagcttattctcgagatagaagcacctgaagtagtggatactatgatgatatgatcatggaaaaggctcatattatttttaagtcggaaaataatgaaaaaaacctttcacattggtgtatatgtggagagaactgaaagatcaaccaaaatggcgaaggttcttagaagaagataaaaagaataagagtactaagatatctaaatcaggtgcatacacatcataatccaatcaagcatacatatcatcatccaatcaagacacagaggaggagaccatccgcaaagagaagcgccatgagggatagaaaaatggcaaagccaagctaaaagggagaggtaaaaatgtcgcaccttctcctttgagggaccagccgtctcaggactttgttccttgcaatgaagctataaaaataaaagcagaagcaatgtatgggaatagagaggatgcctttatttaaacaatagttttataagcatccatgccttactgtttggatgcattaatttgaacagcgagattctcaacagacatgccttgctatgccttgctgtttggatgtattccatcaactatattttaagtagccatgtcttgcatttcatatatttaaacaatagttttataaacatccatgtcttcctttttatatatttaaacaactgttttataaacatccatgtcttattttacaactgttttaagctatcataactgcaagattataaataattgtgctaattattgccgctagcccgctacatatgtattttgcaggctgttgttatgatgaaatgctaagaaattattggctaacaaattcagataattaagactgtgggctacatattatcagtacataacctcttctgcaggtaaaaagatacatttatcattcactgaattcacaatagaacatttagttagcttacaaacttatcactgagttcacaagtctaataattgccgagtccaaatcctagaagccaattgaccatagaccacatagtggcacactaaatactagggatacaacatcacttggttatcatttattcatcaacagcttcatgtcccttcagttttgcatcactaaaatttgaagtgtctttgtccaacaattttaagtgtgtgtgatacttctccattcttgtttgctccttctttgtttcagctgatttcgatcttgcttctgcaaatttcacaatcgcttttgcttttactcttatagcttcatagtaagaaacaaagtcttgacatggctggtcccccaacggagaaggtgtaacatttttacatctcccttttaacttggctctgcctttttttctatccctcatggtgcttctctttgcggctggtctccacttccgtgtcttgattggatgatgatgtgtatgcacctgattcagagatattagttctcttattcttgttatcttcttctaagacccttcgccattttggttgatctttctgttctctccacatgtactcctatgtgaaaggttttttattatttgtcttaaaaataatatgaaccttttctatccgagtatccactactccaggtgcttctagctcgagaataagctccaaaaaatattccaatttccttcttaacagcaccccaatgtgtcttgcattgcatgactgtt

SEQ ID NO: 23870 - DNA, 28390 bp, Oryza sativa
acagtgtttgttgatcaggagctgctactatgctatatatctctgcaaggtatatgtactctctctcagattaaataatctttggcacggtggcttacccttaccctgattcccacgaaacactgcttttccttgccttgagcgttttgaaagatagaacagtaattagagcaccagtcacccaatctttattcaactcttattccagaagttttcaaatgattttgcaaaagaaagctaagttcctcaaatgattcactcagtctctctaagtgtatcaaaatgaattcctcaccaattgttgcctttctgatgcctactctaaggttttaatatgtagagctcggtagggatcaaacatggcatacttgcattcacatttattactaagtcaaaaacttagactaaatatactcaagatcaagatcgtgcaatgtgtgtgtggtatatggtggaaatggtatatagaggaaaataaagaaaaagcttctcctttgtgcttactttcttctcccaaaaaaatccttcttttattgattaggagagggcatgattacatttcttttttttcaacataatgctcatgcttgatggagcataactttattttatttatttattatttttttttcataaccatgcctttccctcctttttttaaaaggatatttctttctttaggagaagaaaacacatgaaagcatggagaatttattttggtggtaatatggaaatggaatggaatattgcttagctcccagtgtaggagtttggcatgtgcatatatgtggatgtatgatcttgatcatagagcatgagaagtatctacacaagtcacaagagtttgacaaagttcagtggaatggcaagtaaccaaaatgtatatggtttaatcatgataacataattttggctctggtaggaatttatatcaaatgaggaactttcaattttatcattttgaaaaacaaaacatccgaaattcaagtcaaactagtatcaggatcatagcaactcatatttactatctcatatctcgcaacaacttagacttagatcaacaagcgcatctcatttacatcaggttcccggataattttttgctacttatatttgacctttgagagagcacctaccaagaacccatatatcagagatataaaacagagcaactatttattatttcaacaaagagaactagcttgtcttacctagcatgactcaaacctatcatatctttttggtattctctattttgcaaattttttatgctgttttcaagttttataagatacaattggaaagcaaatatgcaattggaaagggaaatatgcaatgtgatacaagttacctcagtggggggagagatatctccccccaagcttggcgtttgctcagggtccttgataaggattgaacccctgaaaacggaagtatgcttgaaggtcatcatgctattgctgcatcatgttgttgaagttggcgaactgagcatcagcagattgttgccattcttgcgtttgagctatgtgttccgtgaggttgtactggatctctctcgtctgcatatcaagggtgtccattctcctagtgatttcacccaagtcccaacgagaggaacttgagcgacattcacttggagatggaggcacaccacttgatctgggaggttgattgtccccccattggatgtcatgaggcgcatgccacaggtccacactggcacttacccaggttgagactctgatactgtgacgtggagcttgggtccatctgggtgcgtccccagttggctcccaacctacctcatacatctgcacggctgttgaggattatgaactttctcgttcgttccttgtcatgttgcacgtctccctgtatgctccacctgcatgagattcttttatgttctgcaggggaatggttagttcatggcagttgtacaaatgataccccgtatttggcaacgggatttcatttgtacaatcggggaataagtaaatcaaagatttatttactccatgtttcagaatgtgcccttgcactaaataagcctcatcaatacacggacaagcggctgagataaaagcaatttggtcgctaacgacccctagcccttttgctatccgagtaatcagagaagtgcactcaacaggagcagagaactttatactttctaaccattgccttatcatacatttcacaggagcaattttgatctttctaaccatggcaaatatgataatcaattcatctcccctaatgggcctcagatcacctctaggaaacaaggtcatagcaatccatttgtgcatgagcctaagtgtaggattatggatatcattcgttctagctttcttgcaaattggagcaccagaaatgtcttcccaaaacttatttttctcgaacccataaattcctttctggagatcgattttacaggaatcgtgaaaaccaagaagtgtacttaagcttttccatgtaagtgtgtactttttatggaaaaagcgaaaggaaattccatcttctatttctttcaaagtgcacagaaattgcaaagtaagcagacgagaaccaggctcatctaccacagcaaatctctgccaaccaacaactttccaaacagtacgaaattcaacatccatacctatctttttagcagctccggtgagtattcttgcgtgtgagcatactcccggtcgctcagcatgtagtaggcttgtctctcccgatcactgacaaagtcgaggtcggtgtcgtttaggagtcgttgcggagcttcagtgtcttccatcgagacatctgctgatgaacgagtactagactcgtcataacgacttgatgaagaaccggaccccttgaacagacgagacagtcgcctcctcattctgcacaacggagcaagaatggactaactcggcgggggttaggaatgacaagaatttcacccgccggttagtttcaccaaagcaacttgtatatatgcaactaagtgtttgaatttgagggaaactatcaaagcttgaatgaacttgagagcaaactttggagagggaatgaaaatgtgtcgaaatggggtggaattccctctctcggccggttggcttaagtagtgcacccaaaaaccgacctatggggcccactagcagttgcctcaaagaaggaggcagtcgaccgttggcctggctagttcggccgaacaagtgggttcggccgaacccacagtgggcccaagcggccccactttcggtcgttgggttccaacggtcagtgtggtcgtggcacagcgaattttcattgaaaattttattttggtttgctctgaaaaattcatttaaagaatttcctccaaattcaaaaatcctaaatgcaactttgaaattcaaacatgtgattatgcaaaaattcaaattgttgaaagcaaatatgcggatacataccaaattacctgttggcgaagatcacgtcatttaaagtccggcgtacaagactgtacctccatctagttcagttagtggattttccacccgtatcaggaggtgatggagcgggtgtctttggcttctccctccacaccttctttggttttggtgcagacggtggcttcttctaagccggcttctcttgcttcttagtcggtatgggtggttttaccggcgtcttccaataacggttcctgggcattgttgtgtccttctccaggaaattctgcatgaatttcaccaggctgtccgttttgggtggctccacttcgacctcttgaatattctgtcggttcggcccgtactttattctgaccatggagcattgttccgtcctcggttgaaactcaaaatatatggtgcaaacatcgtaacaaggtttacagtacatatttttcctcatgtgtcttggttcatctaacccatcgtgtgggtctaaaactaaaaaccgacacatataacaacttataagtgccgatctattaaaaaccgacactattagaaaaaccagaacttatatactagataaagtgtcgagccgaaccacatgcaaccgagctctcacccttatcctcttgtccccctcgcctgtctcctatcatcgctgtcacccctctctcgccatctctgtctccttggcacggcaagcggcagagctgcctcccttcacctaagccagcgaggggtagcctagaacccccaccagcctccaccagattcggttgttgcggatacttttctcgctagttgcgttgcctccacctcctcttaaccaagctagagagtgttggcctagatatccctgttagccttcgccagatccaatcaccatcgatggtggggaacgggacgctccaagcatcggctttagtttgaactgatgcatcgaactgagctaggtttatttctttcattcgtggaacctcaaaggtgtgccaattcctaaaccaacaccgaccttcttcccatcagtcctgctaatagggtcctggttgtgaaattcggcacctaagtaggattcccaaccagcagccatcgggtgagttacactgcaactacaatgtaattacattgtaactaacaatataagtacattataactatattgtaacctctatagaacttatttatgaagttacataaaattctttaatacttgtatatatacaggttatataaaagttataatgcaattacagtatagttacagtataattatattaccattataatataatagcatttgaaacatttccactaaaagacttgtggttgtttttttagatagtctcttcaaattattcgtggtaatctattgacaccaaatttaacttcaatatatggaaaaatttgctacaggacattgttcttcctatctttattcccattcttcttccttgcagcagagcagaggcgcgacggcgggtggcctgagccgggacggctcggccacggcggggcggaggcgggggcggccacggcggggcggcggcgggaagatgacgaagctggccgctgccgccgtcgagctcccgccgctcgccgatgtctccgccttctctacgacgacgtcggtggctcgcctcgccttgcgtgacaccacgcaaaccaccacgaccatggacaccagcagcgcggcggcgacggagagcatcacggcgagcaccagcctcggccagctttgtcatctacccaccgttgccccaccgccgccccaccgtggccgagccgtccaggctcgggccagccgccggcctcgatatggagcaaggacatgacgttctcctttggcaacatcctggcggcgatagagcacttcaacgacgcgtactgcatcggcaaggggagcttcgggactgtgtaccgcgccgacctcgacggcgggcgcgtcgtcgccgtgaagcggctcgacgcgtcggagaccggcgacgcgtgctgcggcagttgatgccggtgagcgtcatgacgtagaacgtcggcaccgaggggatgcggcgcatcagtgtgaacgagaagccggccgccgtgttgctgctgttgggcgcaccgagggccatgaaaagcgtcgcgttgctgtcgaacaagaagaacagagaaagagaggaagaagaatagagaaagagagattgacaagtgggcccatgggcaaacttgtctttaaccaaagtttctctctccgttttcatcaaaaataataaaatattgggaggagtgtccagcagctaattaccacttttttacagtgtccacgagcaaatacacgatcttcgagtgtctcacagtaaagaccacaatctttgagtgtcctgtagcaaattttgcctcaatatattcatggtagtatgtcacacctggagttttcccctttcccatagttccaattcaccaataaatcgtctaaagaaattactttggttaacaaggagaaaatcaaaattaacaatgtatttaacaacctgaattgtcagggagaattttttttgaattctctttgctttaaaatcactaacaggacttaaagaggaagttaaagagcatcggagttaatgtggttaattaaaaatttgtcaagttttgaagtaataatagtttttccccgcctttggtcgtgaatcgtgcccgattcactcccctctctgtccacggtttcgttttgcatggttcgccatgtccgttatcgttcgcgggaccgttttcgttcttttcctaaaacgacaccgcatttgttttcctttttgggaaagtcctaatcctattctccttctccaatttttttcctcccctccccctctcccactcggccgccgcccctccacctcggccgcgcgtgcctcccctctgccataccgagtcggtctcctctccctctcccctgccgactcccctcctctcccctccggccccacctattttatctccacccctatataagccaccataccccttcgtttttccctgttcttcattttgttggagtcctagctctagccgccagccacctcctgtagccgccgcctccccattgtcgccgtcgtcgcccttgcatcactggtaatccgtttcaccatctccgtgtcatggctatcgccattacctatccatttcttatttgttttcgtcctaggttttgatccaacgtcgttgtcgccttcgcgtgttgccgttggaccatcgtcgtcgtttccttctcgccgatcgcctcagtttggtgaggaacctatccgtaattctctgttttaggtgttgtttctttttagcgtcattgtggaaaccgtagttgtttagcccgagccgccgctgccgtccgtgccctggcgctgtcgtcgccttgccgccgctgccgcgccacctcctgttgccacgccgccgccttagccgccgccgtcgctgccgctagccgatcccaagccgagccgagccgccgccgccgttgttctaggcgccgccgccactctcccgcgtcgccgtcgtagtttgccgttgtgtcgtagctcggtagccgaatagcaaagccttaggtgcagccctaaactcataccggcctatcgtttgccgtaccgagtctctaccgtaaactgtgtctagttttttgttgtcattccaagccgccgattccgttcgccggttcggttgaccgttgggatggccccatggcacgataagttgactcgttgagtcactaattcttgaggctttcttaccggaggtataattccattgatctatttatctatgggcaataatgtgtaataattgactaaggttttttcggttattagtaataacgcagctcatcttttaaaattcagaacttaataatccgagctccgttttaatccattcaaattgcagtgaatccgttaaaaagtatagaatccattaaaatttgtttattttgctatttcagtagacttattgcttgtatcacctgtgtgctttgtttgtcgtttagattccgtcagttccggtgatccagtttatttcgaagtggttgccgaggttcagtcagctcaagagcaaggcaagtcatacatacatcattgattatattgagcctattttacaaaatcccctgctttctattaaaattgcattgttttagaatgtcatgtggtatggatgccttttattctcagcctgatgaatatcttgtgcctttgataacttgggttatatttgatttattataatttagtccttaattactttatgtacaccaccatggttatggtttaattaaattaaaatttgctttaatggtgggtcgtgggtacatgcatgattttctggaagtcgtgcccatgacaattaaggaccggtttctcgggaatccctagaagatatactcgtactcaccacaggccagatgagctccaggctaaatctagagtataacttaaactagataacataccatggcaagggtagaggcgatggtgcagttcagacctggattttggtctctactatagccagatttacctaggcacgagaggggactgcccgacttcgaataaggagggggtgaaacctgaggtgcatatgttcggttagggagggttatatgacgggttttgtcacgatttccccctttgcagtatctcggtggtacttcggggcatggtaacatgtatggaatcgtgtctagtgggtaaagttgtgcacctctgatcagagtaaaactattcgaatagccgtgcccgcggttattgggcggtcaaccagctcaccgtgattagtcccactataacaatttgacttatagaactggtgtagtttaggtggttttggttggccctgttgcgacgtgatttagcgttggacagtgatgatgttaatactccttaattacttatattgtttttacttctttcaaatcatgctttataaatgctgattttactgcaaactatcctatgagccattcatttgaatatccttgcatcataccttccccttggtatggcttgttgagtacagtggttggtacttagtcttgctttttttcccccaccccaggagcagaagttggttcagatggtgagttctctgaggattgagcttgttctggacatcgaggattgtatggagaaagcttcgctttggtcgtgaagattaagtttatttctttagttctttagattaaataaaaaaatgagggttataaatttattttgttattttttaagtcgtggaactgtatcaaattgtcgtttgtgtaccctgactggtcttggatagggatttaatacacatcctgcttgagattcgggttgtcgaatttctgggcgtgacatagcataaactgatatatgcaattatgcattgaacatgcatgatacatataattatttactacgtacatacatatgtggcattagaatacacatattgaaattacgcagttgggtatgaaggctccatggcaagcccacacatgcccctcttgtcggaaatgtctttctccattctcaggaagccattctcaccccatgttgtgccccaggagttcttcagcaaccaatattgtgtgccatcaccgtccttgccatagccaatggctacaatcccatggtctaagtcagtgccgcatgagccggtcatcacgccaccagagtagaactggaatgtcatgtcgcctccatccacggcaacagaaacaggttggtttgccacggccttcatgagtgcggcctcattgttagctggcacatcctcgtagcccttgattgttgcggcgctgttggatccaccattgcacttgccgtctgccgctgtgtatgggtacttagactcagtggtgaggccaccattcttgatgatgaatttgaaggcatcatccatgagccctccctcgcagccctgatcctcgccatgaacatcgcagtcaacaagctcttgctcagagagggagataagcttgcccgtgctcaacttgacaataccctccatggctgccacggccgaaaatgcccagcaacaacctacaataattattcatgtttacactttcgattcaatacattttacagatgatttgtaaaatgttgcagtggcaaagtggcttgaattttcttaccacactggccttggtccttgatgggtgtgacagcgcccttggttctccagtccacggttgctggaagcgtgtcaatgctaacattctcatacctgaatgtggtaggaaccctaaccgtgctaggaatgaatcccttgttggtcttcgtcgcccggaactcatagttggtgaggtcagcgaactggttaacgccgagccaaaacttgtggttgcctgcattgaacgactcgatgaatgcgacgttggctttgaatatctcaaatcgacgtgccttctcagtagcatccttgtacacccgcccatactgttccatccacctctcgtgcctcgccaccatggctgcgtggtcgctctgctcgcgagctgctagaacagcgctgcagaggcagaggcagctgaggatggcaaagagcagagccttggggatggccatggttgatcagactttgtcagtggttgctcactactgcttctgatctgtactcgtttggttgatggctttgggttgtgaagtggatatagcatggcatgggttaatatactagcttaggagagcttagattaagtaattaatttgtacatcccgtgcttgtgtgatgttgtagacagggatgtctgcgtagcagagaagttactctgtatgtaagctcgtcagtgaacgtacgctagcttcgtagtaagataatgtacgctttgctcaccatgttcacacttactaattactgatgatctcgtcgagcaaatgctaatacaatgaaattctgaacatagatacagtaatgttagagctgtttcccttattttatatctgtactagatcctcatgcatgtgacttatttattttataacagttacagtattggtatgaaaccggattgcatatctgaaatgttgtgaaaagatttcatcttcatcatgattcgtaaaacaagagttcctcatgtctcatggtagtgtcttttgcaatttacatgttaatctttattcccattacttggagttaacattatttttagtacggatatttaattacctagtttatgttatttcctatttgggttctacagcttgaatttacaaaattttagagacaagtttcacttgatttggactttatttgaattacctatgagttttcaaattttaattcatatttctcttcacagaaataatctctcaagtcattttaaactaattttccgaaattacccttctgggagacgttagaatcactgacagcaggggtctacgggttaatattcctatttgaaattattttctctaaggaaaagggcatgtggtattgacatgtggggccggggttatagttgaccatgccatggtggccatagagaccacacgtcagtgacaccatatcttaaacaagattttaatcagtttcttccacgggtatgggcccacatgtcatcgactgattagagagggattcgaggagggcttattgttgtggattagggaaggtgggaccggggtagcgctactggagaaaccatctttggtcggttggccaaatttcacaatagtccgggttgtattaaacaccgggactaaagagcatttttagtcccggttcaaaagagggcaggtagtggacccctatattttctttagtttcggttgtccaaccgggactaaatatctatttgggttgtttcttttttttttgaaaatttgttattcggatctgagatgtatttgatttgtgtgtgatgtgaatacgtgatatatttgtgatgaattttgtagaacatgtgatgtaatttttttaagattttgtgatgtatttggagatgatcgatttgaggatttggaggtgataattgatttgagattttacgattcggggatgattgatttgggattcggggatggggtgaaatcaatatattaaaaacaatgaagaaaagaaaaaaaataaaggagcaaccagatctagcccggctccatctttaatcccggttggtggtaccaaccgggactaaaagggctccatctttagtcccggttggtgttaaaaatgaatttttactcctggttatttcaccctggactaaagatagcaatctttagtcccggattcatagtctcggttggaaaaccggaactacagggggttaccaaccgggagtaaaaaccacttctccatcagtgtaggcccacatgtcggtccaaggaaacgcaaaattttatcccctttctcttctttcattccagcgggcgatcgcgatggcaaagcgacctatagtagtgatgattctccagcggattggaggaggtgaggtggccggcgctgggagtgctcaccatgcagcggccgcatagcggaggaaccgggctcggggaagaagtggtagcatctggctccagcgtcaggcggcgccttctcctccaagaagagaaaaaccaagtagctagatttgtttgcaaaaattgtatttaatttgcgtttatgcatgaattatggaagtattatgtaagctactctatgtgtaatgtgtttgaatagttatgatatgaactttattgatgtgcggaatatatcatgtgcacacaagatttacacattgtgcataccaactaacaaatgtcacaataaaacttagaaaataatattgtactatgtacttacaataatattacacttatgtgtaatgttttcacccccaaattcattatattttacccataacgaaaaagaaaaaattctgacagttttgaagtacaaatatgtcataatttgatattttttgtctctccctatacaattaatttaaagatgatactttacacggaattgtgtaaattgcacccacgatacaacaacttggcaggtgggtgcgatatagtgcaagaacttgagaattgaacgtccgagtgcaacaacttgataagtatgtgtgttctagtataagaacttgacaatttagtattttggtgcatcaacttggctaagcatatgctatgtgagtttttttcacgatgtaaatatgccattacacagtattcctacagatattaccttataatattgaatttaatctttaagaattatactgcacacacaatttacatccaattacctttaagatttttttattttcttcaccttctcaaatatcaaccgaaatataataatttctacatccagtttaattgactttaagttattagtaattaggataaaaaaatataaatatgcttatacaaatccgcgctagtatattgtcaaaataagtacttaaaaaattgaatttatataaaaaaatgctccaaataattaagttgtcatgtactttcttaatttattgtatcaaaatcgtacctaccttacaggttgttgcatttatactaaattgcaccttcctgccaagttgttgtactagaacgctcatttctcaatttattgtaccaaattgcacccacctgctaagttgttgcaccgtgggtgcaatttactcttgtaataatattaatagaaaaattttaaatattttttggttggtatgtgcagtgtgtacacaaaaagacttgtgtgtgttagtatgtggatgtggatgttgtatgtggaatttttgtgatggtatgatttgtatgggaaattggtaggtcctgtaatttttttttcttgccagcatcttggtgcaggtttttattttttcaaaggaaggtgcgggttttaattacaaaccggcacgtatattctttgccacgtgtgtaggtcagtcaacaacctgcacctatatgctatttatgtacaggtgccggttgttttaaagaaccggcatctatatggatagcaacgtggcacgttagtttagaaccgacacctataatgccatatatgtgttagttcttacctaaaatccaacacctatatgtcttataggtgcctgttctacatccatattctaaactatagctggttcccaaccaaagtcatcagtgtgctaggtactggttgagaaatctggctcctatgactagttcccaagcaacacctaacatgttttctctagtattgtggtttgatttgattgactaatgttataattgcttgctatttaatcagtcactgaacctaatcagcaacagaaaaatcttcattcggctaattgctcaattaataaccgagttaaaccaactagccagtcgctcgtgcggtgcgactggatcaagtatacgactttgggttatttgccgtagctcaactccattaacttggaagaaaacggggagaaaataaaaccacttttaaggataatggttggggcatgtactgcaattttagggtcaacataccccactaccaatgttttctatcattacatagtgagagttaagattgtattcaaggtggcacaacggtctagtaatgtatttttgaagaatatggctaatgcaatgttagagaaatttgataaatattgggacagcacaaacaatatcatggttattgctacagtccttgatcaaaatgagatacattaaattgttcttcggaaaaaattatgactgcataagagctagcatacagcttgatgccatcactggtgagttggataagctatgaaagacattcgagaagatctatcgccagaaagtaggtgacaataacccacacgatgctcattcagcctcatcttggaaggatgcatgcaactctttggcttctattgttccaagtggattccagtcctctttgcaatctaatgctactgaatcttcaaagtatgaataactcatctatgttgatgaagcaactgtgcccatagataataatgcattcaacttacttggttattggaaggtaaatgctcataggtctcctgttttgtcgagtatggcaacgaatttcttttttttggctattcaagctagcagtgttttatcacagttcacttttagcactggacgtagagttatcgatgactatatgagttcaggcattggtttgtgctcaagttggataagagaccctcaaaatgagaatagttatccaaatacttgtggtttgtgtcgacgggtgatacccgtagaccggatatagagggtattggggtacgctggtacaaggatctacgtagtacgacatcgagcaatcaaaagacaagaattttactggttcaggccccttgataggtaatagccctaatccagttgacatgggattatatggtggaaaacacaggttacaaaggaaaagatggaactcggggggtttggcgagattgtagtcgagttgattcgactagctctcgtcgacttggctcctcgcaggctccggcttcgtaggctgtgtgggttgtgttggctctgagattcgatgatccatggcctccccggggggttccttttatatcgcaggtctgatgctctccgagtaggactcgaatatactagacctggcacgacacgtaggtaacccaattcttgtccgagaaggactctcctcatcaatcgatttcacgaaaggtttcctttaatcacaaaggaaatatccacgtacgcatagatatgccatgtcgttacgtgacgtacaccgaagggtagagggtatgcctgacccgtaaccctgacagtagcccccgacttctgctcaacaatgaactcgtacgaccattcgcgacttcaggtgtcgagaacgttgtcattccaggtgcgagaaccacggagatgatgtgtagtcgagcataccatttgaacccaacggtcacgagtgaattttgaactgaagtcaaaaaactgccacacgtaacggacctagaaatttccagcggggatttctctccgttccttggaattcgcaccatcgggagtgcggttatttaaagggattttgggtgcgcgttttgaagtccgcccactttgtcaagcacacactgctcattaacgctcctcgccttcttcgctgtcgcaaaaaaccctagcttcgtcagttttcgttcatctccggcgatcttccagcgacgatggatcttggcaagtcggcttccaccagcgcaaccctgaagaagctccaagaggatggcgcccttcctggccgtgaaaaggcagagagggaagcaggaggtactaatccacagcccctcttaggtcgcatggttgcgatcgaagactatgttgtctgcgggtttcttcctcccccctctgaattccttctgctagtctttaatttctatgggctttcacttctgcacttgaaccccaactccattgctttccttagtgtctttgtgcatctttatgaggcctacattggggtagagccctttcttgacctgttccgcttctactacgagttgcgctggatggaatccaatagggtgtctggatgcgtcgggttccgacttcgtgacggaatgaagtcgcggtatgtccccttccagtgtccctcttctcgcagtaaatggcggaacaggtggttttatcttgaggtcaaggattcggatccagtccttgttgttcccgaggagcaaccggacaaaattccggtttggaccgccaagccccctttgaccccctctctcgaatcgtttatcgacatcatcgatgatctccgagaacggggcttatcgggatatgaagtcgttgcagacttcgtcgggaggcgaatccagccgctccaggctcgggcccacccggcttataactattccggggcagatgacgcgacccgggtttctcctcggggtatccttctcgcattcattttgatatgcttgtactcacattccttttcgacttatcaaaaattgattctttcttgacaggtctgagcggcgaagtcgtgggacggcgcgtgagtcaagtaatgatcagcggcccgacaacagcgagcgacatccccgcgcccctttgtgaaagggaagcagcggagcgcgacgaggcaatcaatgtgagttcatttgataagcgtccgcctcccttgcacaaaatcggcttatgacatgatttagcgtaggcccttcctttgactgatgtcatcggtccgctcgcggatcatcaggtggcggcgtctctgaaggagaaggtcatccaggaggcgtccgatgctgccaccactagtggtggcaaagctccgactaagacgaggaaattctcatctgtactcggaaatcgccgcaaggcagaaactcccttggtaatttcctccttgtcattaggttgtgtagcgaggaaagtttgttctcactctttatcggttgtcttgtaggcttccgacgtgtctcctccgcccgcgcgacgtcagcgtattgtgacgatccgcgagaagtaagtgaagaatttttagactctcatatcttctgtttgagcggagttttgattcatggcggttaacagggaggcgcggtcgaaagctgctcggggcaagtctggggaaacgtccggcgcgtcccctgtcacggcgtcaacagatgttgtgcccgtggtcgggagtcgggaggcgacaccgaacggccccgtgggagatcccgtcgagggctgcggtctgtcagaggccgtcctcacctgggaggagcgccacgtcgagatgaggcgccttctcaaagccggtgcttgcggcgtggggcgcgaggtctcggaggcgagggcggagacggcggcggccaatgcgcgtgcggagctcttggtgcgggaactggctgaagcccgcgaggacctcacgaagatgagggagctggtggccggcaacgagcgccagcgcaaagggctcgaggaccgcatgtcggaactcggggataacctctccgagatccgtggttcgctgcgggtcacctacaccggtctccaccaacttgctgaggagtgcggcgtcaagtcctcgatcccggcgaaccccgacgagttctcgttgacctcttctcttgcggagctggcgacggcgatgggggaaatcccctccaggcacgtggccaggatcgcggaggagacgtccaacggtatctataccggggcgtgtcacgtcctcgcatgcgtgaagttgtcgtgtcctgaactcgatctgcgcgagatcttggatcagggagcggcaagcgacgcgcgcaaggaggtgatggaggaagtcggtgacctgggggagtatgtcctccccctttttgaagagtaggatctcttgtatattttttttctgacttgtaaatcttaaactctggttgccttcgtgcgcatgattaccatctttgttcaccgttgatctcggaaatctctcttatcgactgtagagatgctgatgacgaggatgtccggcaacgtgggcagcctgagtcactggcgataattccggtactcgagtttgaactgcacgcctcacatgacgtcgaggaccaaactcctgatgcggaggttgaagtgacgacaactgcctcaagtgagtagcctatcaaccttatcgttgttttgggggtttccgggttgtcttagtggtcgttacgtttagcagatctcgaggatgcccttgcgacccaaaatcgtcgtatccaatactggaagacgaaatttgaagtggcggaactcgagagagcaatgctagccgtaaagaatgagaaagctgtggaaacgctccgaggccgcgaggtgtggttctcgtcttacttgcagagttgctgcaccacgatggctagggtgtgccgggagttcgggtagtccgcggtgatcctaaggaatcggcggccgggtacatctcgtggctcaacggggcctgtgcccaactcaatggcattggcaagcgaatcgacgaggccttgaagcaagagtgtcgtcgagcgagccgatatgccggaggacacatgctggcttgcctgcgagatcaccgcccgcgcttggatctcgaatttttacgtgaaggttttttacattctcggaggaacccggcggagatagatcaccttgcgaggtcgatgtcgccgttggccgagaagattttccaatcaatggactggcgttggccgtcttggtaatgtttgtatcctgcgaccaaatattttaggggaagatgtaatgcagcgaaatatctatgtataaactgtaaggaatgttttgtgaataaagaaattaatctttaacaaatgttttcttactctggatgttgtgcataagagtgtgttctcagttaacgactttggttagccgtttgagtcgtacactctccctagcccccagccttgtcgtcggagggatttcctcaggtggcaaggctcttagacccttggcatgtcttggttgaataagctctgatcctagcccccagtcgtgaaggtggaaagctcggttttcgattacacggcttggttaatacgcacggcgagaactcttacacgaccagatctgacatggtcttttgtctctgaaggatctgataaggccttatcggctctgggcgtccctagccgaagatcccttaggttcctcggaggccttgtcgagacggcgtaaagggacataaggacaggtttcaacgctaggtgtcgtcagagtaaggggtcattgggtgaaaacactttggtcgtcatatgagaccaaggaataggctttattgatactgtaagggtgcttacaggtatagcggtattgactcatacatagaatttacgtagttggtcaatgttccacgaatttgctagttcgcgaccgtcgccgtcggcgattttgaatgcgcctggccgcaagacttgtgtgatcgtgttgggtccttcccattttggtgagagtttgtttcgccccgcttgagtttgaactcgcctgaggacatagtcgccgatcgaaagtatgcgtgctcggatgcgcttctcatgataacggcggagggcttgttgatagctagctgctcggacggcaactcgctcacgatgctcctcgagaaggtttacatcgatatctcgctgattctcctggttctcgtcggaatgcttctgtactcgtgtgctttgatgccgtaactcgtcggggagcatggcttcagaaccgtacacgaggaagaagggtgtttccttattggacgttgtcggtgtagtgcgcacggcccatagtactgatgggagttcttcaacccattttttgtcgtgtgacatgagtctgtcgtagacgcgggttttaatcccttgtagtactatgccgttcgccctttcggcttgtccattgctttgagggtgagagaccgaggcgaaacatattttgactcccaagccgatgcagtaatcctggaaatcggcgctgatgaattgagagccgttgtcggttatgatgcggtgcggtagtccgtatctgcaaaatatccctctgacgaacttgatggcgttatcggccttgatttccccggtgggtactgcttcgatccacttggtgaacttgttgatcgccacaaataggaatctgtagccgccctgtcctcgtgggaatggaccaagtatgtctagcccccagcatgagaacggccaagtcagagggatagtctggagcgcttgtgcaggcagctttttgtgcttgctgtggaattgacaggcttcacatcgctggaccatgtcgcatgcatctttaagggctgttggccagaagaacccttgtcgaaaggctttgccgaccaatgttcgaccggcggcatgtgacccgcatatgccttcatgtatgtcgaggaggagttgtttgccgtcgtcggtagagacgcatttgagaaatatcccatttggcgctttttttgtataaatcgttgccgatcatacagtaaatctttgctttgcgggttattttctcagcctctgtatcgtcttcgggtaactcctcgctgccgatgaatttgattaatgggctgcgccagtcgtctgtagtttcgatgtcagcaacttcgcattctgcctcagtgacctctgagctgatgtcgggggtgctcgggccaacttcgccgctaacttctttcaccgatggctttgtcagaacgtcgagaaaagtgccgggctcgagcggctctcgtctggatgcgcgtcgtgctaggtcatctggctcgacgttgtccttgcggtagacgtgccgaacctcgatcccatcgaacctcctctctagctttctgacttctgagagatacttggataactcggggttggagcatttgtagtctttgtgcacctggtttgcgactagctcagagtcccctttgatgattagtcgcttggccccaagtgcggctgcagctcgtatcccggcgagtagtccttcgtattctgcagtgttattggttgccctgaagttgaggtggatcgcgtgtttgaattgatctccagaaggagatgttaagataaatcctgcccctgctccttggctgttgagtgcgccatcgaacgccattgtccatgtctcattttcgccttggctgtctgacttgttatctggtatggtccaatcggccacgaagtcggcaagcacatgagatttgatggctgtttgcggcacaaagtggatatcaaattggcttagctcgactacccattttgcgatgcggccgacaacgtctttgtttctcacaacttcgccgagtgggaaggaggagacaactgtgactctgtgggcttgaaagtagtggcgtagcttccttgatgtcatgattactgcgtagagcagtttttgaatctatggatatcttgtctttgcgtcatggagagcttcgctgacgtaataaactggtcgctgcactttctctctctcaacgacaatgacggtgctaacggaatatggcgtagcggcaatataaaggaataattcttcattaggttggggagcaacgagtacagggggttttgataggtagcgcttgagtgcaataaatgcctcctcagcttcctgtgtccatacgaatttgtcttgtttcttcagcaaggcgaagaaaggctgtcctcgttctcccatcctggcgacgaatctgcttaatgctgccatacatccggttagcttctgtacctccttaagtcttgtgggcgacttcatgttctcaattgctttgatcttctcgggattcgcctctattcctctgccagaaacgaggaatccgagtaacttgcccgacggtactccgaacgtgcacttctctgggttgagcatgaggcgatatcgtcgggggttgtcgaacgtttcccgcaggtcatcgatcaatgagtcgcttgtcttggttttgacaacgatatcgtcgacataagcctcgacattgttgccaagctggttgctaagtgcgccctggaccgtgcgctggaaggtattcccggcggttatcagtccgaaaggcatcttaacgtaacaaaataccccgaatggcgtgatgaacactgttttctcctcgtcctctttcaccatactgatttggtggtaaccggagtaagcgtcgaggaagcttaaaagctcgcatccggctgttgaatccaccaactggtctattcaagggagaggaaagtgatccttggggcaggccttgttgaggtctgtgaagtcgacacacattctccattttccgttggccttccgcaccatgactgggttggctagccactctggatgaagtacttctctgatgaagccggctttgagaagtttgtcgagctcttctcgtatggcttgttttcaatctggtgcaaatctccgcagtctttgctttactggcttggcatcaggtcgcaccattagtttgtgctcaatcacctccctggggacccccggcatgtcggacggctgccaagcgaacacatcggcattatcgcggaggaaggtgatgagcgcgagttcctatttctcatctagtgtaaccccgattttgacagtcttgtcggggttagcaataaagagtggaacgatcttgatggcgcggtctggcttcggcgtcttgtttagcttgctcactttcttgggtggctcaaacgtggcgggtggggtgggcatttgctcgaccatgtcgaggctccgcttgtcgcactgcaccgccagttttgcgttcccttgaatagtgattgttcccttcggtcccggtatcttgagcacttgatatgcgtagtgggatgcggccatgaacttcgcaagtgcagttctcccgatgatggcgctgtaagctgtatcgaattcagcgacatcgaaggtgatctactctgttcagaagttgttggcttggccgaaggtcacaggcaacgtaatcttgcccaaaggtctggacgatgattgcggagtaattccatggaagggctgagtggttggtgtcaactcactctgcggaactcccattgcatccagagtgctggcaaagaggaggttgatcgagctgcctccgttgatgagaacccttgctaccttgacgttccgaatggtgggtttgaccacgatcggataccgtcctgggataacagaggtctttgggtggtcttctgccgagaactctattctctgctcagaccacttcatcttgggtgcagccccctgccaagtcgaacagacttcgcgttccactttcttgtattctcacttggaggaatacgttgtggagccaccgaagatgtgtgagacatggaggtcggagtctgggtacgcagaatctgattcgtgaggaggtgactcctcgttcttctcgacaacacgtacccgcttgcctttttcaaacgccatgtgcttctcgagcgactttttaaaaacaaggcaatcctccagagaatgtctgtccgttttgtgtatagggcaccatgatttttttgtatcgctgccttgtgggtctgggcgcttgggagggttcgcgtactctgctgcgaggacttccgcttgagcttttctcttcccgtttttgtgatttttcttcttgcttgactcagatgcgtctgcggttggtttcttctctcccccggtcttcggcttgtcgttcttgcgtcttagcgcgtcatccacgtgggcgcaccgctcaacgatctcgaataacctttgagtagttgtgatgcgtcttgttgccaacacctgggtagtgtagtgatctctgacaccggacttgaaggcgcaaattacagaagcatcggtaatctcgggaattgtgtttctgcactcgttgaagcgtcgaacgtatcccctcaatgattcccccgagttatgtgttaacgcgtgtaagtcgtcttcgatcgcgtggcgcttgtttgttccttggaaattggcgacgaactgttgccataggtctgaccacgaagagattgagtaggaggggagatgcatcagccacgaacgtgcagaacccttccacgcggttggtaaatagttcgccaacgcattgtcatctgctccggcagcataaagcactgtcgagtagacttgaaggaattcttctgggtcggtgctcccatcatacttttcaatagctccgggtcggaatctctcaggccatcggacatcacgtagggaacgacttaaagccctacacccagcactgggagcggtgggttgtcggtggtcgcgtgaccttctggatgtctgtctgacgatgaagaggacgcggatgatgatgatgatgacgatgggtcgcttggttccggcgtacgattacgaggatgacgacctggatctcgggaatcctgtcgtcgtctctcgctgttgtcttgtcacatcttgatttttgtttcaggatttataaattatttaataaattaataatataatttatattaaatgttctttaatttacaagtgaagttaaatgtgggaaataaaatttcttaaatctaaagcatggatggatttaatttttattaaattctccatgattaagtcaactctctgaaatattctcggatttttcggagctcaattcctaaatgatacaaagaacagttcagtaattatttgatcattaatgatctaatgatatttgttaagagcttttcttgtttaaaatccttaaattataaattgttgtttaaaaggaataattagaaaagatcttaaaagcctaaaagagaagatctaattttaatttgctaaatctcaacataaaattgggctagataaaatttcattaaatactttgcttaattctataattcctagatttttctgggatttatttgagctaaggaagtatttttaataaatggaattgcatttcatgaataatttaaattgaaaaaggtttttaaaagtcttcttttggctttgggccgaaagtcggcccaaaaccgctccctctctctcctcggcccagtccggcccagtccgctgagccgccgctcttctctctcggtgtcgctgacaggcgggacccacctgtcagggtcgtcgtcctcctcgcgccgccgccgccgcccgaaaccctagcgcaagccgccgccgtctccttccaaattcggccgatcctttccttctccggccgaatcttttgaggggaaatgatctcctcgatctcctcttccttttctcttatagaaactccggtcaatttcgtttggaaatcgacggacttgagttcgattcggatcgatctctctcctccgaacccttgctttcctccgccgtcgctgaagaccgccggagcaccgtcgccgccgtcgacccgatcttctccggcgctttttcctcgtcgccggcgccgtccgttgcttctccgccgcttctttggtcaccggtgagttcgccgcgtcgcgctctacgtcctggtgctcttcgtttgcgccgccgcgccgtcgttcaccggcgagcatgcgttgccgagccaccgccggtgctgacgtcatcgctgacgtcgttgctgacgtcatcgtcgccgtctgccgtgagccggtcgtggaccaatcgatctcggccgtccgttttggatagggtcgatctcggccgttcgtttccgtgagccgccgccgtgcgcccagttcaccgtgaacccgacccgctgacgcaataatcctcttttccttttcaaaaataattcattattgcgtcataattccattaaaatccatataagtgttttaatccgatttaatctttgaaaattcataactaattcactgtaactcagtttaatgtggttcaagttgcaaaaaattatataaaataaagatctacatattaaaattgtccataaattgaattaaatttatttaattctttttaaatgggctttaattagatttaatcttgtaaaattcgtaataaattcatatgaagtcagaatgaggccgttcaagtctcataattcatctaaaattatgatctacatgtttgtttacttttcatgtattgtttatttggtttttattagtctttttcttcgttttgcgtgttagcttgtcgtttccgtcgttgcgaaggttcgcgagtgcgccggaagtattcaagaagattaattgaagaccgattattgcaaggcaagtcacacagatcctaaacacaatcctttgagcatgttgatcctatatttaaattctctatttatttcaactgtgcatttattttcgaatgtcactgggtggtgtgaacctattcctttgttatggcctgtttacattgattactttattccttgataccttgggtgattataacttgactagttgagctatatatattggttcagctagatattagatatgattgcttagccatgcttagaaacattagcacactattgggataacttatgactcattatttaaggatggtttaatggtagctcatgatggtcaatcgtgattggttaattaattacttgccaactaaaacttgataatggtgggttgtgagcacatggttttgagagtcgtgctcatgacaattaaggaccggttcgcgagctactgttgtgaaacattaaccgtgccaaccacaagccagcgtgggcaacggctttaccttttgtataacatggttcattgcggagcaccagactgagaagtggcggagataagcccacgggggtcgctggggagtccatgcctctggtttttgagggggtgattatgatccaggaatggtgcgctgcggtggattgtgttatgcaaggggtactgtcacagcccctttccgaggtaccgtggtggtactgaggcacatggtgacatgatgtggggctgtgtcttgtgggtacagtggtacacctctggccagagtaaaactattcgaatagccgtgcccgcggttatgggcgagttgagcaatgtttttcgtgattagtcccacacctctcacaataattatagatgttatacctggtaataatttgcttagctcctggtttggagattagatctgtacagccaggtatggttgcttcagaatggttgggcctgagcagcatgggcgtgttgttcagtgttgattaaaatttctgattaattactccactgttttacttctcttaaatgttttgctaaatgctgcttttgcaaatgagcctatattatgccatcctttggtatccttgtgcacttgcatatttgctgtgtggcttgctgagtatgtcatatgctcaccttgcaataatcaatcaacctcagttgaagaataaagatcccgaaggagaagacgtttggcttataccccagttgagctgcctgtgggagtggagccggagcttcgctagattttattttccgctgcagttttcttcttggtgaggactaagtgcctcataagtaagtatttatcattttagttaatttgatgaatctgcatactaaattgtcagtttgtgtacctcggctgattcctggacgaggattatatgcacaaataagttcggaaattactagtgaatttctgggcgtgacatgtctcgacgccgatctccttcatcgtcgtcgttgcggcgacggccatgaccagtgttgtctggcccccgccggtcgcgatcgtcgtagtctcggtcctcgtttggacgatttcctcgatcatggcgtcgtgaggagacatgacgccgggaacggtttgcgtcatcccgtgtgcgtcgtgcttctcggcgaccgttgatttgatctcgaagatcgccagtgccacgaggtggaggggtagcttgttggggtgattccctccgttccggattttcaccattggcgtcgccgactggcgatcgattttgttgtgctgcggtggcggcttcttcgaacgcattgctaaggtcagtcaccgatgcccgtaatcgttccgtccaacgctcgaggtcgttgttcagaacgggatcgtaaggtgtttccctcagtatggcttgaacaaccctgatgtgctgggctggagtagtcgattgattcgccgtctccgcattggcttgtgctgacgtgccaacttcatcgatagccaataccttccgcgccgcgcctgacgtcgatgacccatagtcttcgaggagatgtaagacagatggttcgtggggatcgagatcgattaccccaacgaatcgatctgaggccggagtcgctccttgttccttgccgttatccctgacggggacgtatgacttaggagacggagttttcatggcgccgaggagaactttgcagcttgagaggtcgtgattctttgtcttatggataggacaatagtcgtcccgagttggagaagtacgctgaattccacgttctttgcaggcgcgaatttcagcacggacattgatgaatacccagcaatcttgaaaggtatgtttcttggttttgtggataggacaccaagacctggtagcttcggaagttatccttatcggcccgcgattcatgtcagaaggacaaagcttggccacatcagaatccttcacgagtttggacgtagtcggcaatccgttctccgtttcaacgggtggatttttcgacatggaggcgtcttggttcg

SEQ ID NO: 23871 - DNA, 4711 bp, Oryza sativa
ttatatggtggaaaacacaggttacaaaggaaaagatggaactcggggggtttggcgagattgtagtcgagttgattcgactagctctcgtcgatttggctcctcgcaggctccggcttcgtaggctgtgtgggttgtgttggctctgagattcgatgatccatggcctccccagggggtcccttttatatcgcaggtctgatgctctccgagtaggactcgaatatactagacctggcacgacacgtaggtaacccaattcttgtccgagaaggactctcctcatcaatcgatttcacgaaaggtttcctttaatcacaaaggaaatatccgcgtacgcatagatataccatgtcgttacgtgacgtacaccgaagggtagtgggtatgcctgacccgtaaccctgacagtatgtattgctcatttggattgttttcgaatcagttttgtttttcttatgcatttgtatttgtgtacttgtatttagtgcaccaatgctaattattaaactcttttttcaaggggaagatgatgaagatgacactgagtttgtggagtttccacatggtgtggtggcgagcaacttgtaattctttgatggtcttgatgttgaggaggatggtgttgccttgatgctgcttgatagaagaaaggagaattgcttgcgtattttggtgctgatgttggcaatttggcacgaacttttgtgattctgtgaattgtgatggtttgatggacatgaaggactggattgtaatagtaatatttaatctaagctagttgcattgcatggcatagtagcatttttgcatatttgcacggacgatatggacatgttactatcatattatgtcaactatggagtatggatagatggacttatccgttgaagttttccccgttgcatatttgcatggatgatggattgatggacatgtaaataatcatgatcttcatcccctaacttgctggacatgcaatatgggcacgaatgttgatatggctcgtgacctaaaagccagcttgaactggctgtcgagctgagccgagccagcctcctagcacgttactataacgagacgagctgagccaactcggtatgctaacgagctagctaggctgagcccaaccgagctgagctggcttaatattcaccccctagctatgtaccacataatccgcgtgcttattattaggaatgaagagcgtcaataaaatcccaaatttacaaattcatagatggacttattacaaattccatgattggctccatgcatgcatggctctcttgtggagcaattttgttttcttgtttcattattccttctatgttcgcaacacaattacaataatttgaacactattagcagtaaaagggccactcacatttatttcgcagtcgaaaatgttgatggaaatttcttgacacatcaataattttatagtaagtaatacttcatatttaaaataccttctttctagctatatgcacctagactagcccaagtgcttagctagctagaaagatgatattttagagaccgagggagtactagcacaaactgcattgtcaatccaatgagagtactactaaaaattttgttactagaaatctctgatcacattgttaaatgcttttcactttttcagacaggtaattggattttaagaaaatcttttgagcgttgtatgatttcgtttgctactatgttctgtgttattaaattgtccgtacatttttgtttggagtcctttcctgtgttctaccaagggaagtacttctaagtctttgaatttttcatattctgaatggctgcagactatggaacacaaactagctaacccaccccatgtgtggatagaaaaaattgaagtaatagtttcagggtatatgatccttttccattgttcataaaaataattatgattttattcagtatcctattatacgtctttgtatcattaaatgattatgttggatgatacactactggagaaacccacaatagtcttggtttgcaaccccctttagtcccgggttacaaatcgagactaaagatgtcgatctttagtccctgttgttcctgttgaaataaccgggactaaagatttatctttagttccggttggttttttccattgtttgcatattgatttcgaaccaaactcaacaataaaatcattcacattcacataaacatcacaaaatcatcaacaaattcacaaatcgaatgaacatactcaaattgacatcacaaattcacaattcgcatcacaaatttacaaatccaaagacatcacaaatcaacaaattcagagataaatcaacaaataaataaataaatcatccactcgtcgacgccagagctaatgccgcgcgggctgctgccgcccccgcgcaggccgccttcgctcgctcctcgctactcccgcaaggataagagagaggaaagagaaagagaggagagagaggaggaaattaaagatgaggaaaagggaggaggagtggaggagaggataagtgtggaggagaggatatacagggggacccataggttcccggtatgcactggcatacccataagtttgaaaattttgctaggatcagctctgcaccaggaagtcaggaactatgcaggtgtatgcagtatgcagtaggctgcttgctcaatgctcctactgtactactagtagacttcctttctctctctcaatgcacgagctccaaagcaagcaagctagctagtactgtagtacgtacttcagctgtcagctactcagctgtcaagctactcagctgccaagctactcctgccaatgctttgatttggtttgaccttttatatatatctattgttaggttaatctactgtttgtattattctcctaaccatctattgcatcaagtctcgtagtactactttactaacagatttgaatcatctccaattcaccaattgtagcttaattttgaatatattaattgactttgagaaatcgacatcctaattgttttaaagaagattttgcatgatttgaatttagagtttagatagaatcaatatattgacattgttatcaattgaaaagatcgttttgatgaagaaaccaattaaattagttggttgtaatttctattttcattcaatacatatgagatgatggtttaatttctatagtaactttgcatgtataatttgatattgggattgcctttatttgtatcatgtaacttagatttccaattctacttatattattgtatgagagatatgtatatatgtattagtgcatacccagtgtagcttttctgggtccgccactgattatatataaagcaacaaaagatagtaggggccagatgctttttaaaccgagactgttggtattaaagatcataaagtggcgttgggcttttcaaccagatgctattggaaccggtactaatgtgatttttggccgatccacgaaagattagttctctagtagtgatagtgttgagtgtgattttgtataatgggacgatgcatacggttatctgtttacattgcttgatgaactattgaacttaagagcatttttatttgcaaagagtgacgtggactccatgtgcatagacagcatagtgacttggtataaggaagcaaaacgaactcctgaatataacaacacaaactggactgataacgaactgtatctgaccaacctgacagcagcctcgccatcaatccattagtggaaactagtggtctcactcacaaagatgcttggccgtgcataaacagcctatcagcaaacacataagttgaaacattgtgcttttttagtttttgaaggattgcggaccacaagtaatggatattagtgacatttccaatgtactgcactaacatgtcactcaagttaaaccagccaatggctgaaggtataggtggacgtatatttcatttgctgcaattcacaggacatacccaagttgttaggaagcaataataccgttgttggtactgtgtgtaaggctgagttgttttgagcaattcaaagtttcgttagcacatttttcaaactgttaacggatgtgttttatgaaaactcttatatattaagaaaataaaatagatctattttttatgtttaaaatatttaatagttcattagtcaccactaatgatctttctcgttttcggtgccatagaaaatctaaccggggttgctcaaaccggagtttaaaattttatgataaatataatactccctccgtcccaaaataagtgcagttttgcactattcatctccaacgtttgactgttcgtcttatttgaaatttttttataattattatttttattattattagatgataaaatatgaatagtactttatgtgtggctaatttttttaaaaaaaattataaatttttcaaataagacggacggtcaaacgttggacacgtatttccacggctgcaattattttgggacggaggtagtacatgtttaactaagtgcagcttatggagtctcgaattgaggaaactagtgcgcttgcttgtattcggtggccagtttaacttgagtgacagcattgttaaatcaggatatatgcactgcttaccaaggaaaatgaccttcaccaagtaagtcaaatcgccactcattagaacgttgtagaagaccatgcatatgggcagagcactacctgcttggatca

SEQ ID NO: 23872 - DNA, 1174 bp, Oryza sativa
cgcgctcttctttcgcttgtatcgagaagccttgcagacaagacaagcatctaagttcgcgtattgcttgtggtacaatatgcaatcatttggacacgcgtgaattctccggacctctaaccctaggggacacagaacctgttttgcttcatatgtcgtctcgggcaatgtgttctcctgaggaagcatgtccttcagtattcccaaaagttctgtaaaactcttgtctgaccatccactactagccttcaacttcattaggtctaatgttgctgataatttggtgtgctttggcttgcatcctgcgtataaaggagtctccgagtcactgaccaacctgctgaacttcatggaatctctctcgttcatagctgggtcatcaacgtcacgtaacatgtcttgcagcatatcagggtccacatcaactatttcaccgcccaatggagatgggacaaacatgtcatgctcttcttcatctccttcttcatgattgtctgcaccactcccgtctgcagctgcaccatcagtaccaagatcttgctctccatgcatcatcacccaacatgtgtatctctccatgaatccccggcgtatcaagtgagcgtgtacttccttttcatcttcccacaaaatctcattcctgcaatcactacatggacaacacatgtacttgtcgtttcttcttatcctatcctcctctgcggcttttatgaaacttaatacaccatctctatactccttgtactgacgcctcaagccagtcgtgtacatccaacttcgatccatcgctgaacaatgaacacaatattagttaacatctcataacataagtactactaaattaacaggaaatgtttagtaccttttacttacttttatgatttttcctgtttttgtttgcaaaaaaattacaaaaattcgcccccttcaacctcccaccaaaatagtgaacagtgggataaactacagacaacggactgctggagtatatatagtgtgcaaagtatatctcaatcgggccaaaaaaatgtcatctctaacgggcgcacactaatctctaacgggcacaaatagaagcctgacaccgataagagtcatcggtgacgggcattaaggccatctcaatcgggccttctttggagcccgacaccgatgacactcatcggtgacgggc

SEQ ID NO: 23873 - DNA, 761 bp, Oryza sativa
gcggagcgaggttgctgctgctgctgttggtgctgctgcgaggaggatccccctggatagggattggtgtagcggaccctctggttagcaccctgctgattgcggaaattcgccaagcggcacttgtgcgactccagttccttgtgcttggcttccaagcggatgctcttgtccaccagtcgttggaaatccggatagtccccggagactagacggacggacagctcggggtccattcctgccaagaacttctcctgtttctcctcatcttcccgcacatcctctggagcgtaacgggccaggttattgaactaatgcaaatactccatcacggagcggttgccttgcttcaactctcggaattcccttttcttaagggccacgactccagcgggcacatgggttcttcggaaagcggcggtgaagcgggcccaagtaataggctgcccctctggctgcgtagcctggaaatggtcccaccatagagatgcgggtccctgcagctggtgggcggcgaagataactttctcctcatcgctgcactgcaccgtgtctagctttttccccacggcatgcaaccaatccaacgcatccacggggttgttggagctagagaaggtaggtgggcggatgcggaggaactcggcgagtttagagtgttggggaggtggtggagcattatgttgtggtggattttggaggtggtggaggaaagcagtcatcatgttggcttgctgggcgaggatttgggtgagaatggc

SEQ ID NO: 23874 - DNA, 1991 bp, Oryza sativa
gcggcagctccctagcagcgtcgactcccccctgcccccctggcccctgccgattggatctgagagtgagagaggggatcagaagagtggagactggagagagagtgaaatgagaagacctagggttttcttgctttatatactagcacctccgaattgggttgggcttttactttcatgtgggctaaggcctgcatatgcgctaatgtcgggaccccatggggatacggggccggggagctagcgcccgcccccggccccggcccacccgacgggtgaataaaatggccaataacagccccacggatagtgtttcgctcccaattagagaccctaatagagtatttccccaccggggatcgggttacggggccccattgccatccctaggcgcacacccccttgggctaagcccacgacacatttacaagcccaaaacccaaatcagattcggactggatgaggtacgtggcttgttttgaagattccctgcagctcggaaggaattttgacatgggaccaaaaccatctgaaagtagactccataagctttccaacaagtactcatgggccccgaaattccttctagatcagcggctaggtctgtttgaagttgatgctgtcaggaggcccgaatccaaatccaaaacgtgtacaacttgatctcttgtcttctatgggccaaaagtgacatggtgaggtagaagtatacttgtagaaggtcttagtttggtccctaatcaacttcttcaatcatccatgcattacttacgctcggtctcttttctttcacccaagcaattacctctgcgaacgaaaacacacgaaactcaatgtgtagcaacgtttgtttaaatatataacaagtaaatctaatatagaacatatgcacctttggttgatcaatacataaggtggtcatggttatatccgaactagttgtgtcctcatcacaaagtgcggtagcctacctccgtttgtccatctgtttgtgggtgacatgttgtagaaaacaatagctttgtacccaacttgttccatagcgtgcgccagaaatgacttaagaattttgtatcacgatatgaaacaatagtagaaggcataccatgcaagcgaacaatctcatggaaaaaacagatcaacaatatgaacaacatcatcacttttatgacatggtatgaaatgtgtcatcttagaaaaacgatccaccaccacaaaactgctatcctccccctcttagttctaggcaatcccaaaacaaagtccatagaaatatctgcccaaagaatagaaggtacagaaaaaggcatatataaaccatgtggattcaaacgagacttagttttctgacaagtgctgcaacgtgccacgaacctctcaacatcctttcccatccttgtctaaaagaaatgcatggccaaaacatcttccgtcttcttagctctaaaatgtcccatcaaccctcctccatgcgcttcctgtatcaacaaaagacgaacggaaccaactggaatgtatagacgattagctctataaacaaatccaccattgatcacaaatttgttccaagtaagtccctctttgcaatttaacatcacttcattaaaatcaggatcaagcgcatattgttctttaattgattcaagtccaaaaatccgacaatcatgttgggacaagaaagtatagcgcctagacaaagcatctgcaatcacattatctttccctttcttatgtttgataacataaggaaaagattcaataaattcaacccattttgcatgtttacgattcaaattattttgagagcgaagatatttaagcgattcgtgatcggagtgaataacaaattctttaggccacaaataatgacgccacgtctctaaggaacgtacaagagcatacaattccttatcatacgtggaataatgcaaaacaggaccatgcaacttcttgctaaagtatgcaacaggcttaccatcttgcatcaacac

SEQ ID NO: 23875 - DNA, 2289 bp, Oryza sativa
tcattctaatttggtgatagccactacgcaagtcaatctttgtgaaaattatagagccacacaactcatcaagcatgtcgtctaacctaggaataggatgacgatatcggatagtaatattattaatggctctacaatcaacacacattcgccaagaatcatccttcttaggaaccaaaattacaggaactgcacagggactaaggctttgacgtacatacccgcggtccaaaaggtcttgaacttgccgttgaatttccttagtctcctctgggttggttcgataagcagcatggtttggcaatgatgctcctggaatcaaatcaatttgatgctctatccctctcatgggtggcaatcctgggggtatctcagctagaaagacattctcatactcctgcaaaaggttagtaacaacaggaggtatcgaactagcaatatcatcaaaagaaaccaaggcttgtttgcatatcaagaaatagcacatatcaacatctgaaatttcagcaatgtcacattttgttgcaagcataacaccatccttcaacttaattccctcaaccttagaactaggtgaaagcttatcctttttaggtggaaaaacagatttagccacttgctgattttcagattcagcttctacaatttcagcaggggtcaaaggtagcaaaataaatttcttcccattatgcacaaaagtgtatttattactcctaccatggtgtgtagcatcattatcatgttcccaaggacagcccagcaaaagtgaacaagcttgcataggaaccacatcgcaatcaacagaatctgcatatgagccaatggaaaacaaaaccctacaaacctgtgttacctttgctcttccggaatcgtttaaccactgaatatggtaagggtgtggatgtgtacgtgtagtcaagccaagcttcttgaccaaatcagaactcaacaagtttttgcagctacctccatcaatgatcacacgtgcacgatggttgttgatgacgaagaaaatctgaaacaaattatagcgttgcaacttgtcatgctgctgtacatacgtgctgagcacccgctgcacaataatggtcctgtagtccgttgtgtcatcacgaccaaagacttcgccatcctcatcctcaacttcttcttccctctcttcctcttccacgtcggaggtggtgatgtagccatcttctgtagcaacataggcccattgactagggcaatatttctgcacattcccaaacccttggcaacggtggcactgaatgcgtcccgtcgaggcgacagatgaggcactcttggcgggtacctgcgaggaacctttacctgactctcctggtcgtggtggagatggttttggtgccgtagaagctccggatgcagctggtcgcttgctcgctggctgggaggacgcccgaaaaaagacagccttgggcagtcccgcagatggcgtcgtgcgcggagtgtatgtgcttgccttgctcttgccttgatggtcgcgcccctgtaattccttctctgcaagcatagctaaccgaaacaactggttgacagagttaaattccttataatcaacaatgttctgaatttcctcccttaaaccagaataaaaacgacaaatagcatccttgaccccctccactatgccacagcgtctcacacccttttgtagctcaccatagtaatcctgtacagatttatccccttgttccaaacgcatcagtttcttgcgtaaatctctatgataagatggaggaacaaacctatcgcgcatagctaccttaagttcttcccaagtagtaggtagtaccccctcatcagataacccagcccaccacataatagcaaaatccttgaattcactactggcttgtctaactctatgttgctcgggtacaaggtgggcattaaacttttgttgtactgtcatctcccaatcaagatatttctcaacatcataatttccccaaaaagatggtattttaaacctaaccttagcataaggatcatcggcgacatgattattatcattaccttgttggtggcgagtgccacccatacctgtgcggtttgtgcgtaggcgacgtcgtagccgtgcttgccttgtagccggtgcgtcaatatagccactggaatcgtacaccgtgtcttcaggatgagcatcgtcgtcaccactcaccacttcctcattggaaggtgtctccaacgcggtgacccaatcagttagcgtggatatccgcttgtccaacctctccatgtggttcaggaagccgattttagtga

SEQ ID NO: 23876 - DNA, 10033 bp, Oryza sativa
ccaatatgatattttcactgtcctcttatgcagggaacacgttttatagtaaatgtgactgttagaaggatatgcaatgaatattcttgctggtacaattcatgtcgaatatgctataaaacttcaaaaccatatggctctagctacagatgctccagctgttctaacatcggaataccagatccaaggttcataatagaacacgctctgtcttcctacatctttagcaattatcatccacacattgctatggccatatccatttttcatgcaggtacaaagtagtattaattgccggcgatgatgatgctaatgctacatttatccttttcggaaggatcgcacaacgcctactacgcaggccaatagaatctctcattgaagaaaatccaccaaacagtgaatacattccaagtgaaatcacgtcacttattggcagcaattttgcatggaatgttagctttacgcgggatactgtcatgaggagtcaagagtgcctacaggttaatagcattatatcctctggtgcttcaaaccagccactactccttatgtccccagatgcttcaagttcactatcgctcagggaacacaggacaccccaactagcaaatcaaattcttcaacacctaccaagaaatgcattgttgtctcagtgtcttgcctgcagtctagcaggaccaaacctaaaactgatgataaggtaaccactttatagccacccttaaacttgctgtcactcatactgaattacatccactctcacttctttcctaattttgcaagcccaaaactaacacaaaagctgaagaaaacacctcacatgataaatcttcaattgttgtcctgcttgatactactgaaaataaggtactactacatctctttcctttcagctcattcattaagacttaaccgccacttcttttacaagggaaagggacaaactgccaaagaagccaaacaagcaaccccatcattccctacagataccccagccaaaaaaaaggtgctttgatcactcctaggtgcattccaataataaagctttcttccattgtaactaacacatcgtttcaataaacagaggaatgcctacacctacagcaacacctccggtagctaagaaattgttcaagtatggtgcccagcaaaaaggcaatgacaggttactcctcaaacacaaactcacctatctacacataacaaattagcaatttaaaggcatttcctaatctcacaactcttaatttcatctacacagtgaatgagttgtcgacgtgcaatccatctcaagacttttgcttatatatatgtacaaagctatgtcccagctagaagacagatggcagttgtgaaattacccaagactaaagaaccaagatcttttgttcatggctttttgtcatgattatcattgtatataagtgttgccttatctaccttccttagaattgtatgatacaagatgctagcatctgctaccaatgctatagaacatagtatgtatatgcatgcattctagctgaatgacttgcctttatactatctaagtagttccagtaaaatgcctgccgttacactaataagctatccctcttgacacccttcttcacaaatgctcagaattcaatgcttcaaactaattcattctttttcaccacctaaaacagcaaaaaaaaaaacacagccaatttcccaaaaaagaaaaaacacagctaatttcctaaaaaagaataaagcgcgctcccgctctagtgccatacaatgcatgagcttctccctttatcctccccatcttccatatttgtactatcttattactaatgttaaaaacattttttctcataaactagttgtccaatctacgttctgatcataccgatttattcgttgtaccgatttattcgtagtaactaaattttgaaacaagatatcacatgattatattctataaaacaaaaaatatagataaaatccggcacctaaactatagttgcatttttaaaaaaaacgggtacctttatttattttatagataccggtttatgtaaaaattggtagctatagtatttaaaccttttttttataaaaccggcaactataaaagtcgatccagcacctcctccaccacaataaaatttgatcttatccacactcccattgtcgtcatctctctctcgcacttctccttcccactcttctctccatccgctgcatgtcctctccccatcttctcctttgcatccgttagccgcaccgcctcccattcccatcccccaaaaccctaaccccctcgcccgccaccagcgccgccatggtcagcttgtgctcctcctctcgcttcgatttggtttttgagatgaagggtcggtggaggagggagggggcggcagctatggccatgcgactaaacgaggctgtgtggcatgcgactggtgggagcgtgtggcgtcgacgtcaggagctggcgttcttgtgggcagactgcgaatccgggtatgatggccccgccgctgtctcccccttctcctcctctaaatctggcaatggtagcagtgatggagaaggtggtggctggtggccgggaaggaggtggaggtggagcagcctgaaggacctccgttgccagatccggcggctggcagcgaggtctatgacgagctccatgaggggagaagtgcgcaactagtactttatattagtattgattaaatgaaaaaccgcacacacacacagcgctgtacacacacgctgaacgcacccccttataacaccactgtacacgcatatgcacaaacacccactgtacagacacacacaagatgtaaacttgcagcaattcccactttcccagacaacagtaaatttatatcagaagtgcaccctcatgtgttctactgtgagcaccaggtttcggactttcggtgaacatgaattcactatggcaccttcggtgctttcccgacaacagggttggcatttgttctcgtacaccggcaattgttaagactgagttttttttaaggcaaaattggttttatagcattgaaagttctcgattttggctatatagcagcaaaagtttatggttcactttaataacactgaaaattacctcctttactacttttagcattccgtcagtagttccgtctcctcaccccatcctacacacatgtcttcttcctcctgcactctgccagtctgcctcgtatggccgaccactcttcaaggcagcaagcgagcttgacctcgacagtatagtgctgagtgggttggagggtggctggatcaggcaagctagaggtggcatctcttgggtcagcagacaactggtccagggcaaggaggagggggtcggcactcaggtgaaaccgcgacgagcgcgagggtggtgctttgaggcgagttcgagccttcgagggccgatggatgagctcgagggtggcgtgttcgggcgagctcaatggcgccaacaatgagctggaggacgttgtttccgttcaggcccaaggatgcctgtgacgagctggacaacaacgcttcgggcgggctcgaacgcgtcgatggatgagcttgaggatgacgcatcagggggagaccaggggcagcacgcccggacgaacttggaagcggcgcggccgcggaggtggacctggttaagcacgcggcatttgaacaagctctagcatggcggtgcggcagatgagatcgacgatggcgttgtctggcaagcacggaccaacatggcttgcggatagggttggcgtacatgacgagcttgtggagccagcgtcctgcgttcgcaccatggctgaccagcctgacctcgtgtatgactgccatttaggggtgacgaggaaggaacagggcaccgctggtgtttgatatcttttttttttgttgttgaaaaacaataagaagaaaacaaaactaactgaagtttggacggaatgctaaaaataagtaacggaagtaactctcggtgctactaaagtgaaccatgaactttcaatgctataaaaccaaaattgagaactttcgatgcttcagaaccaattttgcttttttttaatgcaaaacgagaccagcgatcaacaaatgattaatcgagggtaattattacaaagttgaaacatagatttatttaattttttttaaaaaaaattacatagaaaagttttacatgaaacataattctaaaaatgtgttcacaataaacaagtagtggcaaacatgagacaagatgtagtcatacagtaaagtattattataatatatggcgtgaactgaaggtattgcattagtataagtacactatattgactgccaaaatgtagggttgaatttgtaggatcatgtgcttacgataggttctatggtaaatgatatagtttaaatgaatcttcaaataaatattatatagatataccttttagagcaacacacttacgtactacggttctaggcacaacttcataagtattaagagaataaggacctaatacattcggcatgtcgaatctaagaagtcacagtcttgttagatttccgtcaacttcatatgttgattttcaaatagactttaataattattttctccttatgtgttggttttttatccgtcattatgaagttgcctgcatatttactctccttgagataatgatgtactgtaacaagtagttgcagcttcttaaaggctaagatttattccattatcttaaaaaatgtacggctaaaatcgattgaacactttaaggtatggcattaaaacctttggggtcttatagattcaccatggcatgcatagttaacatgtttctaagaagagtggaaaccatgataaaaatatgttgaagttttataaatcaaagtacacagtaattaaatcatatattcccacgtttcaggttataagacgttttgacttttgtcaatgtcaaattgctttatgtttgactaagtttgtagaaaaaagtagtaacattttcgacccaagacaaatttatcatgaaaatatattcaattatcgatttgatgaaactaatttaatattataaatattactatatttgtctataaacttagtcaaacttaaaacagtttgaacgaaaatcaaaacgtcttgtaacctgaaacggagagagtatacgataatatgaaggccattaagctcgaatcattcaccactgtcaaatacttggcatccatatggtaacattgaacaggaagatgaatacggaaaatgaaaatactgtctccaatgaatggtgcttcacagtccgaaaatgaacagtatctgaagcaggaacaagatccggaatgcctcactcagcctcgagggaggagaggcattttttgcttgggagtctacaatgtcatgaaaacaggactaacttcaaaacaagtttgtttatttgtttaaatgtacgacatataatgctaaacacagctcacaagtttgctagttagaaactatagatttttgtttgctaagtgcccaacttcttatacagttatacgaggcatgtgtgtcttcattggtttcgaaaccaaattatgataattggtttaataaaaatgttagcttgagaattccaaagttgtcggctgctattttctgaattactaagaaaataaaattattgatttgtcgttactttgaaacttcaattactgactgatagtacaattagaaagaaatttgtacgtgttatattatataacaaattttaatattaaaataagtccttattatagtgtaaattttgatttaaacagattttaaatgttagtaaatcactgtttccgaacaatatgtaaattaagagtaatatgaaaatttgatccattcaaaatatacgaagctaacttttaaaatttgggtaagatccgccgaagcgggtagccttaaccgcaatgtgatggaggaaagcccgaaagctgttcccgtccctgtcaagggagatgccaaccgtctctcctatacaaagctaaaaaagcatttcccatctcaggaccgagaccctgacccatccgcgtcgctcctcgcgcgagcgaccgggcgggtgacaaccctagcgccgccgccgccacttcccctctccctccctaacctcgccactgccggagcggctaggcaacggttcggcgaccaaggacagcggcggcagggcaactagccgaggagcggcggccctgtctagcgcgggagaggcaggtcgacgttcggcggcagctgcggcgacccgacgacgagcttctccagcgacggcgacgtggtgggacggcgaggtggggcaatagcctggacgcagtgggaggaaggtgaaggccggagatggaaggggcgaccagatccggtcttcctggatctggctgtcatcggggtggggagtgatggcggcggggtgaaggtgagaagcggcagcggcgcgaggaagaaaaccggagggggaggagcggccactctggccatctccttcttggattcagtgggggagaatggagttggatgcgcacgaggccggcggaggcggtcggcgagtaagacggtagccaacggatgtggctgtggccagcaaaggtatttgggtggcgaattgaggtgcagctggccggtgaaggcgagcaaggcgatggctggcgaaggcggttgtggccagcgaaggtgctgtcgaggcggagttggttgtcgaggtggccggagaagctgctggccggcggggttttagtggtgatggttgatggccggtggtattgccgcttggagaggtcgtcgttgggttggtcggttggtcgctgacgtggttcgttcgtttggaaagccacaggacacggtgaacaatagtgttgtcggtggcttgatcgccagcaagtgttcctccaagtttgtctggggctcctcccctcctgttgaccggtctgctttcagattctggtcgtggggagttccatggcgaggggcggggagctagctttggttggtagatttgcttggagttcgagagcctcaacactgtcagcgctttgtttttcttgcgtcggcaaggtgcctggttcggtggagttggtgcatgagacctctgcaacgcaacctgttgatggtgtttggggtggagttggagctgcttggctgggtgtggcaagctgggcaaagaaaacccccttgctccttttttggtagtttcgttggggttactgtgcagttggcttcctggcgtttctttgggtaggtgtgttgggggaagtcggagctgcttgtcggtgacaagctcggcaacgataaccctttcccgctttccatggtagcgctgtggtagccagggttgtcgtagttagcagggagagcgagccggggcgaatgtcctgctcgatcttaggctagagccaacgatggtgacgcctgtgtgcgccgttttcctgtggtagccagggttgtcgtagttagcagggagagcgagccgggcgaatgtcctgctcgatcttaggatagagccaacgatggtgacgcctgtgtgcatcgtttctgtgctctactcgttttttcgagtgaaaaccttgcaccgattttcggacggatgttgtttgcgtttcgaagctatcttcctccttggaggctttgtcttgaagaccctgccctacgcttgtctgtggtctgttcataggaagtcggagctgctcttgggagcttggcaacgatgacctatgttttatcctctagttgtgccgtcgcaagttctttatcttgttctccgtgtgggttttgcccggtttccgccttcaaaccgtgtttatgtgaggtttttgggcccggtttccctaaaaaactgggccaagtttctacttcttaaaagaaaacaggatctccctgtccacttctgaggattttactaagaaaaaagaaaatatacaaagctataaggatacctgtcaaagagtcgccggccggcgtgtctgtttcattatgacctgacaattatggcaggaaaagattagctggggtcaccaaagagatatgctgtacttaatgaatataaaatttctgcatattatttgttttcgcgtaagcatatagccagccaaatgtgacatttcaatgcactaatttttggtatgatccaattttggcaatcttatttgtttatcggtacattcgattttttttcagccatctgatttgttatttcaaatggttaagagcaatttcaagatatggcatctatgctactctctcgatcctttaatataaggggttttgatattttgcctgtactatttgaccattcgtcttattcaaaaaattttgaaattattttttttacttactttattatccaaagtattttaagcataacttttcattttttatatttgcacaatttttttaaataagacgagtggtcaaacaatacaagcaaaatatcaaaatctgtattatgggacgaagggagcagttggaaattaatatgtttttacatgccacaggacggcagaattattttaaaccatttgctgatgtcgtaccagaaaacacaatgttgcatctactcctctgtacaataaagattcaaatcctatcttcaggttcatctctagaatttgaatttatgagacagagggagtagataactagattggcagttggcttatttcatttctgataaggtactaaaattgtcaaaaagaatttttttttacaaaacaattatcgtttcagaagggtacaaattggtttgtccaaaagtaattactcgtttcagaaataaattcgtttgtcggaaagtaattatactactcgctatgctttactggtacagaaaagagatggaacggttgaaaagatcaccataaatgaatctgttcattctttatactaggaacattatctttaaaacttattacccatcacttcaactatggtagactatatgtgagagtttgtgtggaataacttcaactatggtagactatatatgagagtttgtgtggaatatgtgtataagtttaagattttgaattttaatatgcgtaggatacagttagagccaaactatgtctaggtcttttgttaaataccgaggcacacatgttgtaaccataagacaactctagcatagtgtgtacgactagcgtacaacttagcccgtggagggtcgtaggtttcggttggacatcgataacaaatctctttctacggtttgtcttcaatattgtattttctacgatgtttcttctgtgtttttagccccctgaatttataaattctcaaaataatacgagtgtagttgaaaaaggtgtaaaaaaactcaagcgtccgtacggctgcgattatatacagccaaatgcacggtactgacactacaccatggatttttgcgattttcggaattgctgaagcctagagctaaaataactcaattaactccgactgttccatgttactattatctaaaaactaaaaagataagcccgcacgaacgcgtggcatcttattcattattttaagaaagtattgaaagaagtcatacctcaccatagtcaccataaattaccttataataaaaaatatgtccgcggtgaaatagagcacaaactttaatatcctaaatgatagaatgtctcccagattcagacaaaaatcactttgtcccggttatatataaatttgtatattgctaccacgaattattatcattgttttaaaaaatgtttgccaatttaatagatgtaactgatttaatatatgaaattgtatcaataccaagaaaacagtcataatatattattaatacataaaaaatatatctccagtacttatctaagtgtttatttccaaattcatatataaatattttaaaaatcctgtttctacctattaataggttaacaccgctaaaattaagagaaaatcccttctatacctctgaaatttcagctaatcccttctacgtccctgcttacttcctcctatacctctaaaatttgattttgatctcttccatacctctcccttcagatgaccatt

SEQ ID NO: 23877 - DNA, 11907 bp, Oryza sativa
aaaaatataaacgtttgccgcatcagactattatagtaatgagtttgttgtgtgatgtgttatttatcacaaaatttatttttagataaagaaataaaaaatatgtatttattttttaaaagaaagtcataaaaatgataatcattcttacaaagataggactaccaatgctcacaataatttttttatgaatgctccagatcaaaaatatccattgtcctattagaatttcaaataaaaattttaatttattacatttgttttatcttcaaaatttatatcaaaaatttctgcaccaattatttactctcattagtttcataaatcatttttcaagcttatgttcaaacctaaagcatcaagggaaaaaagatatttgcaaccaaacataatagtgaaatgaaggaaaatataacagtaggggcatggaagggatcgagttgaaatttcaagggtatagaagggatcggataaattttagggatatgaaaaggattgagtgagttttcaagggtacatagggaatttactttaaaattaaacatgaatacccaatccgaccataggctccaaggctttcttctatgcttccttgaaatatgggtcctgcctcaacgtagccgtgcatgtaaagaccatcatacaacataactttaatgcttagttcactatcgacattggcaccctcatagttggtgtctttcggaaggacaaagagaaaatagaggtaatcaaaacatgtgtttaattaaaacttttgagtcgatttgtaatatagagtagacattcatggtaaggatatattattctcttttgaaaatgagctaggctcattattcgacactacttcaaaatattatagctaaagagacaactcaccctgaatatctgtagaataccgtctcattgtttatatttacatatagtttaagtgtctggattgttttcaacatccgctggtcataaatatttcttgagacagctttacgaacttatttataattgattcattgaagtgcactagcagtcacatcagtggggtgtaagacagcccatcaattatgcccgacgtattggagttcctcgactataacaaaatatatcatcagtggtgcgtatgttactggattgttcatttggtgccaaaactatttggcaaagaaaaaatctagacgtgtgacaataattctagtgatgaattaaggggttgtaatgttgtattatagcaaaattacccgcttcaaatatttttggtagtttttttcacatctctatggcaatgcttctcacttctcagtaccaatcaaataacacaaattggaatttaaagagaactacttgaaaaaacagaacataattaaattatgttgtttcaattttttctctggcgaaacagttgcataaaaataggagaaaaaagaaggattgaagtccggaaggtaagagcatcaccaacaaattagcaataatctatttctaaaatatgatattggggtttcctaaaataaaaataggaagtgaaaaaactttttcctccaagagatagcctaaatttaattccgaaaaattaaaagtgggacctactgttaaactatcaactgaaattcccgttttttctcctttcatgtgcacagagagagatcacgatgacccgcatgcatgctcccaacagaaatttcggcgctcgcgcgggaaggagaggagaagcacggagaaggagagagaaacgcgtgaacgagagattgggagttgctctctcacccttaaatccacggaatgaaatatatggagatgaaatatatgcaaggcttttaggaatatgttggatccaatttttatactaaaaaccatcaaaatcagttttgggaatgaaataggatgactgttggtaacgcaaccatcaaaatcagttttgggaatgaaataggatgattgttggtaacgctgtgcacaaaattttactgaaggggatgtcatgcgcatgagatttgatctaaccattaaaattaatgagtccaccaatttaacttaaaaataatggttagatttagctaatttattatcatgccacgtgacgatctaggagtttttgaaggaatgccacgtagcgatataaaagcgtttgcagtatgttaaatgaagttttagtatatactctctcgattccattttgattatcacgtaagcagagggtgtggagagcaagcataaccaaacttttatcattttgtaattgattatcattggttaaggtgatacatattttcgtgtcctctgagttacatcaaatttaaatattacatttagttgcaccaatagaaattagtcttggttggttacacgcagcacattaaatgatgtttattcactatttacacataaaaaaaataattgttagagaaagatcattctgagaagacctaaaaatgcttgggtgatcatcaaattgaataaagggagtaatagactaaccaagtaagttcaatggattagaaaatatatatgttaacttcttagctgaaaattttaaatttctcagaaaaacatgtagaatataaaataaaaagtccaagcaacaaaaaaaaagcctccatttatctataaggctttgttccatagttattcccaacttcacctcgtgtttccatgcgtatgcttcccgcgtattttaaaacattctatacaaaaattgttttaaaaaattatattagtttattttaagtatttaagcaaatactgaattaattatgtgctaatccaccgctatgttttccatacgtggagcctccagtaaagaacacagcctaaagtagccggtagaatcaccaccactaataccagataaagaaatattgtaaccatcattttgtttaaaatgtggaaataaatatctcattcacggattctcaggattcacttgccgtatattcttgtcatttacaaattctaattttttagataaatgaatcattaaaccacacaaaacaagatctacctagccacaaacacacgattttcagtgacgccttcaaccatctccgctctgggccagcgcactgctcctgctcgaaggcctatcgttgccaccgctcaccactcagcgggggttcctagggtggctgctagctggcgcgtgtgcgccagcagcgagcacttctctcctataacttctctatattagttaatacttaacactaataacgggtaattagagaagattcttaagatttttctttcttttttgggatatttttttactaacagattgaaaatttttaagtcagatttgaaaactttcgatttaagatttaaattttaaagtcaacatttgaaaactttcagctcgagatttgaaaacattcaacttagattcaaaaactttcaactcaagattcgaaaactttcaagtccagatttaaaaaatttgacaactttcaacttgagatttgaaaattttcaactcgagatttgaaaactttcaagtctacatttgaaatatgggtaaattggaaccatgctattataaatttgcaaggtttgagatatgccatcggtatctcaataacatgtaggacccacatgagtcaaagacatgtgggtcaggttggcatatctcaaattttgcaaaattataatggcatggttccaattttcccttaaaatatttgaaaactttcaactcgagatttgaagattttaaagttaagatttaaaaattactagtaaactaatcattagtaaaaatagaaaactaatctaatctaaactaattacgattttttcccctattcatacggcaggaatagcgaacagcaaaaaaaaaaagaataaaagaagaaaatggcggcgtcaaaaaaataaagaaaaaaacagagaagaggcgcgcgcgtgggccttgtgggccagaagtacgcgccggcaacgcgcgcgcgccaattagcgattccgggttcctatcgcgcgcgtacgcgttagcagtttagctggcacgcacgctagctgggcccgtccatgcacggttctcatcaaatgtacatgttgggtaactccttgtaaaaaagttatatatttttttttatttttttctgagcgagttgggctgatattaaatattcgatgcaatttattgttttgcattagcatgctaatatgttacacatttactatttttcaatattaatatagtaatggccccattgctatcacaacagagtcgcccatattgcgtgataccagattaaatatagtactataaaagttcaacaaccaactctctccttacatccttacatccttgctcacgtttttttattatgaaatataattccggcatttgctcaacgagctacaaccaattatatattacaccaattcatcttacttatatgtaccaaaatatgtatcgctagagaaacaaaaaccttagacttaaacaaggtagtatagtttggttggccgggatgtgtttcagtaatttagatttattcgatcaactagagaaagttggggctttctccataaattcttaattgatgttgtggtatgtgaactagaaacaaactattttgaatatgttaccttgcacgtatagagaagaatatgttttcttaaaggcaaattttactacaagacattgcgacttcgtggttttagctatagcacaccgcacgaacttacgttttgggaaaacactctgtaaacgtggttattacgaacttacttttggggaaaaacactatgtaaacgtggttatttatcagcggacaccatatctattaaaatattaatttttgattgaataggagagataaatagcgtgaaaggttaaaaaatgccccttgtccgctcatcacgaggtagtggcgacctgctgcattgcttgatgcttctctgtctctcgatcaagctagctatagctcatggacacatacaattaagcaaaacaggaacaatcgcactaaaaacaattaaagcagcagcagcaaaacgccgcgccgccgctggtgaacgtgtcggtgctatctccaacaggcgttgcgttggtggagagcaagcaacaggccgggtcagcagcaggtgaccatcgtggggtcagccggacctcgtcatgcacgtacggctgcttcatcgatgcctacctggagcgcggcctcgcccggccgcaacctcaacttcgcgtttgatcgacaggcctgcggcggagccggcgacggcgagaccgtcctggccacggacgccatccagttcgaggcgctcggcaaggggggattccacgcgatcgagctacgaggtgttgctcgaggccaccggcgcgacaaggggcggcggacgtattagttattgcaggttgctcggcgtctacctaagagactaagaagaagcacgagggaggaagagtacggaggggcaatttggtcacccgcataaaaatatggcccgcttattatttgaaatgcattattttaatggacgcggcgtgcgctatcaaataaccggaaccggctcctctgactttacagcagcacgtcacgccgtaacgtagccatcgcgatccaccatccaagctgatccaacgacgctccatctttgctctgtgtcatcgatgcaactcccctctgttaaaatcgtcttcttatcctaactagcattttggagggaaaataaaatggtaaccatgtttgccgccaatatacagatttcttcactctgcttatctgttatgatcgagttatacgagggaatcgagttataccaggaaatcaagcgaggatgttccattgaagaaggcgatggtgccacgtgaacactcgaagcataacagcataaactcaattagttgaagaaaatgcttctagaagcattgagaattatatacaaggatatgagttcatctcgagctacactgaattgctgaaggtatagttattcgccggacataattatcttgcatattcaaatgtttcataaagagactataaaaactgttgttcttttctaactcatgctcttaaacgatgcagggttatagttcagagcttttatatcacgacatgacttgagtttagagtttactagtattagaagtttcaatcttagctatttttcatatattcttgtcagaaattttgagggttggttatgttataagatggatgcatatcagaagtttcattcttattctgttatttttcacatctcttgccagaaagaaatacatgatcgtaattaagtaagaagatgacagagtgtgctaattaatgtaggacaaggagcaaagacggagcatccttggatcgccctgtacggtggatcgcgattggttacgttacggcgtgacgtggctccgtaaagtcagaggagcctgttcccaaataaccacattcagagagtgtttttgtcaaagtgagtccgtgtggtgttttacagttaaaattacgaagtcgctattttctaaaggaaaatttgccattttaaaaagctccgactataaaaattaaccaaatcaattagtttattattttagtttttctttgttgcaatacaatgatattttaattactagtacgagaacaatcgtaaccatccttttgttcctaacatggaaagatgtcattggcggattcccaggattctcttgccgtatatccatgtcttttaagtacgtattataattttttggtggagaaaaatcattaaaccacacgcaacaatatctaccaacaaacaaatcaaataaatacatggccggttcttaaacttgtggggtgatgtcacttaggtccatcaacttaaaaattatatatttaggtacgtaaacttggtataatgtaccacgctcggtccaatcgtcctttgatcatgtttgaccgccaacgtggcattccacgtagataacacttctgtgctcagccccctccacatatatcttcgcacataacttgccctgaccagtgcatttaaacctaaatccctcaaaatattcctaaatcggctagagtttctatagtgaggttaacggaaggaggccgagaggtagcgccgtagcggctatggcggcctcagtggtgggattagcggcaggaggcagcgcagtgaagcggggttagcgatggcacaatgcgactggattagtggtgggaggcagcacaatgcagcttgaacgctaggcatctccatggattttctaagcgtcctcgtcttgaagtcactggaagaaggtattattgatcaagtgcccgttgtgcatcgataaggttattttggagcgcagagcaatgtcaattgctaattgggaccgcattttctatacatgcaaggagaagaatgagaggtaagaacgatttgaggattttttttttgagatactagtgtcactatatagctataaggagatatatgcgacgtgttgtgatgtggagggggctgcgagcaaaagtgttgcctacgtggcatgccacgttggcggttaaacgcagtcaaagtatgtttgaaccagtatggtacattaaaccaagttaacggatctaaacatgtaattttcaagttcatggatctaagtgacaccaccacacaagtttagggaccgtccatatatttcactcttgttcttattaagaataagattttacctcggttttcgttagcacgtttttcaaactactaacggcatgattcgtgcctataaaaaaataatatatgaaagtcgttttaaaatattaaatatatcaatttttcaagtatgtagcaattaaaactcaattaattctacgctaatagctttatcgttttacgtgctcgcatttaatcttaatccaaagcagaaacgcacctccttgatgccccttgtccttgtggcagacgtcggacgaaacgccggtgatcttgcactgggcgaacaattgctgatcgctgtcgaggttgttgctgacgctcgcgagcttcctggtgttgtttctggacatctcggcgaccttgcagaggcactccggatcgctcttcaacacctccgccaccgcctcgcagcatggcgttagcatggtggggtcgtcggagacggtcgcgcatggcatgaggtcgtccatgcacgacgccgtccccggctgcagcgtgctcgccgccgctgtgaccggcagcgctggcagcggcggtagcgccgccaccggcacagttgtagccgtctccgatgccgcggcgacggccgccgccactgccattgctgccaggaggaaagggccgatgtgttccatgattgctgtttgtctgaggtgtggacgagagtgattgacgcgcgcggcagctggatttcttccggtatatatacagcagttcataaacgagacaacgtgcgatgaccgatgaccgttcattccactctgtccaattcaggctcgggccctaaatattactatgcgtttcaatttaaaccaatacgtttcaatataattaggatctctagattttgtttttcaaatttcactctttaaaccaatatgtttcgatataattagaatctctagattttatcgttttcaaatttcactctttctgctcgactgaatcggcggaaaggaaacgagtcgttttcttcttcaccctgacaaatgtccgatagtaatcacaactacatcaaagaactctatttcgtgacgacaatgtgaacgtgcatttgtaggcaatagggattccattttttcatttagtaagacaaactaaattgttgcaatgattcttcatgtacttagctgaaatgccactacatatgtacgtgggtgagctttgttgacatagctttggttgtcattggttgtgaatacttcttagtttattgataacgagacatagctaaagaaaggagtatcttcctggtatagttgcaaggcaatgtagataactcaaaaatcggtgctaatagagcttgtccctcgcaggtggaccccccaccccgcctcgtggccacatcgcctcccccggccctagcactgatttatcttcatgttgtgaaactgttgctttcccatcttatttactcgctccgttttcatgatacaagattttctagtattgtcttcattcatatgttcatatggatgttaatgaatcttgacacacacatatgtctaaattcatttatatctatatgaatgtgggcaatgatagaaagtcttacattataaaacggaggaagtatgtaattatgtgtgatgatatagtacacagaagctgaagaaaaatggtgcacagcagctggatcggtctgcttggcctacaagcggcttcttctccatacaagaacgaattaccatggatcgattagctaggccaactgccaacaagaagattattttcgctccagattttattgctagtgtgatgatcaaaagaaaacgtatcgtttgacgaagtggagaattatgtgccaacccaaagaaagggggtttaggaattcatgattcagatatgaaaaacatcgcctttcttagcaagtggttatttcaactactcacggccgatggtgtctggcaacaattgattcgtaacaagtacttgggctcaaaacttgtgtcacaagttgagtttaaagctggggattcacaattctaggccagccttatgaaggtcaagcgtgactttttacattttggcaaattcattatgagagatggtgcccaaattaatcaggtttgggaagacaagtggttgggagaagcaccattgcgataacaatatccttgcctatacaatatagttaggaataaataggatactgtagcaaaagtgctacaaaattaccctccgaatgtatcttggtgaagggatcttattgggccaaaattagtggcatggaataaccttcttccacaaaccgctagcctagtgcttactgaggatcaagataagtttcatttggaatttaacccaaaatggagagttttcagtgaagtcgcattatcttgccttggtacattcagatttgccaaacataaacaaagtaatttagaaattaaaaatcagtggccacagaagccatatcctaattggtcaggatgtcacaattattatatatgctcctctgtttacctttttatttttcatttgtgatcatttaggttaccttacattcatgcaacatggaaaactttaatctgtcaagcagctttatggtttaagagaggtgggctgctgatagtgatagctcagtacgggtattcctccgcgcgtgtatatagtcctaagttaatttcctggggagggtacttctccgtatttatccccgtttgtatggtcatgacgggctatcataaggaacttggcagtcaggggtggcttctcgaagtaccagaagggcatcggaaagagggtattagctaattaatcttatagctaggatgtatgtataatatgtatactagaagtataggtatatattcttttctatttttctttcaacttagcttagatagtttaatataagaatgagtagtcttataattgtgtgtcattctaccctatgaattatattaacccctacttagactatggttattacaagtaatatataaattatttgtacggttttctgtactataatcttccacgggattaaacaaatacgaaatccttggaatactttcgggtgaaatgcaacaatggtatatccgtgcgcttgcggataaactctgtaaccataatataccaggagtatttctgtgccattgttgagaattatatttctagtgatgtcgttaagaaatactaacaagtatttctagcaccgttgccggggaagatttataaaagagattaccattactaaaactttatatttacctttgtataatcactgtcctttgcaggcaaaccttggttgttttcacttttattgtggaaacagggtagtgcatgactgctttcaacttgccagaaaacttcaaagaaaatccattggatttctttcgaagcgtcaagccgcgagttgtcgctccgcagaaaactcacccgacaaagaaaccaatcataccagcgccaccaactttcaagattatggctgacaagaccctcagtgaattcgttgctccctctgctgacaacgtggccactgggctgcaaatcaacatgggagatgtggatttgaatctgaagtccagcctcatcacgatggctctggctagcccgttctgcggcaagcttaatgaggatgccaatagtcatctgcaacagttcctagagatctgcaactcatacacgatgaagggggtcagttctgacactgtcaagctgcgactgtttccgttttccctccttgggaaagcgaaacaatggttttatgccaaccgtgctatgatcaacatctgggacaaatgttcaacgacattcctatcaaagttcttcccgatgggcaaaaccaacgcccttcatggaagaatttcaagtttccagtagacaagggatgagtccattcccaaggcgtgggaacgacttcaggaatacgtggttgcctatccttgtcatgggatggacgactggctgatcctgtagaacttttataatggactcactcccacgtctcgtgatcacctggaggtggcagctggaggaacctttttctcaaagacggtacgaggagccgtcgatctgatagagaaaatggtctccaatatgggctggagcgaggaacgacttcagacccgtcagcgaggcatgcacatcgtcaaggagacgggaatgcttgctgccaagctggacctcctcatgaaacgcttggatgaccatgagaagaggccacaaggctccatcaaggccttggactcacacgtcacgtgtgaggtctacggcagcacgggccactctgggaatgactacccagaaacccgtgaagatgtgatgtacatgggcaataacaacggattt

SEQ ID NO: 23878 - DNA, 2736 bp, Oryza sativa
tgttacttgagaagcaccatctggaagcacggctgatgtagaagttcagccagaaaagaccgtgccgtaggagtacggacacacgattgctgccatttcctcagagaagcaggaaactgtcaatagacaagcagttcgctcgttttgttgaggtgattcagaagatccacatcaacgtgccattgttggatgccatgcaagtaccaacatacgcacgttatctcaaggatttactcaacaacaaaagaccactcccaacaactaaggtggtcaagctgacggagcagtgcagcaacgtcatagtccacaagctcccagaatagaagaaggatccggggtgtcccatgatcacttgcttgatcgggacacataaattcgaccaagccctctgcgacttaggagcaagcgtaagcgtcatgcccaaagacgtcttcgataagctcaacttcacgatgttagcaccaagaccgatgcgcctacagctggccgactcgtcggtccgctaccatgctaggatagcggaggatgtaccggtcaagattcgggatttcttcatcccggtcgacttcgtggtgcttgacatggacactgaaaaggagatgccgctcattttggggcctccgctccttagcaccgcggatgccaacattggtgtgggaataggaagcatccgtttccgtatcaacaggaagaaagaaaaatttgagttccagccgaggaccgaacaatgctccatggtccagataaaatacgggccaaacccgtagaacatccaagtggtcgaagtggagcaacccaagacggacaacctagtgaagttcatgcagaatttcctggaaaaggaaataactattcccaggaaccgttattggaagatgccggtgaaacccaatacactggccaaaaagttagagaagccggctcagaggaagccgtctcccacaccaaaaccaaagaaggtgaggaaggaaaagcaaaagacgcccgctccatcacctccggaggtgggtggaaaatctgtgaactaaactgaagggaggtacggtcttgcacgttggacccaaaatggcacgacttcaccagcaggtaaattggtatgtaccggatatttattttcatcaatttgaacttttgcatcacacaagttttaatttcaaaatttgcatttaggattgaattttgaggaaattacttgaaatgaattttccagagcaaaccaaaataaaattttcaataaaaattcgctgtgccacgaccacactgaccgttgtaatccaacggccgaaagtagggctagttgggcccaccaggggttcggcccaaccagccaggccaacgatcgggtgcctctttctttgaggcaacgactagtgggccccacaggtcagttgtgaccgttgtgggtgcactatataagccaaccggccaggagagtgaaatccattccatttcaactcattttcattccctcttcaagctttgctctcaaagttcattcaagcattgctagtttacctcaaattcaaacacttagctgcataaaacaagttgctttggtgaagctaaccagcgggtgaaacttttgttatgttaaccccgcgaggttagtccattcttgtttcctttgtgcagaatgaggaggcgactgtctggtgatttaagaagggaccgggctctccgttaagtcatcatgacgagtctagcactcattcatctgcagacatctcgatggaggatgctgacgttccgtaacgtctcttgagcgacgccgacctcgaccttgtcggtgatcaggaaaaacaagcctactacatgctgaaggaccgtgagtattctcaagctagtggagtaagaacaaaatagaaatcagagtccggaagtcttcgggagagtttgggtacggctctagcagctctccttatttcttttgtaagacttgtactttatttagaatactcttctttatacaattctagtattgtagtactttcaaagtatatgaatgccagctttactttatatctgagttatattgattatactgctagcttatctgggggatgcaatggtacgggtatattgtttgcttgtgcaattactctatgtcatgacgatgatattagagtagtatctggtagtttaggcgaggtgtctaaaatactgcgtatcattattttgggttataagctgcggaagagaggtgggttgctgatggtcacagctccgtacgggtattccttcgcgcgtgtatttagtcctggttgtatggtcatggcgggctgtcgtaaggaattcggcagtcaggggtggtttctcaaagtaccaggagagcatcggaaaaagggtattagctagttaattttatagctaggatgtatgtataatatgtatactagaagtataagaatagattcttttctatttttttcctcttaacttagatagtttattatgataatgagtagtcttatacttgtgtgtcattctaccctatgaattatattaacccctgttagactatgttcattacaagtaatataaaaattatttgtacggttctttatactataatcttcccacgggagtaaacaaatacgatacccttgaatactctcgggtgaaatgctacaattgtatatccgtgcgcttgcggataaactctgtaaccataatataccaagtgtatttttgcgtcattgctgggaattatatttctagaaatgtcatttagaaata

SEQ ID NO: 23879 - DNA, 1157 bp, Oryza sativa
tgcttcttgtattgccacgcgtattggggaaacccaaacttccatggaacattggagcaaatgccccttgttcgtccacggtgttcttcatttcccaatgctttcgtgaggatgtcatcctcgcgttttggtgagcagacctcttgagaggcctgtctctcagcattcagttcgacctggggtacaattaggacgcgttagacgaagaacaagatatagcataatgaaacttattctatgtgttcaacttacgattttctggtacaccgcttgatcttcgggatttgggaacgaaagagttccgtctctattctttttcacccttgcccttgcccaattccttgcccgctggaccgggatatcaccaagcactggctgggtgttagattccgctgcagcttcatcctccttgtcccattctgcctgtttccctgcgtagcctccggtgccaagccggtgcgggtcaaggttcctggcctgcagatcacggtaggtctggcttttttcccgagactcattcattgatttggcggcatggaactcatcccacacgggtttggtgatgaatgggtatttcacaaatggttctggctgggctgggttgaggacgtacaccgtgaccagcgttgtcttgaaatttttccaacaattccccatcttgcggatagcctgccgcttcagtcatagctcggcctctgcagggtatcggaagctttccttgaactgcctccatgcctcttctttttcttcttgagggaccagatcgatgtggtccttcagaatagtgaagttccgcctccctaggactctgcatatcgtatggaactttttgacagctttcgtcggagccgtcggatacccaagatcgtccacctctgttatggtgtagacttccttaggaatcttattttgggtcctaggattccggctcgatgtagtcccagtagtggtcgtcgacatcggttcgccttgctgcgacatgtcctatgtcactgttgtacggggagaaagtactttttaaacacaaaattgcatctacacacattctcttatggtttgatgtacctctatctcctacctacgttcgcctcatcgacgaaaccatagcatccatactcaatagggccggagcagccgggaactcgacctcgacatca

SEQ ID NO: 23880 - DNA, 3578 bp, Oryza sativa
gatcccgtctgctccagccctaaggaatatggatgctacatatctgctgacgaggcggatgcagatagaacacacaggcaaccaaaacccttcctatccaagagccctaacattatcatcagcaaactcctagattgcgtcaaagatcatttcgttatggaacccttattcccatagatacagcaaccatctttggatactgaatttatgggaatggggttccataaagaaatgaccttgaaaacaatctaggatgttggtaacgataaaagatttctagaaatgttgtatttgaacaaaatgttctgtttaccaatttgtcttggtcggtaccgtgcaggcagtaacccgaccaaaccagatttggcaactaggacacttcgtattctccgaaatgccataatttcagtaacttcatttaataacagatttctattaatatacatcccatttccctcaaaatgacccaaaacagcccatactacacaagtcacatatatattattttttacctaaaataacacaagtcatgacatataataagtttggcctcagttttgcttagaaattatgcttcaattatcaccatttgcaactgcccccacccccaaaagaaattaagaacaagtgtagagggctgtccttatgcaaaaaagaaacagccatataaaaacatccataattattcaaccatcacaacccacatcaattcatccatcccattggaccaaaaatatcccaaaaattttgcaaagaaccatataagaataagtctatagggtctgtccttatgcaaaaaaagaaaaagatgagccatataaaatgatctcatactgccactcccccccaaataaaatgaacaagtgtagatggtctgttcttattgaaaaaacccaaaaatcacaagtgtatatggtctgttcttatccattaaaaacccacatttaaacctaaacaagaacaagagtgaggccggcccaaaaatgcatccattttgcaaaacatcccgtactgccactccccccaaataaaatgaacaagtgtagatggtctgttcttattgaaaaaacccaaaaatcacaagtgaatatggtctgttcttatgcattaaaaacccacatttaaacctaaacaagaacaagagtgaggccggcccaaaaatgcatccattttgcaaaatatcccatacagccataaaaaacataccaaaacacatttcccccaaaataattcaaccatcacagcccacatcaattcatccatcccattggacccaaaatatcccaaaaatggtatgttcttgagcaatcatcactggccattcatccatcatagcccacaatatttcatcatcacagcccacatctaaacaattttcatcacatcccattctcccccaaattcacaaattcatccatcacagccatataaaaatgtatcagtagctaacacatatagaaatgcaccagtcatcacagccatataaaaatttaacagtagctaacacatatagaaatgcacaagtcatcacagccatataaaaatttattagtagctaacacatatagaaatgcacaagtcatcacagccatataaaaatttaacagtagctaacacatatagaaatgcacaagtcatcacagccatataaaaattcatcactagctaacacatataaaaatgcacaaatcatcactagctaacaaaaaaattcatcactagcacaaggcatcatatgtagacattagcatctaaacattgaatcaacaaataatcgcactatcagattatcgaatttaaacattatcatcgaatcatcaaatcatcacatataacatgtacacagcaaatcatcacattatgcatcatcatcggtgaggagtacctaccttgcacggtggcgggctcggtgaggaggttgacgtgggctcggggacggcagtcttgggcggcaccgggctcggggacggagtggaggaaggtgccgggctcggggacggcggtcttgggcggcgccaggctcggggacggcgtggagggaggtgccgggctcggggacggcggtcttgggcggcgccgggctcggggacggagtggagggaggtgccgagctcggggacggcggtcttgggcggcgccgggctcggggacggcgtggagggaggcgccgggctcggggacggcgtggagggaggcggtggccgtcggggaggccggatcttgagcgggcccggaggaggtagcggcgtggaggaggtcgacggccgccgggcgtagatctggagaggaggatgtgaggcggccgtggtcggtgaaggacccgtggatcttcgagggaggaggaggcgacagcgttgaggacgaggaggcggcggcggtcgatgaagccggcggtggcggtcttgggcatggaggaggcggtggatctgggagagtgagagagtgagaggcggcgtcggcggcggataaggacccgtggatgaggattgactaagtaaaccctagtcaatcctcatctctatcgggcagactactatacccgatgcggatggcactcatccgtgacgggcgttagtattatgcccgatacaggtgatacctatccgtgacgggcattagaactaagcccgatagagatggaataatctctatcgggcatagtactaaagcccgtcacagatgacttattaaaatatttttaagttataaaaatcatttataattatcttctaccagatttaaaattgctattacatttgttatcacatataattaacaaatgtcttatttacatagtttaaaattcctattaatattttaaattcatataattgacaattgcctttctcacatatagttaaaattcatattactttttttaaattcatataattaaaaattggctatctcacatatagtttaaaataacaagtataattttttaaaaccacataattaacaaatccatttcttcaaatagttttaactggaatggcatgaaacatatgcaattcattcattaaggctccaatacaaattaaatacatcattcacagtgatatgccttccaaatggtgtgaacgaacgtaagccacttagtctttgggatcatcgtcaaggtcgatctgaggtctgacatgaagattcttgttgtattcttcttcatcgacgacgttgtccacccccacaattcttcgcttgccatccctaacaacgtgcatcttcttgtttgcagggtcttttatgtagaaaatctgttcggcctgcttcctagtacgaatggttagtctgcgtatccaaccttggccaggtccactaatgtgaagccttccttgtcgaccttgacacctgtgcggatattcacccaactgcaacgaaataaagggacttttaagttcagatagttcagctcccatatctgctctatgcggccatagtatgtgctcgatccagcctgatcctgatatgcatctagatggactccactgttttgcactgtgctctcacatcttgtgtgacggtataaactgtgtatccattgatatcgtacccttgccatgtatcaacctcccaagata

SEQ ID NO: 23881 - DNA, 700 bp, Oryza sativa
tctgttctgaacgtagaacttcagaattcccatgtacctctcgaatggccacatttctctcataaaagctggcccacatatttttgtttgcttcactaggtgaacagtgagatgaaccatgatatcgaagaaagctagtggaaaatacatctccaagtgacacagggtactgacaatatcggcctgcaacccatctaggtcttctggatctataatcttctgaccgattgcattgaagaaggcacaaagccgttggatcgtgtgacggacttgtggtggtagaatgcctcttatagcaactggcaagatctatgtgattagcacgtggcaatcgtgagacttcattccaaccaacgtacttacttattctcgcgcaatagcccgaaggaactttaatatctgccagacatgatagcattgcgatcttctcatccttcgacaatgtgtggcaagctggtgggaggtacactcttcccgtcctctcatctgtaataggctgaagttcactgcgaatgttcatctcctatagatcgagacgcgcattcaacccgtcctttgtcttgccaggcatattcaacaatagccccagcaagctatcgcacacattcttctctacgtgcatcagatcaatgcaatgacggacctcaagatcttcccaataaggtagccgccaaaatatggattttttcttccacatcct

SEQ ID NO: 23882 - DNA, 513 bp, Oryza sativa
cgtgatggagtatttgcatgagttcaacaatctggcccgttatgccccggaggatgtgcgggaagatgaggagaagcaagagaaattcctggcaggaatggacccagagctgtccgtccgtctagtctctggggactatccggatttccaacgtctggtggacaagagcatccgcttggaaccaagcacaaggaactggagtcgcacaagcgccgcttggcgaatttccgcaatcaacagggtgctaaccaaagggtccgctacaccaatccctatccagggggatcctcctcgcagcagcagccgcagcagcctcgctccgcgcctcgacctcaattcgtggtgcgcgtcccacagccgcagcaacagcagaatcaacaagggactcgtgcgccccgtcctcctacgccaactgtgcagcctggtcaaggccgcagggacgctcaaggtcagcagcgtctgtgcttcaactgcttcgagcctgggcactttgcggataaatgcccaaagcca

SEQ ID NO: 23883 - DNA, 9921 bp, Oryza sativa
attttcccctttcttgttttttttccatgcatacggcttccctccctttcttattatggcatgggccttcatgagacgatttaatcacaagaattttgcatatcttgctctcgaatttttcatttgtggacatactacacgatatgtatatggatggattgcatgataattaattaactagtaatagtttcttatttactcgagaaaaaaacatgattcaaaagtggtaagtacttaatccatctcctactcaaaacggttttttagataccttaagaaaaatagaaccctaaattattataaaataccatcatcccagctttagtttacccttaatcttacaattttgacaaaatataagtacccgtgcatgcgcgtgggccatcttcctagtaactttaaaaggaaatgctgactggattgccacgcgtacgccaggtaggacaaaaccgctctggattctgttgaaggggggggttaattcgtccggtataaaaagtttggggtgagtgatatctggttttcgggttaagggggtaattcggtcgatcgcgatagttcaggtgctaattcgtactttttcctttatttatttgtgtagagagtaaatgttcattgtggaatgttctgcatgcatacatgcaaccaattaagattaatttctattagttaaactcacaatgtttaaagtgtgaataaatttttgttggacacgaagtgacggagcacattgattaatgtggattaatttcaaaatgatggatattacatttttttttattttgtgcactttgcttagaggatgatcaaattagaatagaatagagggagcagttaaatgtgtatctgctcctgcataggaaaaatactccctatgtttcatgttgatcatcatataaccaatgtccgaccggcggcgtgtgacccacatatgccttcatgtatgtcgaggaggagttgtctgccgtcgtcggtagagacgcatttgagaagtacaccgtttggcgcttttttgtataaatcgttaccgaccatacaatagatctttgctttacgggttattttctcggcctctgtatcgtcctcgggcaactcctcgctgctgatgaatttgattaatgggatgcgccagtcgtctgtggtttcgatgtcagcaacggcgcgttctgcctcgatgacctccgagctgatgtcgggggtgttcgggccaacttcgccgctaacttctttcaccgatggcttcgtcaggatatcgagaaaggtgtcgggctcgagcggttcttgtctggacgcgcgtcgtgctaggtcgtctggctcgacgttgtctttgcgatagacgtgtcggacctcgatcccatcgaacctcttctctaacttcctgacttctgcgagatattttgacaactcggggttagagcatttgtagtctttgtgcacctggtttgtgactagttcggagtcccctttgacgattagtcgcttggctccaagtacggctgcagctcgtatcccggcgagtagtccttcgtattctgcagtgttattggttgccctgaagttgaggtggattgcgtgcttgaattgatctccggagggagatgttaagataaatcctgcccctgctccttggctgttgagtgcgccatcgaacgccattgtccatgtttcattgtcaccttggttgtctgatttgttatctggcatagtccaacttgcaacgaagtcggcgagtacctgggatttgatggcagttcgcggcacaaaatggacatcaaattggcttagctcgactacccatttcgcaatgcggctgacgacgtctttgtttctcacaacttcgccaagggggaaggaggagacaactgtgactctgtgggcttgaaagtagtggcgtaatttccttgatgtcatgatgattgcgtaaagcagtttttggatctgtgggtatcttgtctttgcgtcatggagagcttcgctgacgtaataaactggtcgctgtactttctctctctcgacgataatgacggtgctaacggaatatggcgtggcggcaatatagagaaataattcttcattaggttggggagcaacaagtacaggggggtttgataggtagcgcttgaatgcaataaatgtctcttcggcttcctgtgtccatacaaatttgtcttgtttcttcaacaaagcgaagaaaggttgtcctcgttctcccatcctagcgacgaatatgcttaatgctgccatgcaaccggttagcttttgtacctccttgagtcttgtgggcgacttcatgttctcgattgctttgatcttctcgggatttgcctctattcatctgccagagacaaggaatctgagtagcttgcccgacggtactccaaacgtgcacttctcaggattgagcatgaggcgatatcgtcggagtttgtcgaacgttttcgcaatgagtcgcttgtcttggttttgacaacgatgtcgtcaacgtaagcctcgacgttgttgccgagctggttgctaagtgcaccctggaccgtgcgctggaaagtattcccggcggttatcagtccgaaaggcatcttaacatagcaaaataccccgaacggcgtgatgaacgctatcttctcttcgtcctcttttgcgatgctgatttggtggtagccagagtaagcgtcgaggaagctcaatagctcgcaaccggctgttgaatccaccaattgatctattcgagggagaggaaagtgatccttagggcacgccttgttgaggtcggtgaagtcgacacatattctccattttccgttggccttccgcaccataactggattggctagccactctggatgaagtacttctctgatgaagccagctttgagaagttcgtcgagctcttctcgtatggcttgtttccggtctggtgcaaatctctgcagtctttgcattactggcttggcatcgggtcacaccatgagtttgtgcccaatcacctccctggggacccccggcatgtcggacggctgccaagccaacacatcggcattatcacggaggaacgtgatgagcgcgagttcctatttctcgtttagtgtcgccctgatcttgacagtcttgtcggggttagccctggagagtggaacgatcttgatggtgccgtccggcttcggcgtcttatttggcttgctcactttcttgggtggctcagtcgtggcgggtgggctgggtgtttgctcgaccatgtcgaggctccgcttgtcgcactgcaccgccagctttgcgttcccttgaataatgattgttcccttcggtcccggtatcttgagcacttgatacgcgtagtgagatgcggccatgaacttcgcaagtgcagttctcccgatgatggtgttgtaagctgtatcgaattcagcaacatcgaaggtgatctgctctgttcggaagttgttggcttggccgaaagtcataggcaacgtaatcttacccaaaggtctagacgatgattggggagtaattccatggaagggttgatcggttggtgtcaactcactttgcggaagtcccattgcgtccagagtgctggtgcagagaagattgattgagctgccaccgtcgataagaactcgcgctaccttgatgttctgaatagtgggttcgaccacgatcggatatcgtcctgggatgacggaggttttggggtggtcttcctctgagaactctattttctgctcagaccacttcatcttgggtgcagccccctgccacgtcgaacagacttcacgttccactttcttgtattctcgcttggaggaatacgttgtggagccgccgaagatgtgtgagacgtggaggtcggagtctggatacgcagaatccggttcgtgaggaggcatctcttcgttcttctcgacaacgcgtactcgcttgcctttttcaaacgccatgtgcttctcgagcgactttttgaaaccaatgcaatcctccagagaatgtttgtccgttttgtgtatggggcaccatgatttctttgtgtcgctgccttgtgggtctgggcgcttgggagggttcgcgtattctgctgcgaggacttccgcttgagctttccttttcctatttttgtgatttttcttcttgcttgactcagatgcgtctgcggctggtttcttctctcccccggtcttcggtttgtcgttcttgcgtcttagcgcgtcatccacatgggcgcatcactcaacgatctcgaataatctccgagtagttgtgatgcgtcttgtcggcaactcctgggtagtgtagcgatctctgacaccggacttgaaggtgcgaattacagaagagtcggtaatttcgggaattgtgtttctgcactcgttgaagcgccgaacgtattccctcaatgattcccccgagttctgtgttaacgcgtgtaagtcgtcttcgatcgcgtggtgcttgtatgttccttggaaattggcgacgaattgttgccacaggtctgcccatgaagagattgagtaaggaggaagatgcatcagccatgaacgtgcagaacccttcaacgcggttggtaaatagttcgctaacgcgttgtcgtctgctccggcagcatagagcactgtcgagtagacttgaaggaattcttctgggtcggtgctcccatcatactttttaatggctctgggtcggaatctctcgggccatcggacatcacgtagggaacgaccgaaagccctacacccagcgttgggggcggtgggttgtcggcggtcgcgtgaccttcgtggatgtctgtctgacgatgaagaggatgcggatgatgacgatgacgatgggtcgcttggttccagcgtacggttacgaggatgatgacctggatctcgggaatcctctcgttgtctctcgctgttgtctcggcgccgatctccatcgtcgtcgtcgttgcggcgacggccatgaccagtattgtctggcccccgttgttcgcgatcgttgtaatctcggtcctcgtttgggcggtttcctcgatcatggcgccgtgaagagacatgacgccgagagcgatttgcgtcgtcccgtgtgcgtcgtgcttttcggcgaccgttgatttgatctcgaagatcgccagtgccacgaggtggaggggtagcctgtcgaggtaattccctctgctccggatcttcaccattggcgtcgccgattcgtggctgatcttggtgtgctgcggtagcggcttcttcaaacgcgttgctgaggttggtcatcgattcccgtaatcgttctatccaacacttgaggtcgtcgttcagaacgggatcgtaaggagtttccctcagtatagcttgaacagccctgatgtgctgggctggagtagtcgattgattcgccgcttcagcgttggcttgcgctgacgtgccaacgccatcgatagccaatacctcccgcggcgcacttgttgtcgatgacccatagtcctcgaggagatgtaagaccgatggttcgtgaggatcgtgtcacgtcccaaatcgactctaaaatacatcctcgaaattgtgccgagaataattaaaattcatgtgaaagcctccaacaagtaaaatgtgcaaatttaaaagtcaaataaggcttggaggatttttgtatatttcctaaaagcctaaaatgcgtaaataaattttagtggaattttcagagcacaaataataattgagaagaaataaacaaagttgaaaaggtttataaaaagaaaaaccctaaaagtcttctttccccccctttccctcgtgggccggctcggcccaactctccctccctctctctctcctctcctccgcggcacatcggcctcctccccgcgcgcgcgccgctgacaggcgggcccgcccgccaccctcgctgacgggtggggcccacctgtcatcccccacctcgcgccgcgcccgccgcccgcccgtgccctagcgccgccgccgccgccgaatccgccgcatcccgccgtccccgcgcgcattaaagtgggggggattattccccgcgattccctctcccgtttcccccactttcccctctctctctccctcggattcgctcggattcattcccgaaatcctcgccggcgtcatcaatggagccgagatctccgcgcccgtttcctccctctccggccgctctctctcactcccgacgctatataattgttccccgtgcctctctcctccgtttccgccgctcgctgctcgctctccccgtcggattcgtgctcgcgccgttgtactctctctccaccgtcgccgccgagctccggttcgccgccgtcgtcgctccggacttcctcccgtctcggcgtcacctccatcggcttcgccgcgtcgtcgtcgacctcgtccgccccttcatttcgcccgccgaccgccggagcaccgtcgtcctcgccgtcccgaaccgcgccgccgctttcctccgcttcggccgccgttcccgtcgtcgccgtcgacccggggtgagccgaggaccgcctctttcgcttccctcgcctctccgctctctcggccgccgctccgtcgcgccgttggtcgccggcggtgaccatcggggcgcgggcgcgccgtctcccgtcggccgtgccggcgaggccgccttcgggcgcgccccgcggctgccaggtgggcccggccgtcagccgcccgcgcccacgggtgcggctgacgcgtgggacccacagcgccggccggcgtcagccgcgtgcacccggtccaccgtggaccgagaggctgacgcgtgggccccactcccgtggacccggtccgcgcgccctctctcccggctgacgcaataaacgagtttttaattaaaatttaaatgaagaaattcgcaaatatccatttaaagagcatataaacttcaaatggccataacttggccatttgaactcggaattggaccgttcaagtctctaatttttccttaagaagtcaagaacccatttttgtgctttgtttctgctgttatgtggaatttattagagtaaaagccttttcttttccgttggtcgtgtagacgctgcagcttcggaagatccgctcttcgtggaagttgaagccgtcggttgggaaagcgagcaaggcaagtcacatcatctttgaacatattgaatcccagtttgtaaaattatgttgatttaaattattgcattatcgctttatttaaattcccgcgttatcactgttttatttagccatgcctatttacctttgttatgaccatattattattgttattgttattattattaccttgttcaccctagattaaacaaaacctcaactagtggacactctactcatggcaccactagtttaaatttaggtagatgcttcgcaatttaattaggtaacattaggcggttttacaagtatagactttgggaaatattcatatcacctggatactctggaattgttggattattgtggaattggattcacaccgccccctctattcaaaatccccaaaagtggttttaggctgggctcggggtgcatggttttgatagtagcacctcggccatataaggaccggtcttcgggcctctgttgcaaagcactaccgtacttccacatgtctagtgggtaaggcttagtttgtggctcagtctagtcataaacaatagtacacggattggagatggatgaagtcgggggtcgatggacattctccagggcaaatgaaggctacacgagctgcggcccggtagtcgagatgtcatggcagagggttggtgccctgctgctaggggctcagtcttgcctgcctgtcccgggggttccggccataggcgggattgggtcggtactcttgtctatggctaggatgggttggaaactatgtcacgtctttcgtctgtataccgtggtggtatgtggcacgtggttacacgtgaggaagatgtgtcttgtgggcaaagatgtacacctctgatcagagtataatctattcgaatagccgcgccctcggttatgggcaagccgagcaatgtacccaagttagtgttttaattcttaaaacttgcttaacaactaaaatatggaatggttggcctgggttggcttgggacgagctgggacccagggtcgggttgccagttcggtctgaatcatcataggccttgggttaaggcaggttcgtgtgggttcacggccttgattaataacattgtatagttctaggatcgtgtttacaaaatagctttgagcaactaaatgtctttaaatgctgtttactgcaaccctaaccctttatggtataattcccttgtactcccttgcatttattctgcatttgtgggtgtgtcttgttgagtacggtggttgtactcagtcttgctcaatttttcccaagcccagaagaggagctccttgaagatgaaggctttggtgtctagctcgtgcctgccgtcaagcgcctgtggtcgtcgccctagtcttccgctgtttcccgtttgtctttgtgtgtgctgggccttcgctgcccatgtaataagttaactatttacgcttccgcttgttaaactctgatttgtatcaacttttggtgtaccttgcctcctgggacaaggattaatgcacgcacgtaaggaatgcccgttgggttatttctggtcgtgacaagttggtatcagagccccccttgaccctaggacgagccgtagaccccaagccttagcaatattttcaaaaataaaaatcctttgttatttgtgaaaactgtctagtctctctctgtcttgctgcttcacttatcatcaaaatctgacctttaaaatgttgtttctctttttgtttttgtttgtagatggccggcagcgtcacccgccgtggtttggacatgactggcttcgtcctggagctgcggggcatgtgcgtggtcttagggtacccacatggagtggactaccaggccaggccgcttccggatcaggagggagacgacgcggagccccacgctggttgggaggtcactgctgtgatcctctctggctctcccgagcggacttcgctggcagtcaccgcgggtggagattccttccccgccgcttgccagaacgccgctctcctcgccatcggcactcttcaccagcgctacccggacgagttgcagcactcgccctaccgctaccacccccgtcgcggaggagcctgcgactacgccaccttccgggatgctagctcggaggatgacgctaccatcgtgcacctggcgcgcatggtggaggcgtacgacgcggctcgtatcgacttccatcagatggtgcgccgcgggatggtcgagaacaacatgaagatcctggagctgcaccaggagaatctgcagctcaagaaggacctcgacgcggtggaggcgcagctgcatcagctcaagatcgcccagggagagatctgccgccccaagcgccgtcgtgtctgccgcagccagaagatcaccgcccgcaagagcacctccaggcccgagcttgttcgtcagtccctggcgtggacttgcttcgtcgagacccctcgtgccgagcccgcgcccgtggttccccaggagggggaagcctccggcgttggtagcacggagggtgcgctgttgctcaccttccgccctggcccgtcgcagcggtagacgagcagttagtaggcttgcgcgtgtgttctttctcgtttgtcttcttgttgagtcgtgtggggcatggttatgccggtgtgtggcataactatgtcggagcctgccttattttattcgcctaagcaacttgaactttaatgaaccaattcaatagcagtaataaattcaagaattatagtagtcgtgggtggttcgtttaattgttagctctttccctgtttgctggttctgtgtggggttttcagatggtgacgaccagaagaaatgctg

SEQ ID NO: 23884 - DNA, 10201 bp, Oryza sativa
atagtagcacctcggccatataaggaccggtcttcgggcctctgttgcaaagcactaccgtacttccacatgtctagtgggtaaggcttagtttgtggctcagtctagtcataaacaatagtacacggattggagatggatgaagtcgggggtcgatggacattctccagggcaaatgaaggctacacgagctgcggcccggtagtcgagatgtcatggcagagggttggtgccctgctgctaggggctcagtcttgcctgcctgtcccgggggttccggccgtaggcgggattgggtcggtactcttgtctatggctaggatgggttggaaactatgtcacgtctttcgtctgtataccgtggtggtatgtggcacgtggttacacgtgaggaagatgtgtcttgtgggtaaatgtcacaccctaaaaattcaaataatataaattgttgtttaaatggaatttctagaatttattttaaaagtcttgaaaagaaaatctaagtttaattaataaattccaatataaaaagtggccagataaaatttcattaaatactttgcttaattctataattcctagatttttctgggatttatttgagctaaggaagtatttttaataaatggaattgcatttaagaaataatttaaattgaaaaagttttaaaaagtcttcttttggctttgggccgaaagtcggcccaaaacctctcttctctctcctcggcccagccggcccagtcagccgcgcgcgcgcgccctcgctgtcgctgacaggtgggtcccacctgtcaggcccgtcgtcttcctcgggccgaaaccctagtttcgcgccgccgagctgccgtcgccgccgctttccaaatccggccgttcctttccttctccggccgatttgttagaggggaaatgatctccgggatctcctctaccttttctcctttggaatctttggttaaatcgctttggaaagctttggaatcgagttcgattcggatcggttttccctctctccaagccgaaggtttccttcgccgttgccgtcgccgtgggccttcgccgccgcctccgagcccctttaaaaggacccccggtgtctcctctacccgtcgccaccctcgccttcgcctctcgtcgccggaagagctctagcgccgtgtgccctagcttcgccgtcgccgccgccgcttcagccgtgctccgccgtcgctccagctgtcgccgtcgctcgggaagaccgccgtcgtcatcgccaagtcgccgccgtcctcgtccgccccttcgcagccgtcggaacccgccggagcttcgtcgccgtcgacaacccgaaggtagccgccgcttccttctcgtcgccgtcgtcgtccattccttctccgccgccgttttggtcaccggtgtgttcgccgtgttgtcctctacgtgctggtgccctccgttggtgccgtggtgccgccgttcgccggtgagtgtgcgccgcccgagccgtcttctccgccgagccgccgccgccgtcggtgacgtcattgctggcgtcatcagggccgttcgccgtgaaccaccgtggacccgatcgatctcggccgtccgatttggatcggatcaatctcggccgtccgttcgtgtgaaccgccgcccatgcgccggtccaccaaaccctagcccgctgacgcaataaatccccttttccttttcaaaaataattcattattgcgtcataattcaatttaaaccgatttaagtgttttaatccgatttaatctttaaaaattcataactaattcatcttagctccgatttagttggttcaagtctctaaatttttctaaaattgagatctacacattaaaaatatccacatgtactgttcatgcttgtttatgtgctgttttggtgattttgctcttttctgcttagattccgtcgtttccggagagtccgttttcgcagaagaagagtttgaagagttccaaggccagcaaggcaagtcacacagatcccaaacaaccctttgagcatgttgatcctatttaaagctattgtttctattcaactattgcatctattttcgaatgtcattgggtggaattgacctattctttgttatggcccttttgtacactgattaccttattccttgataccttgggttatattaatttgactagttgagctttatttatattggttcaactagatattagatataattgcttagccctgcttagaaacattagtacacttatgggataactaatgactcactattatttcatgatggcttattgatagttcacgatggtcaatcgtgattagttaattaattaatgtgccaactaaaacctggtaatggtgggttgtgagcacatggttttgatggtcgtgctcatggcaattaaggaccggttcacgagtttcggttgtgaaacatttatcgtgccaaccacaagccagcatgggcaacggctttatcttttgtatagcatggttcattgcggggcaccagactgagaagtggcggagataagcccacgggggtcgctggggagtccatgccttgtttataagggggtgattatgatccaggaaggtgcgctgtagtgaattgtgttatgcgaggggtattgtcacaactcctttccgagataccgtggtggtattgaggcacatggtgacatgatgtggggttgtgtcttgtgggtacagtggtacacctctgatcagagtaaaactattcgaatagccgtgcccgcggttatgggcgggtctaacaatgtctttcgtgattagtctcacacctctcatcattgtaaaagatgcttaaactggtaataatttgattagctcctggtttggaatggtacattcctggtttggagatagaactgtgcagccggggtggttgttcagaatggttgggcctatacaacagggtatgttgtatagcgttggattaatattgcttaattattacttaactgttttatcaaattctcaaatgtttgctaaatgctgcttttgcaaatggaaccctattatgccatcctttgttatcctgtgcacttgcatatttgctgcgtggcttgctgagtatgtcatatactcaccttgcaatcattcatcagaggaagagttctacaatgaggctgatggtgtggaggattaggtgtagccttggtcaagctgcctgtggagtggagccgtctgcgccgtttatttaatttccgctgctagaactttattgattgagaggaactatctacctctgtaatgacattatattcgcttattaattagagtaatatttgtactctattatcaatttgttattgtgtgcctcggctgattcctggacgagggttcacacacatgtaagcgtttggaattttggatagaaattccgggcgtgacaagttggtatcagagcctctttgaccctaggttatgccaaatggttacccatagaagccctctgaaaaatattggaaaagtagaactgttctcctccctttctcttttaattaaaccaaactaatggcacatgcacttcttaaatctcttttaatggttctcattcgaaaatttattccagtattattagtactgtacatccattactgtactaatggctcatttttcagcaaaagttttacaatattgttttatttaatcctgctgcaataaaataaatttaacaagttgattttataactttcttttgaaacctgttgttaaaaagtacaaaatttgtaactttgttttcaactatttcaaattatcttgcaagtttggtttactttatttacttaccttttactttgatttctaaactttattcaaattaatccaaaaacttgtgctattaattggatagatgtcttaactctctcctttcacttgtctttagatgccgcgctacaagcctgagtacctgtttggtgttgaagggtttgtccaggagttgcgtactatgtcctttgtcattggatttggaactgcccctttttatgcccagattcgtcatgatcgtcatgaagagaggtgccgtgtcaaagtcaccttaaacagtaatagtgaagatattccatcagtgatgttcgaagctggaggaagaaattatatccatgcatgtcaggaagtggcaaggatcgccataggagagctccgtgaccgctacagtgatcagttggccgatactgagtatcgctaccatcctcgccaaccacagggaagtgaccgtggcagttaccttgagactgaaggaattgagaatgatgctaccacaaggcatttggttgagatgctgtgggctatggatgaaagtcgtgcggagactgtgttagcggctcaagatcgtgaagaccggaatcgtggtaagatttgcaagctagaagacaaggtggatcgcttggagaaggaattagccgcattgaagggagaagcaccgccgcagaaggccaggattcgtctcaccgcaaggaagagaactttgtttgtccctcgttatcaattggcgccaaagatccgcgtggtggagaaagaagttgccccagcaaatcctccggtcatcatcataagtagtgatgaagaagaagaatctaagcgcaaccattccaagattgagtgggtagcaacccaagatgatgaagacgagccttcaattgacctccgatgcttggaagaactagagtgacttgttaagtcgttgtcttagattgttgtgttagtttgcttgcttaaagtttgcttgtgtgtgtctcgcatgtgatttacatcagtggtgggatgtaattgcatgtgtttgtttgcttctgagtgttaggaagttggtgagtttagtggtgtgagagtcttcagtttgtaataatgaaactcagttaagatcaataaaagttaaagtaattctctgtcctaagtagtttccccggtttctcttcttgtgccctgtccatgccagatggtgaacactcgcagcaacgggaatggtcctaacctcaacaaccccaataacaacaacaatggagagaatcccactcttgctcaagttcttgctcaacagacacagcttatgaacatgatgatgcagcaatttcagaatcagcagaaccaaggaaataaccatgtacctcctcagaataagttagcagaatttcttcgtgtgaggccgcctgttttctctagtaccactaatcctgttgaagctagtgattggctgcatgccatagagaagaagttggatttacttcagtgtactgatcaggagaaggtctcatttgcatcacatcagttgcatggccctgcctctgaatggtgggatcacttccgccttaacaggactactgctgaacctatcacttggcttgaattcaccgctgctttccgaaagacgcatataccatcgggagtagtgtctctcaagaagaaggagttcaggtcgctttcccagggatctcgctctgttacggagtatctgcacgagttcaatcgtcttgctcgttatgctccggaagatgtgcgcaatgatgaagagcgccaggagaagtttttgggaggacttaatgatgagctttcttacccactcatggttggagattatcctgatttccagaaattagtggataaggctattcgtcaggaggacaagtacaatcgcatggagcagaagaaacgtcggattgctcaattcaagacacaacagggaaataatcagaagccgcgtcttactttaggaccccagcccatgccacagggaggttcttcgtctgttgttcgtccgcaacgtcagttcttcaacaacaatgctggcaacaacatccgtaatctagctccacgtcctgttgcagttccagcacagcaacaacctgccaagagggagcaaggcaacaagcccgtggtgtgtttcaactgtggagatccaggacattatgctgacaaatgtccgaagccccgacgcgtgaaggttgtccctgcccagaataactctgctgtaccaacatccaaggctcgtgtaaatcatgtcgctgctgcagaagctcaagatgctccagatgtgattttgggtatgttccttgttaactcagttcctgcaacagtgcttttcgattctggtgctacacattcattcttatctatgagttttgcgggaaatcatgggatggaagtagaagaccttagatgtcctttgatggttagtaccccaagtaatcaagcactctctttgcaacgtagcccctctgtcagaatagaaattcaaggagtaccatttctggccaatcttatcttgttagaatccaaagaccttgatgtcatcctagggatggactggttagccagacataaaggtgtgatagactgtgccaacagaaaagtaactctcaacagctatgatggtcgagttgtaactgttcatgcattgtcatctgagtctttaaggtcaagactgaaccagataactttggaagagattcctatagtccgggagtatcctgatgtgttcccagatgatttacctggtatgccgcctaaaagggatatagagttcagaatagatttggtacctggaacaactccgatccataagagaccttatcgaatggcagccaatgagttggcagaagttaagaggcaagtagatgatttgctacagaaaggatacatcagaccgagttcatcaccatggggagctccggttatttttgtggaaaagaaagaccatactcagagaatgtgtgtggactatcgtgcactaaacgatgtgactattaagaataagtatccactacccaggattgatgatttgtttgatcaacttaaaggtgccactgttttctccaagatagatcttcgatcagggtatcatcagttgagaatcaaagaggaagatatacctaagacagcttttaccactaggtatgggttgttcgaatgtactgttatgtcttttggacttaccaatgcccctgctttcttcatgaacttgatgaataaggtgtttatggaatacttagacaagttcgtggtggtctttatagatgatattcttatctactctcgaaccaaagaagagcatgaagaacatcttcgccttgcattggagaagctacgagaacatcaactgtatgctaagtttagcaagtgtgaattttggttgtccgaagtgaaattccttggtcacatcatctcagccggaggagttgccgtcgatcctagtaacgtggaatccgtaaccaattggaagcaaccaaagacagtttcagagattcgcagtttcctaggccttgcaggatattatcggaggtttatagagaatttttccaagattgctaagcccatgacacgactgcttcagaaagatgtgaagtacaagtggtcggaagaatgtgagcagagttttcaagagttgaaaagtcgcttaatatcagctcctattttgattttgcctgatccaaagaagggttttcaagtgtattgtgatgcatccaaacttgggttaggttgtgttctgatgcaagatgggaaggtggttgcctatgcctctcgacagttacgtccgcatgagaagaactaccctactcatgatattgagttagctgcagtcgttcatgcattgaagatttggcgtcattatcttttcggtactcgtacagaagtgtacaccgatcacaagagtttaaagtatatctttactcagtcggatctgaacatgagacaacggagatggttggaattaattaaggattatgacatgggaattcattatcatccgggaaaggctaatgttgtagcagacgctcttagcagaaaaggctattgcaatgctacagaaggacgacagttgccattggaattatgcaaggaatttgaaagattaaatttgggaattgtcggtagaggtttcgttgcagccttagaagcgaagcccactctaattgatcaagttagagaagcccaaattaatgatcctgatattcaagagatcaagaagaatatgagaagaggaaaagctattggtttcttggaggatgagcacggaactgtatggttgggtgagagaatctgtgtccccgacaacaaagatttaaaggatgcaattctgaaagaagctcatgatactttatactccattcaccctggtagtactaagatgtaccaggatctcaaggaaagattttggtgggcaagtatgaagcgtgaaatcgcagaatatgtagcagtatgtgatgtttgtcagcgagtcaaggcagaacatcagaaacccgccggtttgttgcagcctttgaagattcctgaatggaaatgggaagaaataggtatggattttattactggtttacccagaacgtcatcaggccatgactctatttgggtgatagtcgacagacttaccaaagtggctcatttcattccggtaaagacaacttattccggaagtcgcttagcggaattgtatatggcaaggattgtgtgtttgcatggcgtccctaagaagatagtgtctgatcgaggcagtcagtttacttcaaatttttggaagaaacttcaggaagagatgggttctaagctgaactttagtactgcttatcatccgcagacagacggacaaaccgaaagggtgaatcaaattttggaagacatgttgagagcttgtgctctagatttcggtggaagttgggataagaatctaccctatgcagaattttcgtacaacaacagttatcaagctagtctacagatggctccgtatgaagcactgtatggtcggaagtgccgcactccgcttttgtgggatcaaacgggagaacgtcaggttttcggaacggatatcctaagggaagcagaagaaaaggtaaagatcattcaagaaagattgcgtgtggctcagtctcgtcataagagttatgccgacaatcgccgtagggatttgagttttgaagaaggagattatgtgtatcttcgtgtcacgcctctacgaggagttcatcgttttcataccaagggaaaattggcaccgcgttttgtgggaccttataagattgtcagtagaagaggagaggttgcttatcagttggagttacctcaatctttggcaggagtacataatgtgttccatgtgtcgcaattgaaaaagtgtttaagggtacctactgaagaagctaatattgagcagatagaagtccaagaggatttgacttatgttgagaaaccaatccgtatcctggaaacaaatgagagaagaaccaggaatcgagttatccgtttttgtaaagtccagtggagtaatcactcggaagaagaatcaacttgggaacgagaagatgaattgaagtcagctcatccgcacctgttcgccagttcttccgaatctcgaggacgagattctgtttaaggggggtaggtttgtcacaccctaaaaattcaaataatataaattgttgtttaaatggaatttctagaatttattttaaaagtcttgaaaagaaaatctaagtttaattaataaattccaatataaaaagtggccagataaaatttcattaaatactttgcttaattctataattcctagatttttctgggatttatttgagctaaggaagtatttttaataaatggaattgcatttaagaaataatttaaattgaaaaagttttaaaaagtcttcttttggctttgggccgaaagtcggcccaaaacctctcttctctctcctcggcccagccggcccagtcagccgcgcgcgcgcgccctcgctgtcgctgacaggtgggtcccacctgtcaggcccgtcgtcttcctcgggccgaaaccctagtttcgcgccgccgagctgccgccgccgtcggtgacgtcattgctggcgtcatcagggccgttcgccgtgaaccaccgtggacccgatcgatctcggccgtccgatttggatcggatcaatctcggccgtccgttcgtgtgaaccgccgcccatgcgccggtccaccaaaccctagcccgctgacgcaataaatccccttttccttttcaaaaataattcattattgcgtcataattcaatttaaaccgatttaagtgttttaatccgatttaatctttaaaaattcataactaattcatcttagctccgatttagttggttcaagtctctaaatttttctaaaattgagatctacacattaaaaaaaatccacatgtactgttcatgc

SEQ ID NO: 23885 - DNA, 9143 bp, Oryza sativa
gttgttcagaatggttgggcctatacaacagggtatgttgtatagcgttggattaatattgcttaattattacttaactgttttatcaaattctcaaatgtttgctaaatgctgcttttgcaaatggaaccctattatgccatcctttgttatcctgtgcacttgcatatttgctgcgtggcttgctgagtatgtcatatactcaccttgcaatcattcatcagaggaagagttctacaatgaggctgatggtgtggaggattaggtgtagccttggtcaagctgcctgtggagtggagccgtctgcgccgtttatttaatttccgctgctagaactttattgattgagaggaactatctacctctgtaatgacattatattcgcttattaattagagtaatatttgtactctattatcaatttgttattgtgtgcctcggctgattcctggacgagggttcacacacatgtaagcgtttggaattttggatagaaattccgggcgtgacagtaaagatgtacacctctgatcagagtataatctattcgaatagccgcgccctcggttatgggcaagccgagcaatgtacccaagttagtgttttaattcttaaaacttgcttaacaactaaaatatggaatggttggcctgggttggcttgggacgagctgggacccagggtcaggttgccagttcggtctgaatcatcataggccttgggttaaggcaggttcgtgtgggttcacggccttgattaataacattgtatagttctaggatcgtgtttacaaaatagctttgagcaactaaatgtctttaaatgctgtttactgcaaccctaaccctttatggtataattcccttgtactcccttgcatttattctgcatttgtgggtgtgtcttgttgagtacggtggttgtactcagtcttgctcaatttttcccaagcccagaagaggagctccttgaagatgaaggctttggtgtctagctcgtgcctgccgtcaagcgcctgtggtcgtcgccctagtcttccgctgtttcccgtttgtctttgtgtgtgctgggccttcgctgcccatgtaataagttaactatttacgcttccgcttgttaaactctgatttgtatcaacttttggtgtaccttgcctcctgggacaaggattaatgcacgcacgtaaggaatgcccgttgggttatttccggtcgtgacagatcgatatcgattaccctaacgaatcgatctgaggctggagtcgctccttgttccttgccgttatccctgatggggacgtatgacttaggagacggagttttcatggcgccgaggaggactttgcagctcgagaggtcgtgattctttgtcttgtgaataggacaataaacatcccgagttggagaagtacactgaatttgtcacgcccgaaaattcactagtaatttccgaacttatttgtgcataaaatcctcgtccaggaatcagccgaggtacacaaactgacaatttaatatacagattcatcaaattaactaaaacgataaatacttacttatgaggcacttagtcctcatcatgaagaaaactgcagcggaaaataaaatctagcgaagctccggctccactcccacaggcagctcaactggggtataagccaaacgtcttctccttctggattctttttcttcaactgaggttgattgattattgcaaggtgagcatatgacatactcagcaagccacacagcaaatatgcaagtgcacaaggataccaaaggatggcataatatcggctcatttgcaaaagcagcatttagcaaaacatttaagagaagtaaaacagtggagtaattaatcagaaattttaaccaacactgaacagcacacccatgctgcacaggcccaaccattctgaacaaccatacccggctgaacagatctaactccaaaccaggagctaagcaaattattaccagttataacatctataattatggtgagaggtgtgggactaatcacgaaaaacattgctcaactcgcccataaccgcgggcacggctattcgaatagttttactctgatcagaggtgtaccactgtacccacaagacacagccccacatcatgtcaccatgtgcctcagtaccaccacggtacctcggaaaggggctgtgacagtaccccttgcataacacaatccaccgcagcgcaccattcctggatcataatcacccccttataaaacaaggcatggactccccagcgacccccgtgggcttatctccgccacttctcagtctggtgccccgcaatgaaccatgctatacaaaagataaagccgttgcccacgctggcttgtggttggcacggttaatgtttcacaacagtagctcgcgaaccggtccttaattgtcatgagcacgactctcaaaaccatgtgctcacaacccaccattatcaagttttagttggcaagtaattaattaaccaatcacgattgaccatcgtgagctaccattaaatataaccataaatgatagtgaaacattagttatcccaaatgtgtgctaatgtttctaagcatggctaagcaatcatatctaatatctagttgaaccaatatatataaagctcaactagtccaattataatcacccaaggtatcaaggaataaagtaatcaagaacaaaagggccataacaaagaataggttaattccacccaatgacattcgaaaataaatgcacagttgaaataaatagagaatttaaatataggatcaacatgctcaaaggattgtgtttaggatctgtgtgacttgccttgcaataatcggtcttcaattaatcttcttgaatacttccggcgcactcgcgaaccttcgcaacgacggaaacgacaagctatcacgcaaaacgaggaaaaagactaataaaaaccaaataaacaatacataaaaagtaaacaaacatgtagatcatatttttagatgaattatgagacttgaacggcctcattctgacttcatatgaatttattatgaattttacaagattaaatctaattaaagcccatttaaaaagaattaaataaatttaattcaatttatggacaattttaatatgtagatctttattttatacaacttttgcaacttgaaccacattaaactgagttaagatgaattagatatgaatttttaaagattaaatcggattaaaacctttaaactgattttaattgaattatgacgcaataatgaattatttttgaaaaggaaaagaaggattattgcgtcagcggctagggtttcggtggaccgggcgcacgggcgacggctcacacgaacggacggccgagatctaaccgatccaagatggacggccgagatcgatcgggtccacggcggttcacggcggacggccttgatgacgccagcaatgacgtcaccgacggcggcggcggctcggcgaggcagacggctcgggcggcgcacgcttgccggcgaacggcggcgcgagaacgcaaacggaaggcaccgggacgaagcgggcggcacggcgaactcaccgacgaccaaaagagcgacggagaagcaacggacggcgacggcgacgaggaggaagcggcgggaaccttcgggttgacgacggcgatgaagctccggcggtctccggcggctgcgaaggggcggacgaggacggcgacgaccttgcgaacccgacggcggtcttcccgagcgacggcgacggctgaaacgacggcggcgcacggctggagcggcggcggcgacggcgaagctagggcacacggcgctagagctcttccgacgacgagaggcgaaggcgagggtggcgacgggtagaggagagctcgggggtccttaaataggtgcaaggaggcggcggctaaggcccacggcggcggagacggcgaaggaaagctcggcttggagagaggaaaaccgatccgattcgaactcgaatccatcgatttccaaaccgatttaggcgaagcttccaaagaagaaaaggtagaggagatcccgaggatcattttccctcaaacgattcggccggataaggaaagacgcggccgaatttggaaggagacggcggcggcttgcgctagggtttcgggcggcggcggcgacgcgaggaagacggatccgacaagcgggccccacctgtcagcgaccgaacgcgcgcgcgcggctgcggactgggccggctgggccgaggagggagagaagagaggttttgggccgactttcggcccaaagccaaaagaagacttttaaaacctttttcaatttaaattatttcttaaatgcaattccatttactaaaaatacttccttagctcaaataaatcccagaaaaatctaggaattatagaattaagcaaagtatttaatgaaattttatctagcccaattttatattgagatttaacaaattaaaattagatcttctcttataagcttttaaaatcatttctaataattccttttaaacaacaatttataatttaaggatttttaaacaagaaaagctcttaacaattataattagatcattaatgatcaaataattactgaactgttctttgtattattaagagttgagctctgaaaaatccgagaaaatttcagagagttgacttaatcatggagaatttaataaaaattaaatccatccatgctttatatttaggaaattttatttcccacattttacttcacttgtaaattaaagaacatttaatataaattctattaataatttattaaataatttataaatcctgaaacgaaaatcaggatgtgacagaattccacggtctttgcaggcgcgaatttcagcacggacgttgagaaaaacccagcaatcttgaagggtgtgtttcttggttttgtggataggacaccaagacctggtggcttcggaagtcatctttgtcagcccgtgatttatgtcagaaggataaggcttggccgcatcagaatccttcccgagcttgggtgtagtcggtaatccgttctccatttcgacgggtggatttttcgacatggagttgccttggttcgtagccactgcattctcatttccagtcattggaggaccggttgagatcggcatcgtggtgtaaaccgggaagacaatttcgccgacatgagtccataccagcattgttgaagtagggagtgcttggctgaagctggtgttgacgttgttgtcgacgaagctggatggcatagtagtagaaccttgagtaccagatgcctctacctggcgcgccactgtcgacgagtgatactcgtagaccggatatagagggtattggggtacgctggtacaaggatctacgtagtacgacatcgaggaatcaaaagacaagagttatactggttcaggctccttgataggtaatagccctaatccagttgatatgggattatatgctggaaaacacgggttacaaagggaacgatggaacttgtcggatccggcgagattgtagtcgagtggattcgactagctctcgatgacttcgctcctcgtagactccggcttcgtaggctgtgtgggttgtgttggctctgagattcaatgatctatgccctccccggggggtcccttttatatcgcaagtctagagctctccgagtaggactcgaatatactaggcccaatacgatacgtagataacccagatctatccaagaaggactcttcccatttgttgatttcatgaaaggttttcttagaatatacaggaaatatccgcgtacgcgtgggtatgccatgtcgatccgtaacgtatatagaagggtagagggtatgcctgacccgtaaccctgacagatcacgatataaccctgtctctaacgtgtagtattatcctatctctactattataagaattgaagatatttccgcggtccgtcagctatgtttgagtcggttataaaattgaagatgtttttgtggttcgtcatccgtgtttgagtcagttttaattttatgttttggtattttggtacatcatccgtgtataaatcggtttttaagttcgtttgcttttgaaaatacatatccatattttagtcggtttttaagatcgttcacttttggtatacaaaatgaatcatataagaaatctatttaaaaaaactcgcatgctaacttgagacgatcggacttctaactgcagcacatgattttctatatatatatatatccaagcgaactcgaacagtaaatttcattttatctaaaccatataacaataataatattaaaatagacttcacccgttgcaacgcacgggtatttttctagtttaattatacatgcaaattaagtttgcatgcatgtaaattaagtttttgtttcttgtgcatagggacagttgaagtgtgcatgttttttatttttccccatcacatactcgcatacaatgaaatataggaaagttaaggcttccatggttttagcgagaaaaacttatatgatgactaacagagggagtaaacaacagtgcagatgcaatttgcaactaattgaggcactaataaaaatattttttttctaaatacatggtcctgccttgcagtctggcaaaatttagttcaattttcaatcgtactcaacgtgtaaaatgcactcgagacccttcattttaccttgaaagatcagacaaaactaaaaaaaaaaaaatcccaaatcccttccatccatcttaataccacaatattgcagacgaaatcaaacagggctcagatcagggattcgctgtgcctgacttgactgccctgattaccacgtgtcgaaacatgaattcggcaataataaaagaggtagcgcacgagacctaaaagtggatggatgcagagataaggatttagacagattcagtaccttcaattaagaggtaataccctactcctgtttggggatttgaattcgctgggtgtagtatagatctgacgatctagttgtgtctcctgcccctggagggcctcctgcccgccttatataaaatgggaggcaggattacaatataaaaaccttaaccaatacggtatcggtttcctaaatctactttacaatcttatcaaaccaggactttagcccattccataatatacagggaaacgtaatacccaagtcatgatctgttacatattccatagatataagttatctcctataactagtcggataaccatgccgtgtgggtatagggtacctgtaatctccacagcacgggagatgcctcggacgtcgttgaccaccgaggggcacgcgttgctcattttcaagcgactgcctcgtcgatggccggaggagaatacgggttctaccgacggaggagatgcgagagcatcgtagccacaccgccttgtcgttgccgatgccgccactgcgcactgcgcgagtttggatggagaagccgtgtcaatggttcggatggagaagaaaacgagtctcagcccgatagcctaacgggcctgatggcaaaaaaaagtccgtttgacaaataaaaaaaggaaggaaagagtccaaatacgctagattagatagaagtctatatatagcaccctaaaatttaaaactgtacatccaatcccttactttgtaaaaccgttcatattaccccctaaggtggttctgtgtagtggtttttatctaatttatatgtaaattggatgagtttgatcacgtgatatacacattggacatatatatacatacatatatatatatatatatatatatatatatatatatatatatatatatatatatatatatatatatatattaagtataatatatattacaaacaagtatcaacataataatagtataatatcattgtataaatataaattgatgacttaccactgatgatatgcaaatatattatattagttatttaaagttgttcgtttaaactttcaaaataagaaaaatcaccttacggggtaatatgaacgattttacaaaattcaggggtagggttagaactctagttttaaagttcaggattctagctaaatgaacgaactttcatgtagagtttacgggggtatttagacttttttctatattattctatatacatgatttatcccctattcacagtcagatagcccagccgtgtgggtatatagtacccataatctccacactatatctatcatgccgttgccggttatacagcccctcaccggggttaaccacgagaggccctctatcttgccaagcttgtcgtcgcctcctgcacacaagtggcgaggcgttgtcggggttcggcccctccatcaccatccttgttcgctgcttagagagccaaggcagtctctccggcggcagcaaggtggaggagaggggagacaggggcggcttgggcatgtgcatggacaacgcgggaggcggatatcatccatccacataagtattagatactccctccgtttcatgttataaggcgttttgactttggtcaaagtcaaactgctttaagtttgaccaagtttgtagaaaaaagtagtaacattttcaacccaagacaaattcattaagaatatatattcaattattgatctgttaaaactaatttagtattataaatattactatatttgcctataaacttagtcaaacttaaaacagtttaactttaatcaaagtcaaaacgtcttatatcctaaaacggatggagtagtaagaagttctcatttactgatacgtaacaagcaataaccgattgtgtgtccaccctttgcgtgtcctgaagtgcttagtaggttctaaacaaaacaaaataatataatccacacaaccattaagatatcaaagtcttcacatggaagtcaactgtatcgaatgatcagatatgttaatgtagtgagacgtgatcagcaatatattgctcaaccagcttagctaacatggacagagtggactcagtggtgatcacacgttctctcgttcatgaactgatatataatatactctatatatactcgaagaaatcctgcggcatcaatcgcgctctcgtcacacccctcggacatacagcaatcatggaacacatccgctctttcctcctagcagcactggcagtcgt

SEQ ID NO: 23886 - DNA, 2064 bp, Oryza sativa
gccctcgacggcgatcagcaaatgttcgcccggtgcaagatccctggcgcttcctccaccatctgcgacaacgggcaagcaggtgcgtacttagtcgcaaatcctgctatttattcgatttgtttacgtggaggtcttgctttgtttggtttaatgcatttttcataaaaaaaaaatggtgctccgtgttttgcgatgggatatatgttaaatttcatagaaattgtttgttaatattatcaaataacttgagaatggtcaacaaaaacatttgatgaccatcttttttttttttgagggaattgagcattctatttgcataccctccgtatggttacttttttttggataatacttcaaaaaattgcaacaatcaattggatatgaatctacgctggtgttaccttgcattcggctgtatataatcgcagacgttagatacaaccatagattgacgcttgagatttttcttttccttttttcagttaaactcttattatgtgagaatttaaagcttcagtggtctcccataattgaagtgctaggattataatttttaaagataatgtacctatagtataaaaaatgaaagaagtgcatttctggtgatcttttcaaccgatcgattttttgtactattatactgaagtctaacgagtagtatagttactttcggataaacgaatttctacctttttgaaacgagtaatatattagtttaggacaagcgaatttgcacccttctgaaatgagtaattattttgaaaaagttttttttgacggatttcatcaataccatatgtcagaaaaaaaaaatcgtaactcgtgcggcaacagaaattactaactaatgtcgtactagtatggatgcgatatcttgatattactctgaagcttttgaaataatcaaatcaaatggctaaacaaaaatctactatacatactggaaaattacaaaaaatagatcgggctgaaaaattagaggattggaagttcaaaaagtggttatatatatgcttacgtgaaaacaaattaataatatgcagaaaatttgttcattaagaacaacatatatctctttggttgtcacagctaatctttttctaccataattggcaggtcatggaacatcggcaggctactcctcgacaggtatgcttatacttccttcgtttcagaaggaagttgtttgacttttttttttaagtcaaacttaatttagcaacatctaaaatatattttgatactatgtttatgtttatgttatatatgttaaaattactattatattttctataaatttagtcaaatgtaaccgggtttgcctagaaaaaagtcaaacgatttataatatgaaatggtgggagtagtatatatgtataatattgcatgtatgggatcaagtgttcatatatattactcttaatttacacaagacacacacataaaatttggaaaagtgatatataacattttaaatctgtctatacactacaataaggacttccatatacattattataatgcacatttagtgttttcctccattcatttccaaaccaatggaaaaatgtaatttggtgtgcagcaagctagcatatataaaccaatgtaacaagaatccagtttctatctagctttcgatcgataaggcatgcagtatcccatatcctgagcattaacagttttagcaataaacgtcgtacatttaaacaaccaaacatgttttgaagatagtcctgttttggtgaattgtaggctcccaagcaagaaatgcctcacctcactcgaggttgaccgaggcattccggatctttcttctccttcaaatactgttcattttgggagtgtgaagcacactttggaagacatcattttccatattcatctcccagttcagtgcatgtaaccacatatgcatgttagttgtttgaccgaggtgaatgattcgaagacaatggtcgctgtctagttttatttactatgtactttggatttatgcaagttccacattttttcgttgagggaattatggatacactacctgaaaaactatatctatat

SEQ ID NO: 23887 - DNA, 1418 bp, Oryza sativa
catcctggtaaggccaacgtgggtgccgacgctgtaagtcgaaagagccattgcaacactcttaacgtccgtggcattccacccgaacttagtcaacagatggaagccctgaacctaagcatagttagtcgcggattcttggctgcgttagaagccaagcctaccctgctcgatcaaatccgcgaggctcagaagaatgatccggacatgcatggactcctcaagaatatgaaacagggtaaagccgctggtttcacagaggacgaacacggaaccctatggaacggaaatcgggtatgcgttccagataacagagaacttaaacagctgatacttcaggaagctcacgaaagtccttattccatccaccctggcagtacgaagatgtacttagacttgaaggagaaatactggtgggttagcatgaagcgggagattgcagagtttgtggccctacgtgatgtgtgccagcgtgtcaaggcagagcaccagcgaccggccggacttctccaacctctccaagtacctgaatggaaatgggatgaaattgggatggatttcatcaccggacttccaaagacccaaggtggatatgattctatatgggtagttgtggatcgattaaccaaggtagctcgattcattcctgtgaagaccacctatggagggaacaaactagcggagctctacttcgctaggatcgtgagtctccatggcgttcccaagaaaatcgtatctgataggggaagccaattcacctctcacttttggaagaagctccaagaagagctgggtactcgattgaatttcagcaccgcctatcacccgcagacagatggacagaccgagcgtctgaatcagatcctagaagatatgctccgcgcatgtgtcctatatttcgggaagacctgggataagagtctcccctatgctgagttctcttacaataacagctatcaagccagcatacaaatggcaccttatgaagcgttgtatgggcgcaagtgccggacaccgctattgtgggaccaagttggagaaagccaagtgttcgggactgatatcctgagagaagctgaagctaaagtcagaatcattcgggataatctaaaggtggcccagtcccggcagaaaagttatgcagataaccgtcgccgtgacctggaattcgcagtggatgattttgtgtatcttcgggtcacgccattgcgaggtgtacacaggtttcagacaaaagggaagcttgcacctcggtatgtgggtcctttccgtatcgttgctcgacgcggagaagtcgcttaccaattggagcctgcccgcctccttgggcaacgtgcatgatgcgtctcatgtgtcgccactcacgaaatgtccttcagtgccatccgagcacgccgactcacagcaaattgaagttc

SEQ ID NO: 23888 - DNA, 567 bp, Oryza sativa
ctaggaaagatgctattgtgatgtcttcaactaagtctgaattacaaaacgaatgtattgttgtgcctattgttttggatactaatattttgctggcatctgagaataaccaaggtaatgagaaagagaagaaagacgaagaggaaaaagacttatctatagctccatgcatgcttgaagaatgttcaattgaccaagcgctgataatttctgaagatgagaaaaaaggtaatgataatggtgctacagctactcaaggtatgcatatttataatgtgccaactatgtccactacttatgctacgttagagcaacccatagtggaaccgattgttgaaatacctttgtcacaaaacaatttgcttgatgttacatgtgataaagaagagttgtgcgatgcttcacttatatccatgccacaactagtgaatgagcatgttagttctatagtagagccactatgtgttgagtttaaacatgttattcacatgctagcgagaatgaagagcttaaattgctatcttctttaaatacttgggttatattcaatttgatgatatttgtcca

SEQ ID NO: 23889 - DNA, 9722 bp, Oryza sativa
atagtacatcataaatttacaacgtgcaatgggaatcagaggaaataaatcataagagtcaagtctgggttattattctctgcaatttgcagatggatacatcgtaaatttactacttgcaatggggactagaggaaataaatcataagaggtaagtccggttccatttttctctgcaatttgcagatggatgtattttgcacatcatgtattgcaatcactacctacttcatatttatttaatcctttctagcatgtgcatatatacatcagaattgaacagggatatatccagttttaatatttcccccaaaataggtatatatgcaattttcatacaagtacactgagtaaatggtattaagccaggtgtagctacttacacaaccccagatcaagtgaccccaaagcacccagccatgcaagaagcattagcccttgcaatgaagctcataccaagcatcatcttccttgcagtgacagcgcaggctgcagcttcttctgggtacagtatggcgttgccaggttgccctgacaagtgcggaaacatttccatcccctaccctttcggcatcggccccagctgtgctgcaaccagcatcagcagctacttcaatctcacctgcaacaacaccttcaacccaccacggcctatggttggggactctgaagcactcgtcgaggtcactgacatctcactggagcacggcgagatgcgggtactcagccctgtctactacatctgcttcacggcaaataccacgttcaccaggttcaccgaagggtatgagctgaagcacacacccttcctcccctccccgtcacgcaaccgcttcacggtcatcggttgcaacaccctggggctcatcggtggctacaagggaaccgtgagccactatgtgactggttgctactcctattgtgagagcatcaacagcacatctgatggggcgccatgtgcagggatgggctgctgcgaggccgccataccgactgacctcaccgcctggggggcgatgtttgagatgaaccagagcaaggtatggagcttcaacccgtgtttctatgccatggtcagtgaggttgggtggtacagcttccagcagaaggaccttgttggccaccttgggttcatagatgacagagctcagaggggagcacctgttgtggctgattgggccattaggaatggctcatgcccggaagaggggaaaggcatacctggtgattatgcgtgcatcagcgcaaacagctactgcatggacgcgaacaatggtccagggtacttatgccagtgctccaaagggtatgagggcaacccttatcttctgaacggctgccaaggttaggttcaaatttaccattggtttagattttgagaaacaaaactggtagaattctatggcgtgctcagtgtttgttcagctagagtgtgtaagatatagttcaaaatattatgaacattcatcaataggcagcagttctctttggtttccagcataattcagcatgggactggaaaaagaaacagtcagcttcatttgtggtgcggatttttaattaaatagtgaaaagttattttcagtcaataggcagcagttctctttggtttccagcataattcagcatgggactggaaaaagaaacagtcagcttcatttgtattgcggatttttaattaaatagtgaaaagttattttggaacaagtcatgaaaggcaagttatagcattcttataagtagattaggttgattttagtttacctatgataatgaaagtaatacagactagcttacacaagtttagtttgacttctgaatgcatgctttttgtctctgtcttcagacgtggatgagtgcgcattacgtaagcaggatcccaagtatgaagatatatatccttgcaggaaaggagtctgccacaacacaccaggaggatatttatgcaaatgcaagttaggaaaaagatctgatggtacaaattatggatgtcgacctctgcgtactacagcagagcaagtggttattggtaacgtcacatctgcagattttacttctgtttcacctacattataagatgcgtcttctactaaagtaacactcatattgtggcaagaaaaatactacttctgaaagtaattttgaacactacctagaattgtcgataaaaataaattttaacaaatttggagcagaaaattattagtatcaatattctgaaagagaattttacaggcaccagtgtttcggccattgcgctaatggctttgacatgcgtgttggccatgcaaatacaaaggaaaaggcataagaaggacaaagatgagtatttcaagcaaaatggaggtctaaagctatatgatgagatgagatcaaggaaggtagacacaatccgcatactcactgaaaaagatataaaaaaggccactgacaactacagtgaagatcgagttcttggaattggaggtcacggaatggtctacagaggaactttggatgacaacaaagaggtagccataaagaagtccaaagtaattaacgatgaatggagggaagaatttgtcaatgagataataatcttgtcacagatcaaccacagaaacattgtgaggttgataggatgttgcctggatgtacatgtccccatgttggtctacgagtttgtctccaatgggaccttgtctgagttcctccatggcactgatcatagatcaccaatccccttggacattcgcctgaaaatagccacacaatcagcagaagctctagcgtacctgcactcatcaacatctcgcacaatccttcatggggatttcaaatcggccaatattcttttggatggtcagcacaatgcaaaggttgcagattttggggcatcagcgctgaagtccatgaacgaaagtgagttcatcatgtttgtccaaggaactttgggctaccttgacccggagagcttcattagccattgtcttaccgacaagagtgatgtctacagttttggggtggttctgctggagctgatgacaagaaagagggcaatctttgccaatagcatcaatgaaaaggaatcattgtcctattcttttctcctgatgtttgatcagaacattcaccggaatatgctggacagagaaattatggataaagaaaccatggttgttcttgagaaactttccattcttgccgccaactgcctgcgaccaagaggagatgaccggccaacgatgaaggaagttgcagagtgcctacagatgataaggagacacccaatgcacgcagctagtgatcacaaaggagacagctctgcgcatcacaactatgaaggatcttcatcaccatcaatgtctgcccatttcgacgaaacgatatacaagagcatagaggcatccagattggtacaagatcttgtgagatgatggtatgcttgtgccagcacttaatgtgttaatatcttgtgtagatatcatagtaaatacggtataaaccaatttctgtaatccccttgtatgagaaaattagcaatttgttccccgtggtgatgactgatgatgaatgcttccattctgaataaatattcagttgtacagagtccaattgatcagatttcagaaacgaaattacctgggatttcttgcgccgccgatccaaagccgccaggctgcggctaaccgccgccaccagtcgcgacatccatggcaagtttggaggatcaccatcggtggtcatccatttggacgagatgacagttagcagcgtaatggacgagatgacagatagcattgagatgtctaaacttgtgctgagcgagtgacagacagagttcacaaaactgatggaatttcacgaaaaccggtcggctttcgtgaaaccaccaagtctcggattatgaaaaccggtaggaattagcctgttttcgtatggcgttgactaaaagtcaacagtttttacatttttttcagtcggattttggtaaaccgatgagaagcgatttttactttaaaataggtcttgctacatgatgcaacatcactcttaagtaggatgtactagttctttcttgagacatttcacttgatatgtcggacatatgttatataaaaaccttttttttttttggacacgtccccccagttgcattttattgaaactgaagtggcagcagctcagagcattcagtttcagccattcagtctgtgttgtagttgtagccatttgtttctgtcaatcaagctaattcttttggttagtaggtctctctactcgctaccatcttttgcctccccctcgtttgtttttctcgagtgttgttcctctccaatccactgatcgacgcaccctcaccaaccatgcatcgcggcgtctcgtttcgtcagaagcaaaattcttgcagctgtctcttttcgtcagaaacaaatttactgctactctctcactatcatttccagttttcctcatctttttactagtatcgaaacgtggaggtcattcttcttgccacaatataatctactgtataatagagttgatgcaatgattcttttcaaacctgcacgaagaacaaagatcaaataatcaaaagcaaagaacaatttagtcaacacatatggatattagcctagttaagtttcacgttagtgtgtctgctcaaagcccagattcgctcaagcatgcgttcatgatattccaatacaggagatttctacacaaagactacaagagaagcaaaaacacccaaccaaccaggtgttcacagcatttcagatccaaggaggaaacaagctgtgtgctacgctgcttggcagtgagatttctcacttaatgcaaataatggtgacaaggaatcagccccttcttcaattcagataaactactttaacccaaacatgtccagcggtaatattcctttcaaaagtctcaagggagatctcacctgcattcataatcaacaacagtcaccaaaatcttttgtagtttaacaatatcagatgcatcatcagcagttcagcacccatcatcatctgaaaagaaagtctgagatacacctacttataacccatgatataaccccagttcataaggcataatgacatcacatgataataacgaaaaatgagagtgctagctaagatagaaagaatggagtagcaagtgaccaccattactcccaacttcccaagtccccagccatggaagaagcattgtatggaaatacaacatgtgctactacgtgatgcctgttgaggtgtgcagttataaaggcaatccttatcttcccaaaagatgacaaggtagagtattactacaatgaattttacccagaatagacaagagggccaattatgaagttgcgcaactcttgcaagtgttaaagagaatccagatgcaactagtcacaaaacagatcatatgatgatgcattaccatagtggagggtaatcaatgcatatccctcgaatgagatgaactaccaaagcaaggacatggccaaactgatcttagatgtcaagatagcaagacgattttcacatactagtagtatttgagggtagtatcaaatatttgtgatgcactagcagtctagcacatccttcatggtcaatttgatttcttcaggttcgttatgtctaagccatcaatgtaactatgttattttatgttgaagcaattgcataaaaatgatcatgacttatgtattacacaaagtggagaatgtgtggacagttgggttcttagaataaatttcttcctatcagctctgattttgcccacttgttcaaataaaacatttgttttgatgcaggatttacttgtccacataaagagctataacttctatttagcatttacacatcaacatgggcaggatttctccctaaaactaatacttaatgcctgtttgttaagataattatgtgtaaattcataagatgacaatattgtagttttcaggcaatgcaaatccatctgtacaaattggtgaactcatataaagtattcttctcaagtaagccgtttgattaatgatattggcatatgcaaaagttatccaccaagattgggttggatgcgtcttttaatatttctcatagagaggtttgcaaggtcctgtttcatttaaaacagagtttcagaacaaagctaattaagcagcagaaaaaaggggcatatgcaaaacaaaagaaaaggcataatgggagatgatttaaagtcatgttcgaatttggtatgctattgtttccaagacattagtagtaatcagggccaattaaatgaaccaagaagcatagttgatccttctacctcttccaagaaatgaaggaatgcaaattctcgcataccttttactgtacatacatatcaagttacataccttattgctgtagataagcacatcatcaaaaggcttcaatgccaaataggacctagtacatccaaatacggttatcctaagactgcagaagttatgcataggtaagagcattactccacataaaaatatgttcttgttaaaagcatacattttgtttttgcaggaagccctaccttctgttccaggaattttagctgcccctccctgatccatcttggcgtctcatatgctgctccagtgaggaatgctcttttttgtggctgtggcagatcttattatcagcgtcagaagtgccatcggtgcaaatgttaccgcaatcatttgattgtccactagcaaaccaatctgaacaggccagtcctcccccaacacccaatagaaaagaagaaagtaagaactgcaccatggcagccttctgttcacatgctgagaggatgatcgcaatatattgatgaaaaaaatattatataagcaaacatggtcaacaaatccattgtccctatacactgtacagttaccaacaaatttcacctaagtttctgaagaaatcagctttacgtacacatgttaacatcaatagaaaataaaatagatgcagaacaataaatggggatcgaattcagatattatttgtttgtctaccattcagaatacttggaatgcagaaatgtcacatgtccattctaattatgctacacacgatccattccatgctcaggagttcggatgagcttaatcaaggtctcataatattatttccccacaaacaagaaccacagtaaaagaagtacataacaacagggacaacagaagtaaatacagaactgacagaaagtgcctaatatagagaagcctaattcagatattggctatcctctcttgcagctcagttcatctcccttagatcggcatgcctttgggcacaatctggtcctttatccacatgtagataggcaccagaacatagtatgcagcacatattgttcccatgaggaagcggaagaggaaggtgataggattcacaggtttgctgacatcctcaacctttggaccaagctgcaggggaacaattgaactcttcagtctaatcactacacaccaacatgataatgtatttccaaacgtaagctaaacaaagtcaggtgttcacatttaaaaattaatttcagctggagatggttttttgagctgtcccatttatttgtaataaccaggagaaataatgttaagagaagcaagaaaaaaagaaggaaataaagagaagaaaacatgaaatcaggaagattggtttcttcacaggaaagtttcatgtgcttacatgccatcaagcactatgatgggtaagatgctataacctataacagccttttcacatgaacaaaaatatttaaattgactcagattatacaagtcattatataatatgcaattatgtatgttagaaagtgatccaaacaaatgtattagcatcttatatccttcacatagcactacatttgagctgagactgagacatggcacaggctagctaggctacaagttttgtcgagagaacatttaggcggctgagaatggcatattgtcgacacttatctcttcatcccatcaataagagagaaaaatgaatacctacaatgttcattaatctcatgcaagtgagaaaaatattgacatgttcactcttcaacattcgtcatacccaggtgttgcgttgccaatccatgagtaataatcaacatataaatcagtaagaaataaaagtaacgacaaaaagagtcatccgaacaaaggaggcttatgtgaatttgcaacttgcaaggcaaattagcaaaaaaaaaaacctgcaaaggggagtctccatgttctcttttgacgcccgtcacagagcatcccataatcaggccatgccttcggacaccacggtaccattttggtccaatccttttgagcttgacatccttgaaccctgcctttttgaaccactcaatatactcctcttccttcgggaagagcatccacatgtcagcgaaaaagcgagacagccagaaggttgggtgcacggggccaatcatgcaagccactccaccaagcctcaaaaccctgtaagcttccttgattcctcgctgcggatcgggccaatactcgatgctgtacaacaatcacaccccctcatcaatcacaaccggaacaccggaacccgcaaagacttgactaaaaatcactagtgaagtaatgaaatgcataaccatagcaagttgttcattgttcattgttcatggttcatgtagaaattgaaattcacaatgtgcgtgcgatatcgacacggtttggaggtgaagagagcaaagtgagagggtgaacctgccggcggagacgtagcggtcgaaggtgtcggtggggaaggggaggtcctcggcgtcgccctccatgatggtgacgcccttgagggcctccttctcccgggccttctcgagctggtgcggggactggtcgagcagcgtgacgttctccgggtcgacgcgcttgacgatcccgagcgtggtgaaccccgtcccgccgccgacgtcgacgaccctgagcttgcggctgtagaggtcggcgggctcgagggcgtcgtcccgcatgtcctccgtccagtggcccgggttgatgacgtggtcgtagacgatggagaggaagcggtagaaccagaacgcctccttcttgtgctggatgaaccgcggctgcgacatcggcctcgccgccgccgacgacgacgacgccgcgcacctcagccgagccacggagatgttgccgccgcctcccccacgcctggtgagcacgaggggcctcgacttggtggtggtggtggagaagccgaggccgcgcggcggcctgatcctgcccggcgcggagtgggtgccaacgccgcccgctggggcgtaggcggaggaggccatcgccattgctcctcctcgtcacgccgccgccgccgccgccgccgccacgaaggggagaggagagagtggaagaggatgggaggggggagagtggcgaggagagagggagtcacgaggaggaggggattagtggtgggtggtgggatgggcttcgcctcgtgtcgtcttcctccggacacatggctccctccctcccgtccagtgtgcacgtgggacctgaccgagtggggcccactggtcagtaactgggcctttgcctttgtgttggggcttggagttggaggtggaggacgtggatcctctgtggcttcaagctttgtggtttttgtgttttttcaagttgctaccctacccaagagacgacgtgtgaatacttaacttcaggaaaatactactacctccgtttcgaaatg

SEQ ID NO: 23890 - DNA, 2278 bp, Oryza sativa
aatatatttatcaatggatcaaatgagaaaagaattaataattacttaaattttttaaataagacgaacagtcaaacatgtgctaaaaagtcaacggtgtcaaacatttcgaaatagagagagtaacatttcgaaatagagagagtagtacgaaatgaaacttcaaaaaagcttctgttggagttcattatcattcgaatcaggctttctccaattgacaagggctacgacactggcattgacaagaaatcttcaagtggtttgcacaagacaaacatacaggaactgggattctgtggggtgctgcaatgaagcagctgctttgccttttattactactactaaatactaatatttggaaccaggtttgatgaattattctactgtacctagtgagtttgaactatgaccagtacgctgtcaaagcagcagcatttgccgtttctcctttcagtttcttatcaagaggagctgaatagtaacggcaactggaagcttaatgcaggttactgaagaagcaaatgccctggtgtacatagataagaaaatgtaagaatgtgtgagaacaaagtttagcgatagaaataacacatgcacaataagcagcaagggaacgagtccgatgaactactccctccgacttgaacttgaactataaaggcagctatattttgggacagaggtaagtagaagctaacaagatcccatcatacgagctaagaaatatgtttgatctgtatagtgcattcatctaaacatcaaataaatgcattggcccgtacctttgtcaaatttacagatcaatgtagacgcgcaatccatcacgggctaactgcacatctatcccctccctgtactcatagataattacagtgcatgagtatgcatatctttcaggaacttacaataaagagaaatcagtactctacttcagtaatcgagtagtacatattttgtaatgcagacactagcatgtatgtacgatcatctaagtcatcttgcaggaaaccctaccttctggaccactcttccaacgtttcattgtccttgtgatggtccatctcatgagtcatcccaatgagcaatgcccttttggggcaaatcctcttaacagcatccagtgtctgcatggcatcatagtattaatatttagcatgagaagccagttagttagctttgaggaaacaataaaacaaattgttcaagtcattcaatagaaaaccaacctgatcccaacaaagatggacattatgagaaccagtctgttcacatggagagagaatgtcagcacacaacatgttagtctgaacaatgatacaacctattatggctaaataacgagaaattcaagcaatcagtgataatgttcccatgaattgcaacaaaagtcagttttatacatgttgaaaacttggcatatgccagctctgaccttctctagatgaattgaaatttgcaattgactgaaacaagcaactaaagggaaaaacatccatcactgacaaataaggaactgaggaaactaaccctataaaggcagtccaagatgagcaaatccagctgaccctctccagactttgaaattgctgaaaggtaagcatgtgtgcacagtaatgagctcctgaatagactaaatatttccatggctaagtacacaagtccatagattaatattgcattatagctatgctagagggggcaacgatgtattatggtgagcaacaagccactaatcagtaccagcacgcgtgcattgcagccaatgcaaaatgaaacatactatatgacctagaactaaaaatgcataaaatgattgtcctcaatagtcaattcagaaaactatattcatgactagatgagatcaagcacttctttactaaatggatcatattacatacagctcacgcatgtctgcatatgtctagtcataatagatcatgatgagacaatggcatagaacacaccatcacccctaactcctaactttaacaagtaaagataaagaaataaacaggctgataccagtggaatttatcctgacaaaaatatagaacaagtgattaatgtcctatggtcacatgtcaggatatttactcccaaaaggtaaccacaggcacagtaaccattagagcagcattaggaagcaaaggtataccgtgtctgtgcttggaggaaaccgtgaaacgtctgatatataagcaacttttgattttcttccaaaaaggaaacccagacaaacatagtcctcgccatggatcacctaagagatatacgatac

SEQ ID NO: 23891 - DNA, 2260 bp, Oryza sativa
caaaataaacgcataagtatagtacaaatcatcacttacattctcaattaatgactgttcgcaggtgcaaaacaatgatgaaacatgaggagcaaattgtcaacaaatttccataacattataaattgacaagttttatattcgctgttctaattttatggttattagtttcaaacattacttatcatatcacagatacgtgttgccaattaatcgaatatttatgattggtacacaagcagatctgcacttcacacaacacaagaaaaaggattactgtgggtggcaattatagtgtaatactttagttcaaagaataaaacaaaacaaagagcaaacaacgctaatagttaacgtggcacaaatcacaaagtaattaaattttaacatagcaagacccaaaaagtgcacggcatgtacacttgacaaagttcaattataactgaacaatataaaagcctaaaagccaaggtaagctaaaactcaaatacctgttcatagcaaattgggatagataaattggagttggctcaatatcattcgtaggactaaatggctgtacaatccgaacatcatcaagacccaagattgcatcggcatgctcatgagtcagaataatctgtaatgaataactaaaatgtgttagtgtaggcataaacattgagcattttttttattattttacagtagattcatctatcatagcagctcttgttcgcagaagtgagaagctgaaggaaaaagaaaaaaaaaacaaggataagaactcacagaatcaacacaagggattttatgatggataaaccaccgtagaacttgttctcggaatgtcttcccaacatcaattagaatatatttgtgtgtgacttcatcttggcaataatcaatcagaagagaagtattgcacctgtaggaaccccaagtattaatctagtcccagaaaaacgacacacaagcataatgttgccatcaagcttgtttgtgcaataatattccaaaacatttgggaaacaagcatggtgagcaactaaatgttaaggctgacaatcaccaaaaggggaaggaagaagctaagaatcggttggctagttggctacaaatggacataaatatgcatgatataatctaagccaaccaagaagataaatctagttatatagaaggcattgattaagagtattaaatgcagatatgagcacagatgaagtgccttttactttcagtgataagtatgtatatatgactcttaagactgattagttggtgcaaccgtgcaagtaacatctcccaacatccagtacaaaattcctggaatttcatgttaagaaaaacacaataccagaaaaataagtcactcgctatgcttccatgacattgcacagctgcaacttgaaactgtgccccttgtttctcagtttccgcatactgaaatatagatataccaccactgtgagtccatcttattgaagttccaatatattgtttaatcttacagaggtcgaccatgactaaccactaagcatactgattgattgtctgagcccaaaattttcgatcaatttcttgagcacgccataacatgcactgcaggttctcctattcctcgaagtactttcaacttctaaacaatttatcggaattcactctgcatacagaacatcgctaccatctgctgctgcaagcagccaagcagaaaccagtgcccatattctgctcagaatcagtgcgtgtgaatcactgaatctacaaaggcacagcaccagatacctatcgcatcaacatttctcagctctactgtaaatcgtacaatcccattccaaaacccatctaccagcctaccgcacccaaaagtagcagcagaggcaatcgttcagatctcggcgactcataatcacccgaacaaaagcatggcgcccacgcccgtgcaatctatacaaatgcaccgaactggaagctcccgatccatctcatgctgaactcagatcatccacaccgacctcgtgaagacacaagcgcaaccgacacgcccgattcctagaggatagaggtgaggacgaggaggaagaatgatgtatacctgtagttagggtttagctcggggggcacggagagggactgggagcagacggcgcagggcgggtcggggggctggatcaggcaccgcgcgttgggcacggcgctggagcagcccgtcccgaggaacaccagcgaggaggaggacggcggcggcgcgggcgtccctccttcgccggcgacggag

SEQ ID NO: 23892 - DNA, 6882 bp, Oryza sativa
cgacggcgagtcggtgagggggaggaaagagaaacggaacggaatcagggggagaagagaagatgcggaaatggttttgggaggtcgttttgcagataggtacctggaggtggatgttatttctggctgggtggtttttattcattcaaaaagacccaaatggcttctcaaaaaaaaaattgacccaaaagacttcagaatggagacctataagactataaaagcaagtttaatggtatagccgactactagctccaaatcatctataatcaatttaacgtcaattcttaccatagttacctataaatatatactacactattagttcaacatgtcatacatacattgcatcttggagtctgtgctatagctggctacaaatctgtagcccgctgcttatctctctcttttttaatctcctcgatatgtgtttatagcagacttatagtctattattgtatctgctatgagaaaaaggaagcccataagatttgccacatggataagtatttgattgtttgcatctaaaagcaatgttctttgattagaaaattatctttgattggcttctttgacgtttgtgccagccaattgattttatattacatactcgatgtgctaattgtaaccaattgcaactttatacttcctttacctttcttgtgtgtgttttcatgaatcaaatttgacggcgtcttgctcttccaaaagcaaggttaggtgttaagaaaggcatagtgtggtaatgcacatgaatattcgctttcaatggcatatgccacgcttgtttttttattgaagtccttttttttagcgtggtttgtactttagattaccatggtgtgaactaatatatttgtgtttgtgtattttacgaggaaagcgtttgctacgacctgagcatttatctaactgaaacaaattcacctacgaggttgccttttgtaaacggttcttatcaggctatgcatgaacatggcattttaccatgtactacttaataactcatcaatttagtgaacttaacttactaaacatataaaatgttgtacgtactcttgccacctttgaacaatgtgggagcatgagaagctaacaaaataggattagataagaacaatagatgtaatatatttggatggttcacaagaattcaaatacatgaattttagaagaaatcctatgtagaaaagaaagcagagagagaggaaaaataaaaaaataaaacaagagatatgagctcatgttatacttcttatggaatgaagtgtatagggaagcaatccatagtaaccttgcaatactattcctttggtacaaagggtgtcacagtaatttttttcaccaaggattccaatacttaaaagtaattatatgggctcctttgaatcacaggattgaaaaaaaaatggagaattaggaaaaatataggattctgatataaatataaatataaaatagaggattggaaaatacatgaaaaaaatataggaatgaccgtttggttgggccgcaataaaaacacatgaattttgggagagataaagagtcaaaggattctttccatgatgttctaccttatgttaaatttccttcaaaaatttatgggaagaagcattccatatgaatttcataggatttattcctttgattcaaaagctatatacgaaaagttcctataagaatgaaatcctttaaaattcatatgaatttcctttcaatcaaaggggctaagaatttcttctatccaaaagatcttgtaatacttctacatttgcacgatcctttttcataaatttgtattaactactggacctaagtggaaaaaagtccataggggtgagaccgtgagagtacacccctgccctgacgtcctgaccccaccacggctttcatcaaaaacccgccgccggcgccgccgccggcacattctccggcatcctccggccatttccggtcactctcatagcctccaaatataactacggagggagtagaagctaacaagattccatcatacgaactaagaaatatgcctgatctgtatagcgctgtagtcatctaaacaacaaataaaagcattggtccgtacctttgtcaaatttacagatcaatgtagacacgcgatccatcacgggctaactgcacatctatcccctccctgtactcaatagataattacagtgcatgagtatgcatatctttcaggaacttacaataaagagaaataagactctatttcagtagtcgagtagtacatattttgtaatgcagacaaaatatgtactgctcgtgccaaattatttggggacactagcatgtatgtacgatcatctaagtcatcttgcaggaaaccctaccttctggaccactcttccaacgtttcattgtccttgtgatggtccatttcatcagtcatcccaatgagcaatgcccttttggggcaaatcctcttaacagcatccagtgtctgcatggcatcatagtattaaaatttagcatgagaaaccagttagctttgaggagataataaaacaaattgctcaggtcattcaatagaaatccaacctgatcccaacaaagatggacattatgagaaccagtctgttcacatagagagataacgtcagcccacaacagatcagtacgaacaatgatacaacctattttgcaatttgcctaactaatgcaaatttcaagcaatcagtgacgatgttcatgtgaaatgcaacaagcatgacatgtgttgaaacaagattaaagcagtattcatgtttggcatatgccagctctgatctgctcttgatgaattgcaattgacagaatggttgtctagaaacaagtatgaaacatgaaattaaaaggaaaaacatccatcactcacaacttaaggaattgaagaaactcaccctactaaggcaatccaagatgagcaaatccagctgaccccctccagactttgaaattgctgaaaggtaggcatatgtacacaatgatgaggtcctgggtaatgaaaacaagatagaaaggaaataaactgaccagattcctagctatttccaatgcaaacgatgaacaagtatgcttgcatgcatctccaagagagaagggtttatggataaatatttccttaccaatctccatggttaagtacacatgtccatagaccaaaattgcattatagtatatgctagagggggcaccgatgcattgtggtgagcaccaagccatcaagcggagaattaccaatcagtaccagcatgcgtgcattgcagccaatgcaaaacgaatatagtatatgacctagaactaaaaatgtataaaatgattgtcctcaatagtccattcaaacaactatatgactagatgagatcaagcacttctttactaaatatatcatattacaatattagatacaactgactcaagtctgcatatatctaataataatagatcatgatgaggcaatgggtgtagaacacaccatcacccctaactcctaaatttaacaagaaagataaagaaataaaccaggctggtactagttgaatttatgacaaaaatatagaacaggtgattattgccctatggtctcatgtcaggatatttattcccagaaggtaatcacaggcacggtaactattcagcattaggaggcgaaggtataccatgttctgtgcttggaggaaaccatgaaacgtctgatatataagcaacttttgattttcttccaaaaaggaaacccagacaaatgtagtcctcgccatggatcacctaagagatatacaaaagtaaggaaaatggaaggagcaaaataacagagggtgatagaaaaatgcaaacattactggaaggggaacaaactctagccctgaggtcacaaatggtatctgaagatcactctcgattactctccagtcaagctgagcaactcgccgaacctcctccccttcctttagtttctttctgaccaagtaaggaaacttttgggcaatgctgttccaaattaaacatgtaagttagtacaaatcatcacttacattcccacttaatgacagttggcaggtgcgaaacaatgatgaaacacgagaagagcgaggcaattcaaacattattcatcatgaatacctccagtagggaagagttctggaaataaaaaatcaaaagaaaacaatatatctttggaacaccattttaatcaaagtttctctgacaaggtaggccagttcctttccaaatgttcggagcataccaaacaagtcaatacttctatcaagcctagaaagggtttgctgtccctaaataactaggacaagaatccacatgaccacaaaaaggagtttatcaactatcaacaataacatattaaacatgatgtatttaatatgttttactttgttgaccgaatttccataatgctgtaacttgacaagttttatattcactgtctaattttatggttattaagttgccaattaatctaatatttctgactggtacacaagcaggtctgcactgcacacaacacgagaaaaaagattactgtaggttggcaattacagtgtaatactttagttgaaagaataaaacaaaacaaagagtaaacaatgctaaaatagttaatgtggcacaaatccaaaagtaattaaactttagcacagcaagagctgcaagactcaaaaagtgcacggcatgtacacttggcaaagctcaattataattcattacctgtccatagcaaattgggatagataaattggagttggttcaatatcattcgtaggactaaatgactgtacaatccgaacatcatcaagacccaagattgcatcagcatgctcatgagtcagaataatctgtaatgaataattaaaatgtgttagtataggcataaacattgagcattttttttattattttacggtagattcatccaccgaagcagctcttattcatagaagtgagaagttgaagcaaaaaaaacaaaagaaaagaaaaggaactcacagaatcaacacaagggattttatgatggacaaaccaccgtagaacttgttctcggaatgtcttcccaacatcaattagaatatatttgtgtgcattttcatcttggcaatagtcaatcagaagagaagtattgcacctgtgcgaaccaaagtattaatatagtcccagaaaaatgacacataagcataatgttgccatcaaccattgtttgtgcaataatattccaaaacatctgagaaacaagcatggtgagcaactaactgttaaggctgacaattaccaaaaggggaaggaagaagctaagaatcggttggctagttggctccaaatgaacataatatgcatgatacaaactaagggggagtttagatccaggggtgtaaagttttggcgtgtcatatcgggtattatatagggtgtcgcatggggtgttcgggcactaataaaaaaactaattacataatccgtcagtaaaccgcgagatgaatttattaagtctaattaatccgtcattagcaaatgtttactgtagcacctcattgtcaaatcatggagcaattaggcttaaaagattcgtctcgcaaattagtcacaatctgtgcaattaattatttttttagcctatatttaatacttcatgcaggtacaatctgtgcaattaattattttttagcctatatttaatacttcatgcaggtgtccaaatgttcaatgtgacagggtgaaaagttttggggtgggatctaaacagggcctaagccaactgagaaataaatctaggcatatagaaggcattgaccaagagtattaaatgcatatatgagcacagatgaagtgccttttacatttaaagataagtatgtatatatttcatatttgactctaagactgattggttggtgcaagtaacatcacccaatattcagtaaaaaaaatcctcgaatttttgttaacataaacacaagacaagaaaaataagtcacttgctttgcttccatgacattgcacagtagcatcttgaaattgtgccccttgtttctcagtttctgcatactgaaatatggatatctcaccactatgagtccatcttattaaaattccaacatattgtttactcttacagaggttgagcatgactacccactaagagtactgattgattgtctgagtccaaaatttccgatcaatatcttgagcgcgccataacacatactgcaggttctcctaattctcgaagcatcaataacttaaacaatcactcagaattcactttgcatactactgctaccatctgctgcacagttgcagcaagcagccaagtagaaaccagcgcccatattctgcacagaatcagtgcgtgtgaatctacattctacaacaacacaggcacctctctcatcaacatttctcagctctcgagcgtaccaatcatacaacgcacaaaatcccattccaaaacccatccaccgcgcccaaaacagaagcggaggcactcgttccagatcaaaaagcgtgacacccgcgaaatctacacaaatgtacggaaccagaactcccaatccatccccacgatgatctctgatccacaccgaccccgtcaaatctctcaaacaaaccccaagccgcaacgcatcagcagcagcagcaaacgtgaccgacaccgcccgattccctagaggaagaatttactcatgatgtatatatacctgtagttagggtttagctcgggggccacggagagggactgggagcagacggcgcagggcgggtcggggggctggatcaggcaccgcgcgttgggcacggcgctggagcagcccgtcccgaggaacaccagcgaggatgaggaagacggcggcggcggcggtggcgtcc

SEQ ID NO: 23893 - DNA, 1644 bp, Oryza sativa
ccaggctgccctggcaagtgcggaaatgtatccatcccttacccatttggcatcggcgctggttgttctgcgaccagcctgagcagctacttcaccatcacctgcaacgacaccttccagccaccacggcctatggttagagacctcctatcagaaacagaggtcatcgacatctccctggagcgtggcgaggtgcgcgtttacggtccagtcagttacatctgtttctcatcaaacaccaccataccagagaaccataccacagggttcaccctggagggtacgccgttcgtcccttccaccacccgcaaccgcttcatggccatcggatgccataccctcggcatcattggtggctacatgcacagcaactctaatctatatgtggctggctgctactcctactgccagagcatcaacagcacatccaacggtgctccctgcactgggatgggctgctgcgagaccaccatcatcccagacctgaaggacttcgcagcgatcttggtgatgaaccagagcgcggtgtgggaattcaacccatgcttctacgccatgcttgtggaggccggatggtacagcttcaggcagcaagacctcgttgggcacctcaggtttgtcaatgggagggccaacagaggtgttcctgtcatccatgactgggccatcaggaatggctcctgcccagaggggaagaaggtgcccaaagactatgcctgtgtcagttcaaacagcaagtgtgtgcaagcaagtaatagccaagggtacctgtgcaaatgctctgaaggatatgaagggaatccttatcttcccaaaggctgtcaaggtaacatacatataaactttctctagattatatttggagaccaagataaacaactccaggaataacaacataaccagaacataattatagccagttttaatgctgctgcgtaatatttattctttttgttactccctccatcccagaatataagtagttttagagttagacacggttattaagaaagtgtgtagaattaaataggaagaggttgtaattggttgaaaagtggaggtaggtgggaaaagtgaatggtggagggttgtgattggttgggaatggaatgttggtgaagaagttgctatattttgtaacaaatcctaagtgctaaaagttgttatattttgggacggagggagtacctttttttcagcttccgtaacaagccaaaatagttcaagctttgattgtattatcccaaatacatacttgtctgtttcaattctattcagacatagatgagtgcaagttgcgtaaggaggatcccaagtataaagagctatatccctgcagacatgggatgtgccagaacataccaggaaactatttgtgcaaatgcggggtaggtaaaaggccagatggaacaaactatggatgtcaaactgtgcttaaccaagttgaacgagtgatagcaggtaaggacttaatgagactcagagagtatacctttgggtgaaactaatgagctttttcaggtttacgatgagttgattcatcttgaaaaatcattctgcaggtctcagtgtttccgcagttgtgctgatggctttgatatgcttgctggtcatgaaattacaaagaagaaaatataggaaaga

SEQ ID NO: 23894 - DNA, 6450 bp, Oryza sativa
ttaaatcactcaatatcctactggatgatgaatataatgcaaaagttgcagactttggagcatcaacactgaaatccatggatagaaatgattttatcatgttcatccaaggaactcttgggtaccttgaccctgagacttttgtcagtcaccatcttactgacaaaagcgatacctacagtttcggagttgttcttttagagatcatgaccagaaagaaggctctgtacaatgatactttgaatggaaatgaggcgttatctcatattttccccttgatgttccaccagaaaaggcactgtgatatgttggattttgacatgatagacgagaaagttatggtagtactgcagaaactagctgaactcgccatgcattgcctgaacccaagaggagatgatagaccaacgatgaaagaagttgcagagcgcctacaaatgttgaggagactccacatgcagcttgtctcaaaatcgagtcctaccagagtttcttgctcgtatgaaggatcatcaatgcgtattccatcagacccgatgaaataccagagcatggagacagccaagctggtactggatgcagatattgcaagatgagaacagtatattcctttcatcgagtagagtaataagtttcttctggtgttgcaaggtcactctttatgtatattaattctttcttatggctaacacagctgtagtatgtagaatgtataattgcacatcaattctcatcaactatgacgtactatgcgaagtgatgttttcagtcataatgatgaactattaaaaatagaacattttgattttttttcactatctgttaatcagatcaaactacaccatcaaagtatcaaaccatatccaagaatgcctgtttcaacagattccacatgtccaggtaacataacatgtatgaatgaccaattaaaaaccatttcgtctatggcaaaaggaaatgatgctaccagtgtaatctactaattcaaatatctagattatctcattctcttgcatatcgatcctattgattgattagcattaggccctgaaatgtaaaggtggtgacacatctgaagcaggtttttacctgatctgatctgaactccggagttcgcatccggtgcccgaaagaaacttgcttcgcttgcttgcttgatctgaaccaccgattcccccctcctcccctccgtcaatccatccaaccgtgggccgcgaccagccagccaccggagacccgaccccgatcgcgtcgccgtcgcgagccagtcgatttcccaaaggaagatcctgatacccgaagaaagatctccacgatttggatggggaggaggcagcaacggagcgagtcccagtaagggggagatctgagagcagctgcggcgagcgggaggagagtggccgccggcggcggcgcgccggcgccgggagagccacgcgccgccgagaagaaacaaaaggcccataaatcaaccggcccaacaacaatgagcctcacgcaaggtctcaatcccattagttgggccacacgaaagtcgaaatatcaaaaaagtccatttcgagtccctcaagtggagggagttaatgtggactttttttaaggccgcacgtgaggtgtaatcctgttcttgggccgcacgtgatcgagatctcgttctgggcctaactagtatgaggccgcacgtgcggaagccgcaatccccattgaagccggcaatcctcgccgccgtcgccgcccccgtcgacggcgatagcctcgccgccgccgccgcccccatcgccggcgaatcttccagtggtttggtttgcttctctctccctctctgcactgtctccgttcatcgtacaccacaaaaagaaattgggggattttctactcaactcgggcaatttccaccaagctactaatttgccatgtataggaaacttcaaggttgaaaatctctgcaactgagcgcgtattatcgtacaggctgatgtgtttgccaaaaagtagggaaacatcaaggttgaaatctctgaatctgagcgcgtattaacgtacggatgataacactagtcatagatacttgtagggtttgaatttctctagccaatcacaatttacaaatggggactagagcaaattattaagagtcaactcagcccatttttcaattccaagtttgcagctggatatatctgcttgcatcttgacttgcttggattgtgatggatgactaataacagattaaagagaaccacacctaattcatacatctatttaaactattctagtgtgcatacatcagttcatcccaagaagaagataacacgataggcaaagaagggatagccatagattcttgttgctaggtaagccagctatggcgcatgcacagctgcttgtgtttctgataccaatggccctcttcctgaagttggcaatgccggtggacggtgccatggcgatgccgggctgcccggacaagtgcggcaatgtggctatcccctacccttttggcattggagaaaactgctctgcgaccaacctaaacagctacttcaacctcatgtgcaatgacacctttcatccaccaaggccacaaatccgggaaccggaagcacacatcgaggtcaccggcatctcactggagcgaggcgagatgcgtgtgctcagccctgtcaaccacatctgcttcacgtcgaacaccacatccaccaagtccagtggtgtcgggtatgacctgagcagaactcccttcctcccatcgccgtcgcgcaaccgcttcacggtcatcggttgcaacaccctggggctcatcactggctacaggggtgcctcgggacaatacgtgactgggtgctactcctactgtgagggtatcaacagcacctctgatggggcaccgtgtgccgggatggggtgctgtgaggcttccatacctgccaacctcactgccttcgccgtgacatttgatctgaaccacagcaaggtgtggaccttcaacccttgcttctactctgtcgtcgccgaggtcgggtggtacaatttcaagaagcaggatcttgttggtcacctcggattcatcaaggaaagagcccagaatggtgttcctattgtcgctgactgggccattaggaatggctcatgcccaaagaagggggaaaaagaacctagcagctatgcctgcgttagtgcaaacagctattgcacggccgtgataaatagtccagggtatttgtgcaactgctcacaaggatatgggggaaatccttatctttcagatggctgccaaggttcagcaattactcaaatttacttgaattttgttacttattaaacattgatttagtaggctgaactgaactcgtattttgtttgattttattgagtggttatattgttcttggtatcttcagacatagatgagtgtgagatgcgtaagctggaccccaagtatgaagaattatatccatgcagaaaaggggtctgtcagaacacaccaggaagctacatatgcaaatgcaagaaaggaaaaaagtctgatggtacaggttatggatgccaacctgcggattctccagactatagaatggttgtaggtgagcgccgtgtatataacagttcaccgttgtttcatcttcataaataagtgtctgcagagtttcataagtgaacatctaaggatcagtttcttgtgatgacaaacaaattatataaattgacttcctactgaataggaaaactaataatgaatgctctagtgcagttttgtttgcagctctgtataatctaaacatttttaatatgcaatgcatgtcccatctatttaagatattcttaatattcaagtggcattctcaatttgtttaatttatgtcctatgcatgaacatggaataagaggaactcaaacttagtatatattttttttcaggtttaagtgtttctgccattgtggtaaccgctatggcatgcatgttgattatgcaattacaaaggagaaggcacaagaaagagaaaattgaatatttcaaacaaaatggaggactcaggttgtatgatgagatgatatcaaggcaggttgacacaatccgtatacttacagaaagagagataaagagagccactgaaaactacaacgaagatcgagttcttggatctggtggccatggaatggtctacagaggaactctggatgacaacaaagaggttgccataaagaagtccagagtaatcaatgatgattgcagggaagaatttgtcaacgagataataattttgtctcaaatcaatcacaggaacattgtgaggttactaggctgttgcttggatgtggatgtcccgatgttggtgtatgagtttgcgcacaatgggaccttatctgagttccttcatggtactgaccacagatcaccaatccccttggatctacgcctgaagattgccactcaagcagcagaagctttagcttacttacattcatcaacatctcgcacaatcctgcacggggatgtaaaatcagccaatatcctgatggacgatcagtacaatgcaaaggttgcagactttggagcttcaaccctcaagtccatggatgaaagcgagttcatcttgttcgtccaagggacgatgggctaccttgaccccgagagctttaccagccatcagctgaccgagaggagcgatgtctacagcttcggtgtggttcttctggagctcttgacaagaaagaaagccttatacaccaatgatttcaacaagaatgaatctctgtcgtacagatttctgtcgatgtttcggcagaacaaacaccaagccatgctagaccctgaaattgtggatggctccaatgtggtggcgatcgagaagcttaccaaagtcgttgtgcaatgcatgagcccgagaggagatgaccggccaacgatgaaggaagtcgcagagagactacagatgctgaggaagctccagatgcaggcaacctgtgatggcgaaaacgatcgtgatgtccatgacaattttggaggatcgccgtcagtgatccttcattttgatgagatgacagatagcagcatagaaacgtctaaccttattctgagcgaatgacagtacatcttgcaacatgctgcaacttcacttgaatttgtctgtgtaatgaggtagtaggatgtagttctgttgatgttatagtcattctttccattttattgaaattgaagtgttttagagcatacagtttcagccattcggcttgtgttgtactaaccatttgtttctgtcaatctaatttcttcgagaggcagtcgtgctaattcttttgctttcttcacatttttttgttttctttggagtgctgttcctcaccatttaccaaacaacctctcaccaaacgtcactagaacgggattggtcatctctaacgggcttaaagcatcatctctttcgggcagggcccccgtcactaagcaaaggtcagtgatgtgagaaaatatctcaatcgggcatccggccgtcacggatgacacatctcaatcgggccaacacaaaagcccgtcacggatgactctcatctctaacgggcctaggttatagcacgtcattgatgactctcatctctaacgggcctagattattgcccgtcacggatgactctcatctctaacgggcctaaattatagcccgtcacgaatgactctcatctctaacgggcctagattattgcccgtcacagatgagtataatccacaaaaaaaaaatttgtttgccttcctggtcggtcacccatccaaacctcacttgtgtgcctttccggtaggtcacccatcgggaattgctctagaccaagtacgtttaacctcatagttttttgaagattggcttccgagaaagaaattgaatttgttggtatgggtattctattaatcttattaagccctatgccaggatgtcacaccctagcatcccctattcatatacattcattcacataacacaaccacaatcacatatcacatatttcactagcaaatcgagttaattggatcaaatatatatttagcaagtattatcatgagtaggaggcaaatcagacttctaggaaaaaataaatttcgaattaaattttatgatactaaatgaactcatatgaaaaagctatcaaaaacaaagttgtagaactcattgagatctaccatttttattttggtcatttctccatctgggtttgattgaactatataaaatttgtattttaaaatataggaaattcaaatattttttgggtagtaaatgatttcaaatggaaaaatcatcaacaacaaagttgtataactcatcaagatctataacttttactttggtatttttttctatataacattttttgaacagtttgaatttgaatttaaaaatatgacaacttcaaacaacattttcaaatactaaatgatttcaactgaaaaagtcataa

SEQ ID NO: 23895 - DNA, 4509 bp, Oryza sativa
tcctgacctcgagtcaaaattttttcatcttgatctaatgcatccttctgtctacaaggtacttatcaaatactgcaattcagatatgcagtaagcagtaacgacacatgccgatgtttttccttggggatttgggttgcctaaactattgtataagatgaatatatttgtaggagaatgttgatttgttctgtcttgcattactgcttctctggtggttaaagttaacataaaaaaaaaacaggcgaaaaaagcttttcattttcttgttttctaataggactggttactgctaaattaggtgaatagcaattatcttatttgacctctgtaaatatcttatgtgactgttctacgtttcaggttggacttcaatttttgtctggtgttatatcaggtggcaatgcttgttgcgtagcaatgcttcttgctttcagagaggccataaaagattactctacaccttccaccaaaactctcaaccgagatcttactgctaaaatcagtagctacgtgtcatttctcatcgagtgcaagcctctttcaatcagcatgggcaatgctattaggtttttgaagaacagaattgccaagctattgcttacattgtctgagtcagaagctaaagctagcctacagtctgacattgatcggtttataaatgagaagataataattgcagaccatgtcattgttagccatgcaatagccaaagtcagagatgatgatgtattactgacatacgcatcatcctctgttgttgaaatgatttttgatcatgctaatgagcttggaaagaagtttcgtgttgttgtggtagattctcgtccgaacaacgagggacaagcactattgcacagattagttgcaaagggcatcagttgcacatatacgcacattaatgccatctcatacatcatgcatgaggtcacaagggtttttttgggtgcctcttcgatattgtcaaatggagcagtttactccagcgttgggacagcagctgtagcaatggttgctcatgcctttggagtgcctgttttagtgtgctgtgaggcgtataaattgcatgagagggttcaacttgattctatatgctctaatgaacttggtactatatcattcttgcttgtaaattaagttattgattaagctttcctcaagacttaactcatgacatgtttactcaggtgatccagatgttatttcaagagttcctgagagggaagatttgtgccaccttaaaaactgtacttataatgaaaatctacaacttctgaatcttaagtacgtgcctgaattccatagatgttatagctggtcattatgtttctcatgttggataatcaatcgaatttcgttcacctgataggtatgacactatgccttccgactatgtttctatgatcataacagaatatggaatggtaagatgtgttcctttctacttctaaatcaattcctcatgcttatattcaaatcatattatacccatgttaacttcgtttctttttgctgctgttttttgtgcttgtaatagttcaatataatgctatcatatgctgaccgagttttaaaattgttagtacagtaccacttggattcatcgaccttgagctgcaaatttgtctccctttcttgctaatgagtaaccacaaccccataactttaacttcagccaagtcaataatgaaaactttttttctgttaggttttgactaaatattgctctagaaaaaggcaatacttatatctagcagtataacggttgcacttatctatggcagggaacacttagctgaatatgttttgctattatttatttttatctttgttgcaagaaggaatctgctaggtatactgggtctcacagtcagtgagcaccagataatctctgatacagagatattctttcatttgattattgttagagtatatggttactggttaggattgataggatccggttgttatggtaggataggattagcttccatcttatctctcagggattgcttaaggtccaaaacctactcatcaaggttcaatatggcaattacaattgcgcagtacatctcttgtacacactttcaattatgtctatacccacaactttttttctaaaaatataactaagccacatatataagtagtcgctgtcatcttaaaaatagtaggaccagtattggcacaatattgttgtttttgtatatgtcctaacaaaattatctttcagaaagctgccttatttggtctaatagtcagatctgtctgcccccaactggccttggatttggacagccgtaccatatgcctcggcagatatgcgagctgtcttcaaactgatgcgttattttacacatgtgatgtaaactttatgagtcacatacctgattgcaataagaatggcatacagaaaagaaaaagagacaaaatataacatggtccttaatagttcaataattgttgactatgtctaatttgaactgtacttctctcatgagtgcaggtttaattgttcttaatctagtttggaatatctctatgccatctagtctttagttctttacactaattgctttctcattgatttatatatcttttgtttgatactagtctggtgtcttcaaaagtcatagttttattgattaatatgaggacgtgaccttcacctttcatagtttcatagtgaaaatactcgtgcattggctgcataacttgatcctacatcagtgctattaagagttctatgacacaaatagttatttctgaaatttcagttagtcttttttactagttggtgattctcgatgatagtcatggtctcatggatgaaaacaagcagttttgcttgcagttacttcccattatatttcttgtgcatactgtttgttttgtctgcataaccagtctgatattaatacacgctatactcaaatttctgcttttgttagtcttatatttctctaccactcccctactgttttgttcatcatttaagatggctgtctcatttggtccattgaattgatgttttgtcctgctgtcgcagctcccacctactagtgtgccagtcattgtgagagagtaccgcagggagcacatatggatatagaacgaatgatattttccttgatgatttaatgagttggatttttaatatgaggtatgataatttgaatatggtgtgctgccttggcatggtgttgcggtcttgtggacacctgattatgctttaaaaaaagaccaaaacatcttttttttattttctcaaccttgaaaggtgtgttatctcatgtagtttctttaattaagctgaagtaatccaaataaaaaacttcaatcaccattgctaagtatggataatgtgccgatgattccacccttcttcattaggtatatatcactgtttattccttgttatgtaaataaatcttctcacgtttgattaactcatggggtgttctttatagtagattggtacatgaggaccctacatgaagtaaaatatgctatgcaaacttacaaggtctaatgcagaggagttcacatgatcccaaatctagtcagactagaacatgataaatgtgatagaagagcatatttgtaatctttgttaatcatgatttgcctcatttcatctaaaagtgcttttaaatcttttaatttttgttgtagttttgtaggttcatctataacttgcactgacaattggaatacttaatcatttaggcgagagcaaacaaccagccaacaaggaatgcagttttggatgtagataggacgggtcatgcaggaaaagtctcacatgtgaacagatgctagatccaaggatttctagctcgcttgttatcttcagtatttgtattcatactaaatgtgactgttgattagtacacagacttgttatcctgtactgaggtgaccagacatgaatttcaatggcacatcagttaacaccgcttttctacttcatcaagcgccctgggtctttttgaacttaatattaactgcgtttttcttgttaattgttgatgtaccttgctggtaaaaatggtgttacttttgtccattttatttatatgtttctgttgttttgctaccccctataaaactcaatggcttcagagcccacatatgttttctgcaggtactgtctatcagcatcatcgtttgagttgtgtggtcacccttggtccaatgcgcacatgaacgctagtcctgccaccagcaagggatgttcatcagtagtcatttgaacagcttgttgtcagtctacaagaatggaccctacaaataaatcatgcatctgagttagatctatgtcactttggtcattgaaagctcatcaaatcaagggctcaagttttaagtggcaccaggtggtggatggcctggtgaattactgttgctccacactcggtggatcattactgcggacctaatgagttctcagtacacactaatgggcatcttttggtggggttcattgctttcctttaagcctgctaa

SEQ ID NO: 23896 - DNA, 6907 bp, Oryza sativa
cctgcacccccaactatcattgtcaattcaaggtcatattggtgtccatgtctgccaaagttcttgggtacaaggactgccacagttctgttcctggctgctacgacaggtatgagtaaacaaacattttgactccattcatttcctttaattcatactgcacattacccagtaaaaggggcttgatcgatcaatgtcaaataggttgctaccatagcaaaatagctacccagagttagttccatgtcaaatatgttgtttgcaccatttattagatccggtcaaaatccaggaattgagaggctacccagaattagttggcgccaatgaaaaaaaatgataggtgaggtggggatgcccaactagaaagagttcttgaaagctctcttttttctcttttgaaggaaatcaatcaccatcccttttttgtttgggtactgcttggggggcatagagatgacaaggcaagccacatgatctgtattacttttcttctctcctccaaagctgggttagccatgttgatagtacttacaggtcgtcctttttttaactggtagctccagggcatctaggcacatacacacactgcgtatcatgtggatgctcaaacaacagtatgacaaactccactagtagaagtagttgacacatgaacaactgcctaatggaataaagatagatagagatagacgccctggacaaaaggacgggcagacaaattagggataatccaaaacattgtactacctcatgcatatggtgtacgaaatatttcatcatctttatatcttcagcttgcatttatccatccacgtaccctctttctccatcactagaaatcctttttggagagtcctacctatcactccaaaatcctcaccagaactttgatatactatttagagaactccttgcctaactgcaggccttgtttagtggagaaattgtggatcaattcgtcgcctgatagctgtaaatcctaaaactcctgtagtgcggaaaaataagagaaatcctcagaaagtgacttgttgcagcaatctcggcttggaaggtaaaaatattaattactctgtcattgtctccatattcttgatcaggtatgtttttttaactagctcaaaaccgtagcatagcatatcatatcatgggtgatgttgagaggagcatatgcaaggggggccctgtcacaaatgcgagtggccaagagggtaccaaatgcaagaggaaccaatagtgagtggtactagcagactaatagtaaggttttcacaaggttttgttagtgaggcctcctctcctcttctgctcctgtttaggttccttattatgtaccaacatactcctgtcttgcacgcttgcacgtgttccttggtatttgccccctgaccaatcagagattcagagacaccctctttcctatcttggctccacatggacatggacataaacatgaacatggacatggacatgaaaggaggaagggaaaagattatacatgctactactggctactagcagctgggactgggaggagagctgctggtgttctactagcttccttcctttttcgcatacgacgatcacctttcaatttcccccatcaatctttctggttactggcactgcattcttctgtcgatccttttgtcttgttactgccactgttcactcttacttaacgcactggcattactagtgaggagtatgctagctttagcgtaatattttaaggcaagttgttcacatcacacaaacatgcatgggatccacaccatgcacgaactgcagttttaaatttgcccaaatatctactactgtataaactcttgtgagatgttcccatggcaccatgatctagaatgacgtggaccgtcctccttcaagtcttagtataatactataacactatgcctccttaaaaatcacagaattgggcaacattctaaattcctttagctgaaactctgcactatacttcggtttggtggaggccacacgctgtcaatgccggtgtggtggttgctgagctggtgggcgacaaactacttgaaaggttgtagcggatctaggcgtaagccttgctcagtggatctccgggccggcagccttcgggccggtagcggatccaggcgtaagccttcgggtgtcgtaaccctcttgggggcgctgtcgagggtatctaaaccctctctccctttcttagcaagttttctctgggtgaaaaccacatctttcttcgatgggcgatgtccttgatgttgtgatgtccttgatgtcttgaggtaggtccttgatgtcatgacctccctggggcatcgtttttgcagtcttgcctttgtggtgttgttgtaggccgggcagcgatcggccacgcttagcgggggtcgttttggtgctcggttccacttgcagtggtttgtgcttgtgtggttagcgtgtggttcttggaggtgcttggtgcacgcccgacctcgacaacttctatcgtgttctttcttgtaacttttctccttaatatattcggatggcctccttcggccttcccggcgaaaaaaagaaactccgcactatacttgctgttgttagcaatagcaggagtatttcttaaggtgaaatgtgattgtccatgtcatctagaaggctataattgggcaacatgagactatgagagagccccatatacatgctttcaatggtgtgtcccttaagtgtcttgtgtggccaaggcatgctattaattgccccctaattttctgcaaacacatggaacgcatcagatgcaaaacacatgcctagctaggtacatacaacatgacacatgacattgaatcaggtcaccaactataatctctgacttctctgtagcaatgatctagagaactactactagtagctagctcctttttggtgagagtgtagtaagcaccaaactctcctgtcgtcttcctccgtggctgtggctatggtccgggcccccagtgggtctggacgtcctagtacacatttgcaattatgcaactccagatttagacattgtggcttctcttttttttgccaaaagctcctcccccaactatccacctataaacagcctccttcctcacttgatcacccacccgctcatcatccatttctcatcactgagctgagctcagttcagttcagttcatggaagtatatctccttcttggcttcatttgacaacttccaacacaagcagaacaaggtgatcaaatcatcctcaaggcttgtcttttttttccttctctggttatctccaatggaggctcccccttctctttccatcgtcgacgaagacggcttcgtcatcgacctctcgctgacgctgggcctgacatcgcctccgccctctccaggcggcgcgtctccttccattcctccgggaagaggcggcggcggcggcacgagtggtggtgacaacaacagaggcagcagaggtggtggcaatggtggtggtggtggtggtgtgaggctcttcccttgcctcttctgcaacaagaagtttctcaagtcgcaggcgctagggggacaccagaatgcacacaagaaggagaggagcgtcgggtggaacacccacctctacctcccggccggcgtcgccgccgccacgacgacgacgacgacgacgacggcgatggccgtccctgacatggtcggcatgcccacccaccagatgtcctccatggcgttgcactcctgccggcctcaccagggctcccatgtcaccgccgccgacatcgccacgctggctgcgccgccacattacaccgtcgaccatggcgttgccggcatcgccagcggcggtggtgacagctcggtggggtggcgccaaaggcaaagggaggccggcggcgagaagcagaggcaggttgatctcaacctgaagctctagctagtagcttaagttgttgctcatcatgctgatctgtgctgagacgatgatcgaggtaggtgctgtgcttttggtttgtttcttcagagattcttctttcttttctttcctttctttccttggttatttcttcttcgtcgtcttcctttgagagctagtgtgcgtagtgccacgcaagtattttctactggggtgtacaattaagaataaatccgtggccattgtaaattaattaattatgctgttgccttgatcaaaagtgttgcactctttgcacacaaatgcatatgcctttgttgtgttcctaattaaccccctctgatttgatgttagctgtttcttgaattactcataattttttttctaagcttagatcatacagggatgatgcagtttctgttaagatgcactcttatatccaaatatatgcatctggagatgattagccagagtttcaagaagattcgtatatatatccctgaagaatgttttctggtgagaactgatgaacgacaaaaggtttaatttgctgatgacttaatgagactaataacaaggattatcatggatgaattagctctaactgcaaaagggatgaagaaatatatgcataaaacattctataagcctctgttgccatttgcctcacgagatccaaataatcccatatgtagggcccgatttattcgagttgtgcgctgagatcgatccatgcttgctactagtagttgtgaacccaacatcaattattttgacgtgacaaatcccttttaatgtttttcatgtctcaagtcatgtttactttcataaacagagtaacaataattcaagtgtgcctgtacatgaacacatgcgcttcatatcttttcagttgagtattggagacttaatttaattgagtttcaatatgaaactcaatagatatgtcataaagccccattttttcggtaacataaaggtcctacccatgatagattccattggtctttttgtctttcttctctgctgaagaaagggatagcctacaatgtttcttgcaaagttattatacatgttacagaactatgttagaagggtgctgaggctgtgttagggtgtgttcggaactacaagttcttaacttgtgctctcttgttttatgtgcgcacaattcctggattattaacaattcctggattattaaacgatgtatttttttcttaaaaaatactacctccgtccctaaataagtgcagccgtgtatatccgtgcctaacgtttgaccgtccgtcttatttgaaaaatttgtgaaaaaattaaaaatatttagtcacacataaagtactattcatgttttatcatctaatagcaataaaaatgttaatcataaaaattttttaaataagacgaacggtcaaacgttgaacgttaatagtacaaaactgtacttattttgggacggagggagtacataataaagttgatttaaaaatcatattaatttatttttaaagtttttatagctaatatttaattaatcatatactaatggccaccttgctttgtgagtttgtgtgtatgggagaaaagggttcttattatataatgtaggatatatgataagtgtgtcgattaagatgacaatactaaaaagaactcttctaatactcttcgatttatgtttttctaatgaccgtatcaatctttctggacataggcaagaattaatcgatttgtatcacgaggggaacagaagctgcatttgaattgaaaaaaaaaaggagacaaaagcagtactttggcagtagtcacttgtcacagcaccaattatatgtagttgcattatttaatttctgttcatgtgtactatgagatgtttgttagtaattaaaaaagaagtattccgatctcttcatgggtactcaatggggctcccaaatggcctagaagcatattactaaattaaggtcccgtccatttctccagtaagagttggataaaaataaagattttcgtgacatgtttttcaaattgctaaacggtgcgtttcgtgtgaaaactttctatatgaaagttgctctaaaatatcatatttatctattttttaagtttgtaataattaaaactcaatcaatcatacattaataccacctcattttgcgtaaaaaacttaagctttatctttatctttatcttaaggagaaaagaaccccacctaaggctcgttccaagcacaggaagtttatagaatttgcaagaataaattcattttcttaaaaaaatctcctttacaatttttttgttccagattaggcctaatcaaatttcaatttatcgttgataaatgctctagttacatatggtgcacatttcttcaaagttacaacctgcaatgatctgcatccagacatcaatttgatgcactgtccctcacaggcatagatgttagccaaccacccaagaaataactactataaatccaaacttgattaaatctcacaaagattaaagaattttctactctgatttcctccggcatgccaattaaggaatgtgagaggggttggacctggctaggaacagatatcttgtttttttctatgaaaaaaaaattatgttccaaataaagcattgtctcctcggccagttggcatgcacatatggaggcagcagcatctcccagtttcggccccagccactgtgtctgtggctcctgctgctgctgtcactgtgccacatatgatgtgctgcaagtcactgttgttggtatgttgctacaaccaagcagctgtaaaaagaagaaaaatgctatcatctaaaaagggaagaaaaaggttctcatggaataaaattatccaaatcacctgcaaaattcctctgatccaaaaaaaaggcacagaaatgtacttcctccgtttcatattgtaagattttctagcattgctcatattcatatgagtgttaatgaatctatacatatactccctctattttttaatagatgacgcc

SEQ ID NO: 23897 - DNA, 8934 bp, Oryza sativa
aaaagtcaacggcgtcatctattaaaaaatagaggtagtatatgactagatttattaacacacatatgaatatgggtaatgctataaattcttatattacgaaacggaggaagtagtgttctgtgataaaaatttgatgttacgaacaagattatatcaaactcttgaccagtgacaactttttaagtacttatagttttacatttgacatgtataaatttatcttgacaagtactaaattgtgataaaaaaaattcacatggctaataccatgaacataaatcatatattttcaacgtgtattataaactttgtagccgttaactttttatgactataattggctaacttacaatcattaagcaattatctatagtgcactttggctgatgatggagttctagagctccgtagtggcatggttgcatggcagaaactttatagatgtacttttcatgtattatttatctaataagtaactttttaacaaagaatacagtcatactcttcgggcccatttaaatcgcaagaatgaaaaaaaaaagaaggaatagaaaatacgaaggattcaaataagaatataaatgtaaaacagagaattgaatacagaaataacataagaatacttatttgattggagcataggaaaaacacagccggatgagagagatatactcgaaagaatatttaaggttagacctcactggtggagaagtgctttttagtcccggtttataaagatcgctatctttagtcccgattcaaatacccgggactaaagatcgatcaccaaccgggactaaaaagagggaagcggcagtgagatggtcctcttttctttttttttcttttttattttctcccgaattgagtgggatatatatcctaaatcaaaccccaaatcctcaaatcaaagtaacatcccaaatctacatcccaaatcttaaaattacttatacacataaatcaaatacatcacaaatcctacaaaaattacaaacatatcaaatacatcacagatccatacaaatgtgcaatgaatcacaaaattatctatacaaatgtgcaaatgggctgccgccggccgcctgctagccgccgccgggcgcggccccaccagccgccgccgcccgaccgcgcggccgcctcgttctgctgccgccgggcgcggccccaccggccgccaccaccacccttccgccacacggcggcctcgctccgctgccgccgcccgaccgcgcggccgcctcgctccgccgctgtcgcacggccgccgccaccgtccgccgcacaaccgccgcgcggccagctcgcttcgtcgccgccgcccggccgcagcagagaggggaaggaggaggaggaggcggggagggggatcggaggagaggggaaggccggaagggggagggaggggagaggaagaaggaagaagggatgaaggcggataccgagacttagtctcggtggtttttaacgaaggagataaaaaagggaggtgataccgaggagatatcggcagtttattttggtcccggttggtataaacaaccgggactaaaaatagatcttataccaaccgggactcaagataattggagcttaactgtacccaccaacttctttgaaccgggactaaaatgatctttcgtcccggttggtgtaatcaaaatttttttaaccaggactaaagataagatcatctttagtcccggtttttattgcaactaggactattgtggaatttggtcgaccgaccaaagatggtttctccaccagtgcctcttgttaactttcctccaaaatctctataagattacgtaatccgtaggaattttaaaggatataatatgattcaatcatttgtttcaaaggctttcataaaatttttttttttcataggattaaaatcctctaaatctactacatttttcttacgaatcaaagagccttcatgtattaatgaccggagaaaaccttttcttttttccaagaaaatgatgttacaggaatttttgttggcagtgccactctcattaactagagagggctccacatcacagtgacagtatctgttgccacttgttgtttgtcggcaatagtattaaattaggtgctatatggcgaataatctgtccacgcaggcatctatatgctacaacagtgcaacatacggaccgttcctattctggtaaagaccattttctgttgctccagttactttcgtacggcagctgagttggcattgtctgctttccacagctaacttgtttgttactaagaaggctgttcagattgatgctagttttaaccatacattttttatatagttatcaaaaatatgtctacgtttagtttgttactaaatttttagtaaatgcataagaaattctgctaaaattgttaacttgtcaaaattttggcattgccaaattactttagtaaggtttattttgattataatctgaacaggccctactataataatagtgtttttttttctgttctttcacttttcactatagtaaagcaattagggagaaattcatggatcattatcctacttctatttagatcattatcggcaaaatacgtatttacaaacaaacaaactgctgcatgatgtgatagaattaaaacggcaacataagagcatctccaatagcctctccaagtgactctctaagctaaattttaatcattccaaccaaaaaatgtgctccaacagcctctccaactagatggttaagccatccggttggccgaaaccctccctcttctagccaaatttggtcagccaaaaatcactggccaaccgtaggccccacctacatccctcctcccatctcctctcttgcatcggctagctcgctgctggcccagcatcgacgacgacacgaaggagagaggcgccggagctgcctccctccgtttgcataccccccattgccgccgtcctctgtccagccgcgaccaccgccgtctccagccgtgcgcgatcgccaccgtcgtccgcatcgtcgatagctgccggattcagccagccgcgcgacctccaccgcctccacgtgatctccgcccccactcggtgaggatggcctacccaccgacggcggcacagacgatgccgaccgccgctctgccctcccctccctttccctgcagcggctcctcctccttggtctgcccgcccagcgccgacggcttcttctcctagtgcggcgagggagggagggagcggcggcagggtggctcgatgccttcgccaccgcctccacaacatcgccgccgctgaccccactggcatgagcaatagcaacgtcgccgccggtttgaccctttgccgttgatgccgtccgcgtctccgccaccaacctcgcctcgccgcgtcactccgtccgccttcggcctcgtcgcccgtagcagcctccttcggcaagagagaggattggagagaaggggaggaagaagaaaaggaagagaatggcaggtggggtccattggaatgtggagagtctgttggaatagaagaaggtaggctggtcaaacaggtatttggagagtcaaaaatagccactttgtaagagatgctctaatgctccatgacaaaggggagaaaagcgatagcgtgcagtaagcatcagatccccacatgacattccagatgggaaaaattattgccgcaagaactgtttttcttttattttcttttcttttcccaacaagctaccaccaagctgatggatgattcagatgtctcatcgcgtaccttgacacagattttttttttttgggcaaggatcaaaaccgaaaaggaaactgcgtgtataaatgttcagaggatgatgccatggagatcactcaccaggttgatcgtcttcttcctttggccttcttcctcatgagtgaacccttcatgtccatttgacgccatggccattagcagcatcagcatcagcatcagctgggcaggcatatctctgcatctgcatgagatctttgccctgtcctccactgcctcctgtcgccaggaactactactgccccactgatgcccatcatctccaacagagggaagctgctccctacatcttcctgtaggcctgtgaattgtgatcatggcctcatggccatggatgggatatgcagcagcagcagcagcaacacatctggattctggacagatgtccatgatgaacaatgcaatcgcctcgatgacgaccgtcggatcggcgatccgatggcgggaacaaatgccacgtccaccatgcaagggagaacaggtcaggcatatcatgatgatttaacagaaggcagctacaggtgattaaacacaagaaaaatatcatccaagatgctggcaaatggcatcagctcagggggtaccagcaacagaagagaagctggagccatgtccatgtaaccagcttgtggtaacacttggcttcccaaacatatggtagtgcaaaagtttaacatggagcaccaaacatatagtacagaaattgaacatggagcaccaaatgtagcaggaagaacagagagaccaataatgcatgggtaagggtataactttagtgttggggaaatagaatacagtgtctacgccacaatggaggtcactacgtgacaagacgaacaaaggacagtggttctgaatccacaaatcatgatgttcaacaatgtcattaagaattgaattattggcagatctgctcgacagcggccacaatttgggcaggctgcacgacggttgcgtcctccagagttgcagcatatggcgtcggtacatcctgtgatgacaagcacatgatgggggcatcaaggtagtcccagaagttatcaatgatggccgacctcaggctggcgccgataccacccgttcgcatgcactcctccacaatcagaacgcggtgggtcttcttaatggagttccctatcgtgtgcagatcgaatggtttcagcgacctgatatcaatgacctccggatcgtaccctttgttcaccagtgtcttggctgcctgcatcacatggtacctcatgcgagagtacgtgaggatggtcacatgctcacctggacgtaccatctcggcctcctccaagcagcaaatgtattcctcatcagggatcttctccttcaggttgtacagaaggacatgctcgaacagcaccacagggttctcactccttatggcagccttcatcaggcccttagcattgtaaggagtagagcaagcaaccatttgaagtccaggaatggactggaagtacgattcgagacgttgtgaatgctcagcaccaagctggcgaccaacaccaccagggcctcgaatcacaatcgggatcttgaactggccacctgaggtataatgaagcataccacaattgtttgagatctgattgtaagcaaggagaaggaaacccatgttcatgccttcaacaattggccttagccccttcattgctgctccaactcccatgccagcgaaagaattctcagcaataggggtatcaagaacccgaaggtctccaaacatctcagccaagcccttggtcaccttatatgaacctccatagtgaccaacatcttcaccaaatacacaaactgtaggatcttctttcatctcttctatcaatgcttctcgaagggcctcaaacaacaggacctcatgactgcggaacaaaatgttaatgcagtcaggcgacttttcagatcaactacatgcaaatgatatttgtcgcaaatcattctgaagatttctttatactttgaaggtagcataatggcattcaagaagaatatacattattcactcaactcttcaagcagtatatcagctgtaattattgtaacaaaatttaaacaaactacagttggtcagtgttcgtcgttggcattactgattggattatcctggcaagattagattgtgttcagcatatctaaaagaaaccaatgatcatgtaatatttatatgatttcatctacaacagtgctttactcgtaaattaacaaataatgtatatggagaaaataaagggtactttggattgttttttgctagttacaagctcgaaacagtcatcttttttttagcagtacccaaacgttcctggacaagttctggctgtcactaatttgcacttccctggcctcatttggatgggctaaatccctagcccatccatgtgagtggtccaggattttagacagctgcaaatgaggccttactgtagtgtgaaaccaacaaatagtctcctgtctgtcaaaatggatcctgactggtaaatgaagaaggcaagaacaagtccagttgcatggaagtgactccttatagactacttcaacgagatatcttattattgccacattcacacctataactttatgcacataagttttaatttcaatgagtagctgttgttcttcacaatcacatatatccaatttgcacaagctaagcaaatgttgtaaaccaaaccaagtccaagcaaaaacaggaccccctaagtgcaagtgccagacctgctgatgcaggatacatattcaactaaagtactaaaatacgagaatgaacagaattgtccaaggaaccagctacccaagcattttatgtcctctgcaaactagttcaagatcaagtagtttatctaccatacacagggcagcgtaaatatgtcttgtgtgatgtgattcaagctaaatgtaacacaactggctattaacataaaatggcaaatgatgcaatgccattgccataattgttccattactgggatcccagggactagttctctatttcgaagaccatatcattcaggacatgtgctacacttggctacattgttcaaacattaaactggtcaccaagtttggagataattaaactgctactgttcttttcctccaagtctggagataattgaaaacatgtgtgtataaattaactaggggaaaaaaaactcaggctgctttgttcatgcctcccagttaacaccactaattagagaaactaaatcaataaatctcatttccaccaaagttaaaagcataggtgcacagcaaagcaataaagcttcggattacaactttacaagccacaaaaagccagtaattctgttcatatgagctatacaatccacacacaagacagtagtaatcgtcaaaaatggcaggaaagctactccacttatacgattgcatctagaacaaaccgaatcgtttccccagtctgaatcaatccagaattccaggcgttctcctgatctcttctcttcgtgaagagcaacacaaccattttgaaaataaaatggaaaaaaggagagaaacaacttacccgccggacttggattccgccgtcgcatccgcactcgcctgcaaacacacaaagaattcagaattcagttaaggaattctgagcagaggacgaagaacaaagaacaagaacaaagaacccggcacgtaactgtaaccgcggcgcgcgctaccaccgcccctccgcgcgcccgcaccgacctcctcgccgcgaccacgcgcacgctcctgcctggcgcggcggatctgggcttggcggaggcggaggcggcgccgtgcagcgcgtactgcagcgaggcggcggcagcggtggccatttctctctctctctttgctcgctcgcgcgcgcgcgtggcgggacggcgagaggtctcggattccggcggcggtggcggctgctgcggcggcggcggcgcggggagggggtgttttatagtgtgaacgcggcgagcgcggcggagatggaaacgaggcggcggagagcacgaggcgaggaggaggagggagttttttgtcgtggacccggtctatggaccgaggagaggtggggcccacatggagggtgccggttcacgggggatgggtgcatggaccgggtgcagggagagtgggagcctcggttgcatcgacgggctttgctggtttttgatggacctggtttgctttctttgggccgatccattaaggcccaattaacaaggccttcctttgcttctacgaccattatatatatgggctttattctgatttctttctttagagagaaatacttcttttgagatgatagtcatatgtgacataaatagagttatgaagaacacaaatgtgcaacaagaagagccatttaatggagaagaaatagtcatccaatgcaaattgtagtaaagaagatttaaatcaggtaattagaggtgtacatccagacctatcaccgattgattaatgctcattttatatctaccccagtttctttttcacttactagctaatatgcccatgctttacaaggataaacacacatctcattaatttttttagctcttatcaatttatcatggagcccttaaacaaaaatccgatcgaactacccgttgagaagtaggacgatttttccgccaatgtatggcttaattaggggcaggcaaaagtgtattattttagcaatatatagactcagtttcactgtcactactatgttatttttaagtagtaaattaagattctgagctaaattatacactgttcatatcttactcatacagttccaaacaaaccagcaggtgggtcctgacacttactagagttcatcaaaagttagcttacttctagtttcttctctcttgtttcatataatccctggccgtgtacatagtgatgagtatgaaaggagaatataagaagattctagaaagtagaaacctctaatggtgttaattaattgatcacataccgtacataaatggggctgttcagattatagtcaaaataaaaattaccaataccaaaattttggcaatttggtaatattgccaaaattttggcaagatttattatgtaattaccaaagtttggaagtttgctaagaaactaaacggatgcacatatttgacaactctaaaaaa

SEQ ID NO: 23898 - DNA, 5674 bp, Oryza sativa
caactccatagaaatcacaaaacccaattcaccaaagccaaagcaagaactagatcaagaagagagaagaagccaagataatccagcagaaataatttcagaaatctatagctagatagatcatagatgctgcctctgctgaacatgcaagctgaagctgctggtggcgatggtggtgatgcagagaagaagagtggcaacaacaagcagatgatggtggcggcgaaggtgtccatctccattctggtgatgtcgctgccggtgctctacgtctccttcctccgcatcccgccggcgacgctcttccgggacaccaccttctggttcctcatgtccaactccatcatcatcgtcatcgccgccgactccggcatgctcttcttcgccgctaggcccgcctcaagctccggcgagcttcaagccatggttgtcaccgatgtcagcctcagccatgcattggtggtggcgccgccgagaggtggccaagaagacgatgacggtgttgtcgtcgccggcgagccggcggaggaggagtcgacgatgatgttggtgccgtactacggcggcgaggtggtgcaggcagcagcaaggccgacaaggctgacggcgagcagtgaggcggagaggacgacgacgatggcgcgtcgccgtcgtcgaagcaggtcgcactcgtcgcaccacgcgctgatgatgacgccgccggtggtgcaggagaagagcatcgttgtcgtgagggaggagaagctccggcgaactgcaacggagcggccgccggagccggaggaggagatgacaacgacgagcagcagcgagtactcgcggctctccgacgaggagctgaaccggcgcgtggaggagttcatcgccaggttcaacatggagatcaggctgcagctcgagaaggaacaagaacaagctgcagctgcttgacatatgcaagaatccgccatggccatgtacaaaatcgatcaagttcaagctcaaagctcaaaggctctagctagctccatgtcatgtccatgtccatgtagatgttgatgcgagtttgttaattaggttgagcttttggacatggagctagctagctaggcataagctccatgtcacagaaaataggtcggttttttaaaaactcccacaaaattcctctaggcctattcagatcggaggaattttgcaggagtttttaagaaaccaagctattttctgtgaaaattttgtaaaattcctacgtttcaaagagccagcagtagctatagctaagtagttagctagtagcttcttcttgcttggttcctcttggtagtcttctgcatccatagatgcaggagagtgagatgagaggagctatattctcatgagggatcatataatttgtattttgtatttgtgtacatcatcaagagatcagatcagaacaatccaagagatggagtaatatattatagcactagtagtagttgttgtactactgatgaggattagattttgcatgcatggggatatagtaataactaataataacagagatctctatggcaagagagatgaagtgtatatatggcttgtttaattaattatggctgccatgatacaagtgtcctctctactgtacttctggcaccaagatttttcactgtagaaatgttttgggagtgggacccacctcataggaaaactgtaacaaatatagttaggttaaacatgtcgaaataaacatataagatgtctcgaaaaattcagagttgcaacatttttctccctgtatttctaaaacgcaagtctgatttttgacatgaaaaatgagggtgtatcatccatgtggagtcttgtaaaacaaaactaaattcacacgtacaactggtttcctctagagaaacataaattaaagctcaaatcaagaattcagagactgatctttttttgtattaacttattaactgaagatgcactgctcgaacgattttgccatcagaacagtgtacagcttcttattcgatcgatctgcagtacttatgagttatgacgacgacaagatcttgtcctcgtgatcttacgcacaagtacgaagaaatttcaatgcgctccttgaaggtatatatattatctcattaatctacctctgttaatttgcatcagtgaattgattaagctggcttagacatgaggatccagatgcaggggaggagcaaggttcatagcacgagcttcacttaggtaacagtaccactgtcctgtcatgtactgtgtagtaaagtttccagcctaattcttcctccggttccataattcctatcattttagataaaattaaaatcaaactattaggactttaatgattattaacttttagagcatttagtttaaagatactaacaacaatatgtatagattagcctaaaaatattttataaaattaaatacttatttattttttatatttattatgacagaaaattattgtcattttgtagatcatgttactgtgtaaaataataggtattatcaagctgaagggaagactactagctagtaattaagtaattaagttccatccggactggcaacctaactcatttacagtgcgtccatttgcaaatgacactgtgagcaacagtttttttttctcgaacgcgcaaaaaaattacacatcaatatattagaagaatagaatgtttgttacacgacgcaatcagtcagaccgacttatgccaataaagaggggggggaagactaaaataaagaagagacgaaagactcctgtgacggctacacacaactccaaatagctgggagggggcagagccattacctttctaggagaaccccaaaattagctgataccagctaaagactaaacactatgagcaacagttaactgatggggatcaaggctcctagatatttgtcggcaagaacgtggttaattaattaacttttgcactgttaattacaaggatgattaagtatagttccctttcttcaaaatataatttttgcactatgattttaaaaatataatattttttttgtgattcagaggcatgtgtcaatacaaggaaaatccttgttcttgcaaacaaaataaaagagcaggccaatatatatacacaataatttgctacttaattatctctgctaggctagctagctgacctacatcaaggttaatcaagctctattttatcatttgttggcttatgattgatcactgcaaagtctttgtacttatcccaacatctatgatcacccaactgtaataaactaaaagagaagcattgacagggggttactcaactcttagctgtcatgatacacgtgtgtattcgtgtggcatgaatgttactagaattacacatatgtatgcacttctctaatcgagcttaaagaaaatcatacaccaccattgcttacatatattgtaaatgtttgcaaaaccaacttattggagaggtatagcactggaaactattggagtatatatcatttttctcgattacataaaagacgcatatataagtacagcatacacacacccaaaaattcctgaaagggtccggtaagggtatttctatatccctcagcctccatatacactagtagggaaacgattaaacggtaggaaacatttggatctctaaggctgcattctttaagtttaagttcccaacttcccttaatttgattagagagtgtaagacaagttcatgcttggtggtgactgatgagtggtgacctacctacctcatcctgcatatgaattgttggcctggcttgaaaccagaggatgccaacatgaaaattcatgttgattcttgtaaaattgtagctagtgaaattagtatggatcttattgtccattctaggccttaccaaactagcttaggctatgttcggaacttccagttcccatcctctctctcgtttttcgtgtgcacgcttttcaaactgttaaacggtgtgcttcttgcaaaaagtttctatacgaaagttgctttaaaaaatcaacttaatccatttttttaaaaaaaaatagctaatacttaattaatcacacgctaatgtactgcttcgttttccgtgtggggagatgggttcccaacccacaagtaacggatagtgtttttattcttattcaccaaaaaggtatttatttgtgttaagcccaatttttacaagatatatattaccaaaaaaaagattacaagcatgtggccaaattggattttgagtagttacttctaccaatgcaacttgcataacaagatcaactaggaagctaggcaaaccaaatcaggatggccaacaagctggctggtcatatgtaaagctcagaatttaaataatgtttgcctcatcctgtgcaaacacatcctttagctgctaaggagataaggcacaaaggccatatatgaacccttttgttgaaacttttgctataatgcatacaagcaacaagacaacacatacttgtgtgaagcaaatctgctttgactttcttccacacgaaatatctctaccttgacctgattgcacactggattgtgatgtacatgattgaatccaagatgaaaggacaataaactttaactggaacatacttttactcaccaccaaacaccatactttttctttattctatcaaagaaagcacatactctatctagctagtttatcctcagaaagtaaattgtactttttagcatcaaaaaccaggttcattggttccttggctcctttctggatactcctatataaattattactcatattcagcttaaactttaatcaatctttgatcgagatatatgtcaatgagataacgaatggtaaataatggattgtgtgaattttttggcaaaaaataaggaattaattaccccttccttgttatatatgctagatttctaacttgggatcgaaacaatctagaacatgacacgttgataaacttgtggatcctatatgttagacttgcataccaattacagctcacctcactgaaataaaagtgaccccctttgacaatcaaccatggcatagctagctgtcatgaaatttggttgcttacatagataaaacagaaaatctagataacggcatctcgtaggaacgggatgacttaaaaggtctacgttatttccatcaaaacagttgtacacgcatgcggcacgatttcctactaagtggcaggtctatactccacaacacatccacgcgtatgtgtccttcctgcagcacaaggactctaaatacactggttgggcacttgggccatgtgaatcaatttgggcatgcacctctatagacttgacttacatcttctatataccacggtcatttttaattttttcgttttctccttttcttgctttgtttcttttcttgagtgagacacattgagatttagtatgtcatgtaaattaattgacacaatgatattatgtaacatagattttatttttctttctctttttgactggtgttcacttttccgtcgctatgctgataccagctgataccagtatggtaccagttgcatggtacctggtacctgtgacagctggtatccgatacctgtgatacctagtacctgatacatgtgacacctggtacctggtacctgtgacacctgatacctgatacctggcacctggtacctgtgataccttgc

SEQ ID NO: 23899 - DNA, 2495 bp, Oryza sativa
tcctgcagccctgtttgctacgttcaacataaagagcagtatcatatcatggccatctagtacagaagatcacacgagctggcaatccacaacagccattttcttgtgtgtagtacatccggtttccttaaattgagtgaaaagaacaaagaactgaaacagataagtgttttttttccttttatttcttttttattttgggagaaaggggtattacccaacttctgttccaagctaataattgtttggacaggtacagaaaatgctggggataacagcggtttgaattagatagttttacatcgcataacctgacctgcatagggtatcagtatcaccaaataacaatgcgacaccgaaccaactattcaattctaatgaaatatctcagcaaggccacaacttgtatttctagagaaaatctagcttcccagcaaatcaaggcagaatggagaaaagatctttgaccataggtattgactacatggtaacaagactttgcctgctgcttgggcaatattatgataaggagaattaatttttgatcctgacagtctgttaactattcctttcatcatacaggaacgaggacttatgaaaaggattcaacaaggcatgatgctgcatggtctctgttagctctacagttacttctgttattcttggtttctcccaacaaaggattctcaatgactagaatctttgtactgaatgcacagcaaaatgtggcacgcataaaaacagaaagtatcggtccattttatactcttcgtgacagattaaagcaggcaaatgaaaatcatgtgagctgtacatcttttgatatttaggcagtgctgatcttaatataggagcattacctttacgtgtgaatgtagctgtatttactccaattacatgaccatatgagtcaattagtgggccacctgagttacctgtcatttgtcaatgttagaaaattatgtgaaataaggggaaattgtgctttttgacataatacaaatacccagcttatatgaccaatgaactctggatattaagcgacgaagctaaggaacatgaaaaaacaaatactacctccgtttcaagttataagactttctagcattgcccacatttatatagatgttaatgaatctaggcacacatatatgtctagattcattaacatatatatgactatgggtaatgctagaaagtcttataatatgaaatggaggaagtagatgtgaaatgaagaattgtggaataagaatcaaaagctgccctgcaaatctttaaaattcctggaattgaatggtgtgtgcagaacaattattttccacttcagaaaagaaaagaaaagaacaattatattcctggaatggaattgaatttataaacactttacacttattttccattcatttcttctcagctttttcttatcaaattgttcatggcataccaacaacaccaaagttttgtgaatgagatgatcatcacgaattttgtagatagtggatatttcattgagcaatgaaatcacatccagatcattacgaatatatagcaccactttcagctcctcggtagctaaatccgtggctgtcaactaacctataggttagtttatacactaataaattgatcagaaaatttctgtgcagttaaaatcatatttagaattatctatagatcttattttcaaaggaattatatttgttgggcggttgggccaccagtccacctcccattctcttttctcaaggcccattgagaagctataccatgattgcatccaactctaattcataggctttgacacctggactcttgggcatttaggccagcccatatcaagttcacccaatcataccctttaaggtctggccacaaaacaacgcaccaacaaggcaacaagttatgcccttttatacatatatttttttagaacagtgaacgtatcttccaacatcacttacaacacaaacagtttttcaccatgctcgccatatggcgtacatatttagctgatgcttgtgttagtccctatttcaaccttacagtcagataattcacaccaccacactgaaatatgctctgttcatgcatctaatccaaacagaacaagttccatagatctaacgttcttctaggaaagcacagcactagtaatataacacgaaagcacatctcagatgagctttctatttggaggaccatgcccctggtttctactcacatagagaacagacaacccagtccatacgtcaagtaccaaaaaagaagtaaccactaaggcacaagataagcccaaaaagaagtgaatctgaaagactacatcagtacatttaaaattaaattaaatgtatctcaactgagatagagcaaaagcaaaatatgaaatgttgccatcggccatatttcaaattaaataatcagtacactacaccatttcagaactagttggtacttggagtatgtcacaaggaaagatgatttactctatataa

SEQ ID NO: 23900 - DNA, 4340 bp, Oryza sativa
agctctgcccaactcgcaagccctttgatgttccaatcagagcaggcctcaacttatcaccatcaacatcaacctgcagcaccaatagacttcaaatattgaatttggaaccagattcacataactgaaacttcatcaacaaaaggtgcattaccttcagaacagcaagatcatacgatggatcacaccctactagccttccttccttcaaataactattcccactagaatcctccaataacacctaaaggaaacactaaacaattagccaatggttaaaacttaaaaggcaagaacaaggaaggtcactatctttagttaataacacttcagtgtataacagcaacaggaaaccttgcagcgatgaaatgcagatccatccccagctaattttgcaaccacatggtaatttgtcacctgaacgaccaatgtgaccaatcagtttttgaaacattaaagaacaatactctagcattatgatcacatatttgcgcatatgaatgcatcaggattccatattttgaacaaagttagcaagaaataatccataaggtgatactccttccgtttctaaatatttaacgccgttgacttttttaaatatgtttaaccgtttgtcttattcaaaaaaatttaagtaattattaattcttttttatcatttgttaaatatacttatatgtatacatatagttttacatgttccataaaagtttttgaataagacgaacggttaaacatgtgctaaaaagtcaacggtgtcaaatatttagaaacggagggagtaattgttttctttttaaaacaagatgatgatatctttttgggggtgaaatggagatggtcggtgcttgctcacaatgtggcccgcggtgtcccagacgaacccagagccggtcccctccaccgtggcgcccccctcctcgccgtcctccgcctccaccgcttgcccgcctccccgtcccggcgtccgcccgacgacgaggtccttgatgaacaccaccgacggcgacgcctcctgcatatataggaggaaaaaaaggtgatggtcggatcagcgcgttagggtttaggacgcggcgtgctggaatctactaccacctggaagaggcgcacaacgcgggcctcgtcgatgtcctcgccgcctccgccgccggggtcggcgcgggcggggcgcggccgaggggaggccgcgaggaggaggagcgccgctgcggcggcggcggaggcggaggaagcgcggcgtgtggtggcgaagggtggtgagttgggaggcggcggcggcggcggtggcggtggccggaggaggagaaggcggagcagcgggtggaccgccatggctggagtggcgctcgttggacgcgcgctatctgatgcgtggctgggagcgaaggcggtattgttgaaatacgccttcatctttgcaaagcgaattttgggagcacgccttgtacgtttcaatttcgagagagagtggaaaaaaaaaaggtttatgccatttcgaccagattctaacaatcagtagttatgtaaccacgaaaataaactaaaaatacctactagcttctcagaatctcttggctcaaccaagagtctgtttggggagcttctagcaacggtagattatcacagaatcttcagttcccccaatagtcgagattgtcaccaagattttgacaacatttagttatagaacccaaaaaataaattagaacctaggagctggaaaacacagcttctctagatttttcaaaagttggctaacagccagcagattctcataatcttgagctcctccaaccagggcgtaagattgacatgaacaccagcaatgtaagtaaacaatgaaaatgtttcatctcggagtagaaatttactgaatacgattgaattaatatggtggattcatttgttcttccaaatggacccaggtatgctcctagaaatgcagttagtttgatcattggcctaagaaagcttttaggttgtgtttagttcaacgcaaagtttggatttttgttgaaattgaagatgatgtgactgaaaagtagtgtgtgtatgacaggttgatgtgatggaaaaggactgaagtttggatccaaactttagatctaaacacagccttagaattgcagttatttcgggaagtatggaatatttttcatttgacaaaagccgcaatacaacgcaggtaatttcagtcgtattagcaatcaaatttataaaagtttgacagcaatactttgaaaaacaagtcaaaaaggaacagggataacgcaaaaagcagctagcagcatgattaattcgacgaaggctgcacactgcgtacaagaaaaacgactgatgttattatatacacttcatcagtataacactccacacacacaacaaacatatatcgctaccattttctgtgaatcatcaaacatgaactactactggtagtataataatactggtagtataataattctggccggcgacgagcaaattaaagtcatacaatgtcgtggttcatcggtgaatgcgccaccgggacaacggcggcgccggtgagctcgtcgagggcgtcctcctccgtcgcggcgggtggcctcgccttggggtcgtacctcttgctcgccgggttcgccgccgggtcgtacctcttgacgaccagcaccgacgccgacgtcctgaactccggcgacgccaggtagctccccacggggcccagctcgtcgggcttctccaccagcggcgccgtcggcggcatcctccccaccacgaacacgctgaacatggacagcgagttgatcgcctccatcacctccgccttgctctgcgccggccgctcgtcgaaccgcaccgacccgtccttcaccatgcccaccttcgacttgaacgcctccaccgccgcctcgtcggcggcgtcctcctcgtcgggctgcgcgcgactcggcctgaaccgctccagcgtcacggcgacaccagggtgctccgccatccgcgtcgcgtacgccagggcctcgcggtcgtcgggcccgccgaagaagagcgccgccacggagaaggccacgttcttggcggacacctgggcgtggccgccgaggccgcggtcgacgaggacggcgacggagcagggcgcctcgcggaggacgcgcttgttgatggcgtggtacgcggagccgagggactggaacgtgccgtcgtgctggagcatcttgtggtacggcatgacgacgatggcggcgcgcttggcggtggcgctgtcgatgacgtcgcggtggatggtgtccaggtcggagatggccgtcatggggcgcacccgcaccgagctcagctgctggaacgcctcgaacgccaccaccatctgctcggccttgtcgccggagttgaagaacggcatgccgttgcggcgggcgcgctgcaccagggtgatcgccgacgaccgctccgagagctccacgaggtgcatggcgtacatcacgaggcggccgcgcccggtgccccgcgacgactcgacgaggttgagcagcgtcgggatgttgcggttggtgtggaagcaggccagcacgcgcagctcgccgtcggcctcgccgccgtccacggtgcggcgcttgtacggcgccgtcggccgcgccggcttgtagatggccatgacgatcggcgtcgtgatgaacgtggtgaacagcgccatgagcaccatgatggcgaacgcctcgtcgttgagcaccttgcgatccttgccgatgttgaggacgatgagctcgacgagccccttggtgttcatcaggaaccccagcgtgacggcctcccggacagggatcttgacgagcaacgacgtgatcaccgtgccgccgatcttgccaaggcaggcattgacgatgacgagcacaagcaacccccatgacttggctccacgtatggtggccacattggtcttgaggccactggagacgaagtagagtggcaggaagaggccggagatgaggtcctccaccttctcgatgagcacgccggcgaacggcccgtccttggggacggcgatgccgacgaggaacgcaccaaacagcgcatggatgccgatggtgtcggtgacgaagccggcggcgaggacgatggcgagggtggcacaaatgtacagctccttgacgggctccccctccggtgaccgccgcgccatccacgccagcgcggggcggaggaacaggaagatggcggcgacgaagccggcggcggtgaggagcacccagagcgagatgatcggcgagccggagccggagagcgcgacggcgagcgccagcaggatccacgcggcgacgtcgttgaccgccgcggctgacatggccgggctgcag

SEQ ID NO: 23901 - DNA, 6494 bp, Oryza sativa
tgaaatgagtaaatttcacaaatctacatatacttggatcaaattatgacaaaactatagaatttagtgataaagttatcaaagaactacatatttttagtttagatccacaacactatatttatttaaagttacaaaatctttagttttgtgataaaattattgttaaatttatagttttatgataaaatagttgttaaatctgtagttttgtgatataataccttaaattgtagttttgtgataaatttagcactaaatctgtagttttattaaacacgttcataaatctgtagttttgtgaaacacattgttaaatctgtagtttgtgatagtttaattaaagtatgtgtagttttgtgaaatttactcaattggagaaaacacttgaatgcttgtaatatcactccatttgtgaacaagtttagcgtttttcattagagcagcagtggttatatgtaagaacgtaacactggaagaacatgaacatgtagtgtgctgtagaattcgtgcttatcaaggttctatagttgctccccggtaaaagaaagaaagaaaacaaaacaaaacaaaccgtgtaagtttagtggtcatggatgaccttgttgtttaatttgtggttcataacaatttaaagttgagctaccggccaatagttgtgtaattttctgtaggaaaaactgaatgatgctgtaagaaatgatctaagcaacaaagaataagttggtcagagggcatggcaaggaatgccaatagataattacgcatccacgaatggttacaagttacttgctttgcttgatgaacgaaaagcattgtttaatagcagttggcactgttacctacttacctgtactctttttcttgcttaagcaatttctgcaagtcaaagacagctagctaatcaggaagcatatctttctttcaataatgcattcaactattcaccttaatttttccccgggtctattatatcctaaatatagtgttgacttcgactaataaaacaacacaagaaatacaaccaaaccttgcactgaacctattggcaagaaacaggtccacattcattttcttcatcacttcttaagaatcagtggttttttttagaaaatttaagaatcagtggtggcttactgtaagaagctaggggctatgcatgcgaaatgaacgtgcagtaaactgcagattggctagctagttaatcagtgcagttgaaagtcagcagactgtacagttcctaaaactattttcttctcctagttctctataaaatgcagattattacagctcctcagagttaattctttctaacaagatgaaagtgacatgcatgtatggcaaaagtcaccgatgcagttcacacttttcagtaaacacatggcaacattgtccaaactccaggacacagatcacagatgtggtggatatcacgaatgcaagttgcaaccagaaatcacatctttctgggagaaattaagatgtgatatctctatggcaaatagtgtcccctctaaacgtggtgcaagcaaagagagtagttgccctgaagtttaggagtataaatatatactattgtttgaagatgctaggaatcttcttgcttctaggtgagcgaatatctctgatctcttggaaaacaaagcatataaacctgaagtatctgaggcaggtatcccctaggagagtcagtatccagcctgcctgatgcggttgtctaccacgtgagaagcacggctcagccaaagtcttcccttattataggatctaaggaacctaatgtggtattgattaatcaaccaatagctaatttggggaaatatatattgcactaattacatattgcattggttctttagatgcatgcctctttccttcgtctgatcctataatgatgaaactatatagtatcaaggtaaggcagttactgattgtatgttatgaaaaaggaaaactaagttactaccatatgttttagcttccacatccagttaatatgggctttaatcatgttcatgtatcattcctcctcctgccatactgtcaatgtaatagtatcacaataatttcttcctccaattgccattttcaatccatttttataggccacgtgagtgtttcttttgaaaattaaaaacgcaggcatccagttaaacctcttcttttttatatttttctggaaaagaaaatctcgaactctcacaccaatcattttttcaccggacaactctcaccaacctaatccatacccactgctcatattcacaccctaataactattccatccgtccctaaatatttgacgccgttaacttttttaaacatgtttggccgttcgttttattcaaaaaatttaagtaattattaattcttctcctatcgtttgattcattgttaaatataattttatgtatacatatagttttacatatttcacaattttttttgaataaggagaacgatcaaatatgtttaaaaaagtcaaatgtgtcaaatatttaggaacaggtggagtacttaaatgaatcccaaggtcccaaggcaagcaccaactcctagatgtgattgatctacttaagaacacgaacactaaacaatatatttgtacaaactctactagaggggtttttaaaatatttctcaagtaataatcactgcaaaattcaagtcaacatatattatcaaaccagtaccccgtcaaatttggtgttaatcagtccatgcccactctgttcatattcatatatcccaataagtaataaatgaatcccaaatcaggcaagcaccaactcctagatgtgattgatcatctactttaagaacacgaacaaacagtactaaacaagatttgtatacaaagtatttttattaaaaatatttgtcgagtaacaaataagtgcgaaattcaagtctacatattatcaaactagtggtaccccacgaaatttagtcagctgaatgtgtatgcgtctctatcacgcacgatcgcaacggaaacgggggaagaaaaaggccacgaaaaggattcgattgtcccatcggctccgattttcaaaaattccaacccccgcaacaacaatttcctcccccaatttcgcagttattgttccacttgcgcgagattttcagcgccttcacatccaaggacaacaaaattcagaagctgggaattaacagagccttcacctcgaaggacatggagattttcagaggggaacagagaaacggataaggacaaagcaagcaagcaacaagagagagagagagagagagagagagagagaggcggaggggaacacggcacgccgcaaccgaccgagcgaaaccctaggcgccccgggccgaaccgggttggtccacagtactacactagcagagcaggtagccatggcggaaggaggacttacgatgatctcggcgatgacgcggggctggcggagggggcggaggaggtaggcgaggacgcgggtgacgacgacgacgaggcagatctggaggatgatgagcggcagcgcgaagtccagcgggttctccttctggaacgccccctgcgacgtcgccttcatcgccgccgggcagctgcctccgctcgccgccatcctctactcctccttactggtgacttctcactccccccgccgccggagtggaccaccaatgcgcttcgccgccgccgccgccgcaccacggcgaggagggaggagtcgatcgagtcgagtcggagaagcgaacacgaatcagacacgcacagccacactcggcagccgcgtgggggtggggcgctatatataggggaggccgcgtcggccggggtgccacgtcagcacccgaggaggagtctctcagaagaggattaggagaaggagacgatgaagaaggcggttacaaatactactactgctacaagtcggtcgagacaagacacaagaggggatttttttttattattattatgtcccataatataagacagggttaagattgatacggttatcttataattttttattatatattaacaaaattatgaacatatgaaagtaaattcaaatggcaattcaatgatataatttttagcaagtaaaattcaattcatattcaaaatgttttaaagatggaatcttgaaatgtgtgtgtgtcgagtataagcgattgtaaaacggtgttcttttttaattagaatataagtttatcttgattttttgttatcaatgcattttaaactgttaaatagtgttttttaacgaaaacaagttactttaaaatgtaaagaaataaagttggtaagggagaatataaatattgtctctggatttcaaaatctattatattttaggataaatttaaagagcaaaatcccttatttattatgagacgaagggagcagtacgtagaagcaaaactctaataatcccacatgcatacaagaaaatttttttaaaaaatgcagcctctactgcttgcttataggttagattgtttgagattagtttagggcaataatgcataccaagcgttgacattgcccatgccttgtctacacgatggaaaatctaaaaaacatgcgtacacacaatgcaagcagagagaatctgagattttagacacggtatataatagtactagtagctagctactccctccgtttcaagttataaaacgttttgacttttgtcaaaagttaaactacttcaaatttaattaagcttatagaaaaatatagtaatatttataatattaaattagtttcattaaatcaataattaaatatattttcataataaatttgtcttgggttgaaaatgctactccctccatctacttttgatagtcatatttttaaatctgaaaaatttatttttgataggcatatttcaatccaacaacttatcatcttaatggatttcttggatttaatgcgtgactcttcattcttccacacaagattggctacatgagtatcgagaaatgtaaatattaatgatcgcttgtttacgaggaatgactagtagcatgtttagatggatgataagtagaatcagttatcgttggtctgtgtgccaagatgaaatatgactatcaaaaatagatggagggagtattattttttctacaaacttagtcaaatttgaagcagattgactttgacgaaagttaaaacatgttatgatacctgaaacggagggagtagttcagtttgttcatagccatctagaaactaacacgtgcacaaaagttggattcattgccgcactattatatcatatatgcatgcatatatacctagaggctagagaacagcgttttttttttccctttctctgccagcaatctaactcaggaaattaaatttcgataaaatttgttacatgacactctaaatttatggcatttgttctcttacactctagtttcatggttttatctaagtcactctagttttgtggttgcttgaaaaaaaataaatacttccaccattattttagtgtatatatatatactctttcaatggagagataaaactctgtaccaacatgtcgcaatttgggtaagttttaaattttgtataatatgtgtctaaattcatctaaaatgtattcaaattcaaatcttgcaaggtgactcaagggtaaagttgtttcttttaaattttatctctatatcagaagaggatatatattaaatagttggagtacatttttgcaaacaaacacataactaaactataattgaatgtcctgaagcaaatgccaccactctagtgtcctcaagtaaattttgccaagtttttggattagtaacaaatgtaacagtcttcaactatttagtaagagttaactttttcacgatcctaaaaaagtatttgcaagtctttgcgatttcgatcgatctatagtgttaatcaggagacatatctcgatctcgacataattataattaacccccactcaatcggttaacactaaaatatacatctagtcttaatactcaccaaatatacaaagggtaaaaatatacatctacctcaccgaatgtaatggataaaactaaacctcgaagtagcaatcatagactcattagtcatggtcacaatatgtaataaggccctgtatagatgggactaaaacttttaagtccctatcacatcggatgtttgaaaattaattataaatattaaacgttgactattaataaaacccatccataatcttggactaatttgcgagacgaatctaatgagcctaattaatccatgattagcctatgtgatgctacagtaaacattctctaattatagattaattaggcttaaaaaatttgtctcatgaattagcttttatttatgtaattagttttgtaagtagtctatatttaatactctaaattagtgtctaaagacagggactaaagttaagtccctggatctaaacaccacctaagcatacacatacatcaacatcgagtatcttttgttaagtattctcctaggtctg

SEQ ID NO: 23902 - DNA, 13493 bp, Oryza sativa
cgctctctaacacatgttctaagagatggaaacctaaaggcatatctctgatcttaccacatttctgttaaaagctaagtgagatactagctattacaagcgatgagttaacatgcatgcatgcaagtagcttatgatgtatatataggtacttacagccagttgcgtaaaagaatattttctacatgataataatataattatagttaaactttaactcatagactatacaaattctaaaaattaatcttatccgtttgagccagagtagggaaatatatatataggtagacagatagatatataaatattattaaaacaatatagatagatagatatatcatccatccacaaatataagaatatttagttatttatagtagatattaaggttaggaagaaaagattccggtgttcctcattaaatgaggtaaatgaggtatggtttatgccctgatagttgaggataggatagaaaaatcaatatgattaatatgaggtaattaatatgggaattactagtactctaaaatttcttatatttacaaataaattttaaatggttgaaatgtttacatcggtgaacaaatgagtaatctctccgtgctaaaatatatcaaactagaattggatatgatacatattatagtaatacgaatttggatatgtatgtccttatctaatattcgtagtaatggaacatgtttcatccagttttgtgttgctaggtggtgtttgaatctcctgaagatgaagatgaagattaagtgtttcacgcaaaatgatgtggtaataacgtgtgattaattgagtttaaattattataaactcgaaaaatggataaatctgatattttagagcaactttcacatagaaagttttcgcacgaaatgtaccgtttagcagtttaaaaaacgtgccattttaatccaaaagtttatcctctaattttgatacggtggaagtagattagtattcgcgtcgtgacagttgcgaatagtacattttccattgtgtatgtgcatgtgttgagggggctgaccagcggcaaaagctagctatagcggcgaggcgacgtgttctgagactctgcttttcttctgcactttttagcgtacattactcttggggacaaaaaaaaccttttctgtactagcgaagaaattaatctggcgtacacactctctgaaagataacctctctgactttttgatactccgtactcgagccgactacgtaccttgagctatcaacaaaactgtattgctgctacttgcagagaataatgaattaataattattacttcctccgtccctaaatatttgacgctgttgatatttttaaacatgtttgaccgtattcaaaaacttttgttaatattattaaaaacttaagtagtagtagtatatttaaaaatgaatcaaatgatagaaaaagaattaacaattacttaaattttttaaataagacgaacgatcaaacatgcttaaaaaaaccaacggcatcaagtatttagggatggagggagttattaacatcttaatttctcttttcgtgtgtaattaaacaaaggattttgtcaaaggccactagcgtcgattggctggctccagtagctagataacatgtgggtccaaccctgtctcttaattattggtgtgctttgaggacaaaagtttatatttgtcgtatctcaatcgtttttattaaattaaggaatatatatgtgccaattgccatcatgttgctgtggtaatatagatggaagaaaaaaggaactcggggacaatctaccaataattggagaagaaaaggttatcctacaaagagtaaggtaaatattgaaaagcaagcgggatatatatagataaaaacttggaagtaatgacgttttacgagattgtgtcattgtatgtgtttgtgttgcgtgcaccattttgcaccaccatgattttggtgtagacttgattaattgcatttttttttggtaattggaaatttttaggtgaatggaatagtctagcaaaaccaacaccatgtacgtactgcctcgagcaatatggtgtatacgatgaagctggtgaagataatgtacacctcgacggcctccccatcacgtcctcacgtgtaggggtaaaaacgatcgcataaattctttatcaacgagcgtggtttttgtatgagcgtacgtttccgaccgtacgatatgcaaccgaagttgagtacttcgttcatctcaaaatgtagctttttcttcacaaccaatcagagacttctcctcctatttaatttaattacttgtaagcgtaatgaacttcggtacttttttgtcctggaagtatgttattcgtcctacgcagttctgcaaatgcatagtacaaattaaagtatagtgcctggccggtcatatatggctgtgtttagatccaaaatttggatccaaacttcagtccttttccatcacatcaacctgtcatacacacacaacttttcagtcacatcatctccaattttaatcaaaatccaaactttgcgctgaactaaacacaggctatatcatgctgtttaacttagggatgtgtcgtcaagtgtcaatgtacatcgacaaaagcctcgaaaataatatgcatatgtgcatgagacttgactaattcagccaaataatgcatatgaaaagttgatgacaatattatgtcctttatttaatttcaatttatattatcttattctggaactagcggtgtgtaattaatgctccgtccggttacgaagctacatcattaacatactccaatgatgcactgtacaagatgtgctgttagtttgaccttgtaaattactcatcccatgaatctaataagcttaatctgaacatctaaattttggcggccagatcaggatcgatctttttttagaacaaaaataatgacgatcatacgagtcttccttagcttttggcatattttcagttactttttatggtaaattttcctacagaccactctaaatttatgtaattttgttgatgaacgtcgtaaaaatatgtaatggttgaaagacacataaaaatggtaatttgctggaggacatttctgatccaattgaagagataaatttttagaaaggcgagaatacccttgggactatctacaagattataacctaacgctggagtgaatattgaatatgatgtatgctaacaatatacttaggcaatggcctggtaaaaattgatagttgcataattttaaaatttgcactctaacccgtattagaggcatatggccctagagacgttattatcttgttgaataatttttgtcttcaatcggaccgaaaatgccattcagcaaattatcagttttctaaggtgtcctctgcccgtgacacctttttacgatgtccactaaaaaaacataaactttagatatcatgcagtaaattttatccatttatatatatacacaagctaactagctcagtgacatctcaagaaatcgagaaaattaactcttatttgaaataaagtatttgctatggagttctttatatatatatatatatatatatatatatatatatatatatataagcatttaattaatgttgctatggagatggatccccccttacaatcaacccatcacttatctagaaatcttatcacacgaagaacgtccaggtcaacacgtacacgcaggctcgcgtattacacgtaaccttgcttattagtgagcttttataatttaatcagctcccttagcttatcaaattcagagggatccggcaggacacatgtacggacacaatttgggtttgcatcatacgtgacgcaactagctcatcatctggcacgcaccatgatatacggctctctgacttttttctatttttttttcgcctgacgtgttgctctgacttttctccgagggtctgatgacgtcctacctgtgtcctttgacttttcaaatgctggtccagctccgtctctctcacggtttaattacgtcgtattataaatcgttttgactttggttaaaattaatttgttttaaattttattaagtttgtaaaaaaattataacattttcaacccaacacaaatatattatgaaaatatattcagttatagatttttaatgaaactaatttgatgttgtaaatattactgtatttatctataaatttggttaaattggagtagtttggttttgatcgaagtccaaagggcttatagtctgatacagatggagtatttactatgagtaccttcatattaaaatatagtaaattttagcatcgaatcttaataggttgtctagattaatttttaaccaaaagttatgatatagtaaccttttcgattacatgaaaaaaatacatgcacatgcataccacaatatatacacactagactcgtccatacgtgaatatgctttctaatacacgttcacatgcacgcacaagtggtcagaccataacctcactaaaattatattaaaaacgcatctgcaaattataatttcatatagtcaacaggatttaaatcttggtggatgaaattatccatatccatgattttcatcaacatgtcgagatgaggcttaacttacgtgtcctgactcgatcggttgcatacaagcaattgacttggtttcattggctgatcccaaataatttgcttgatcagtggttggagacgagtagttttatagtcggcgtgtctaagtcgatcggatcagtcatgcaataatgagtttttaatataaataaattgtatagttcgtttcaattttaaattctgtgcctgttgcttgttaattgaattattgcctctgtggagctaggtaaaccaaatcaaattgaaacactagtgactacttatcgatgagcgtgcaatgtcaacgtctcaatggataaacatagcgatagtatatgcactcatattatatagaccggctatgggtagcttgaaattcttttcatttttgctgctgtcctattttactacacaaacgactggaggcatatgataaaataaggtgtaaagaatgaatggctaaatacgtacttacacttcgttgggtggaaaaatttatggtgaaaaccaggggcggagcttggtgtggggcagcttgggcttgactggaaattttggtcacctgtgataagtttggccatccattatttacgcattattttatcctaaacgttcactcatttttctatccaaatcccatatcttgtaatccattttctagcccttagaagtcccattattttctagctagtgatctatttgtcctgttttccttccaagaatctctgctaatgatcgatttgtcctgtttttcagtactacatcagtactatattcttgatctgcttacgtttcattttgagttgtaccttttttctgaataaagagtttcagttgtacttggacagttggatggcaggtaggagtagtgttgtaatgacaagtgcggaggtatgcacattatcctattcatatgttcattgataaatgtactcctaaatagcagcatttctgaactttctatctctgactttctcaggccatcctaatctgattagaccttgttagagccgaatggacatggactctaccatgcatgatgcatgtatgtacttgcagagaagctatgaactcttgatcccattgacaatattaattaatcccttcgtctcaaaatataaagattttttggttatttagcaaatactaaggttaggtcaaaagattcttttttagttatttcagttgttaatttttgaattttgaattgcttgaattccctttccaagcatttgattaactttggaatcattgaaatgataggaatcataaaaatcagttagcaatgcttatattgtggtacataatttgaatcttagaaatgcttatattttggaacatatggagtatatctatccaccctggattacttgcttgtggaaatcagcaactaactaaaaaaattagtatgatacttttccatgttctacacaatttggcaaccacaggaatttttacaaaatattactgattagcacatgcctttctcgtttgtgagtggtcatacttcatacagaacgtatggaaatcatgcgaatttctgtcagattcctggatgttttaggactccaggaagtccagatcaatcgtcatagttttttgccctgagaggtcaaagtattctctggcctgatcttagccagattatgtgatagtaatttactccactgttagttccgtttgttcttcttctctgtgctttgatttttttttcctcttttggttagcaagtgtaggagacgggtaaatttcgtctttgttttttttccctgaaattagcggtgccttaccaaccggacaggcttagcttaagtcttcattaacttccatgatccttaatattcagtttcatcaacaatgacaactgaaacaccattagacaattagtgaccaactgataacgacctgtgctttcagttgattcttaatctatctacgtcctactttcctatggacttctggagatgctgatgagctatgaacagagacatgtctcaacggacgtaggcatcaaggtctgaacataacaatcatatcttacttggatttcaactctgttaatcctgcttgttcttcttcttcttcttcttcttcttttttgcagcagttcttgcatcaaggtctgctagctttcattttactagttcttcctttggttgctttctgaactcctgttgtgcatggatgcatcgccagtttgactgttgctggataaagtttgaacagtgccaagaaatgtcattctttcagaaaatgacaccgttgtgtagtactgtagctattatgacagataaattcacttctgacctgtcctttttttcaattactctatccttagtctttaccttttttaagacgcatgcaagttcataaaaaaagaaaagatgtcaaactcttttgttctttctttgagatggatgatgctatactacacagataattgattacttgacaactcttgcagctgaatatcttgttccttggacaagtgtcgcagtgacaactctgacaaatgcatacttgcaaggtgcagagttgacttctggtaatataaaatagacaaagggaaaaaaaacctttgttggatacttgtatgagatgataatcctgagtcctgactcttgggtttcagttaatcatctttgtttctcaattatttacctattgttgtttaaaaaaatatttacttattagtacagtttcagagtttctcttcacaagcacaaagataatacagctcaattcggaaggtgataatatgcaagatctctaggaaatgtcaggcacctaatcagtttaatttgattcaaattatcagagtacaacagcagatcatatccatggtttctgatcacagcagtctgagccttttaggtcacagacaaatcgtacaccgtccattttcgatattcagttcctgaaaacttctgtcgttcagttgttcaggttttcttcatgctgatcagccatgacttttggcacaaccaggcaacttttattgagagcccgttcaaattggtgtcattttgaatcatattattctttaggtaaaattgacaaatattttttttatttttttagagaaggatattttttacccggcctttacattcaaccggatattattctttaggtaaaattgacaaacattttttattcttttagacaagcctttttagattagaaacttagcctatcaaacagggaaattcgttcctatgaagatttgaacttagaatcttggggtgctactcagttcactacaccactaggctacatgccttttcacagaattgacaaacatgtggatgcatttagtttgttaccaaacattggtaatacctagaaaattttaacaacacatttaacctatcctactaaaatttgataatgttgtcagtttgttaaaattttggtgttgcaaaattgtggaaaagtttattgccctgagattggagttcaaaacaaagaatgttagtgcatgatatacttgatgtataatgtcaaacagagcataaaaaaacagtcgaaagaatgtactatctgataaatcataagagtgatgcatgcctgtctgctagtactttactttgtgattaaagtaggtgatcttcaataggtgcagaaagttcaggatattgtgattaaagtatacagcttagaattctgatgtatatctagcatgctgggtcagtaggtccccaggtacattgtatgtaacaatttttttagagggactaaacaaatatctgaaagcaactagctgcttttgaaatttatttagcaaaaactacttaaccagtttttttaatcacttgaaaaaaaaggtagattattcagaataagatataggagaagagacaggtgttcaaccacagtttacaataagcataaatgaaattaaaatctgaattatggcctagacaaattaagcagtaagtctgaactgaaagaaagaagactacaacactatggattctggacccatttggcaacggggaagatatcaaagcccaaagacaacaatgaactgaacccaattgaagcccatgtagacaattatgtaaagcgttcgtgaaaaaagtagacaattatgtaataagtgattgtagttttaacttggttgaagcaaaggccaggtttacacccattatgggtatttataaatttgccactggtttttctaattttgcaaggatgccacttgatgacagttctagtgatattattgcaatttattagtgacagtcttgcaataatgatttaaactagtggcaaatttgtaattgccccaaaggaaaaatgtatgtttgacctcccttgaagtccataattgaagcccattctgacttcttcctggaaaaaaaaataggtctgaaattgtgagcgctcaagtttcttaggttaatctaagagtagtagttaattttctccgagcatcttttcctataaacaacgcttacttcagatcacagaaggaaaatttctcattatgttgtggcgttttaacatcgaaaatgttgggacctacgtgtgcagggaatctctcttttgttagcgtcgtctcgtctgccatggctgttccaagtagagttatcctctttagtgtaaggcagacaaatgaaaagaatgtttttttttggatgtttgtatgagatgctaaatcctggaacttgaaaattgagggggctgttcagattgtaaccaaaataaaccttattagaatttgacaatttagcaatattgccaagttttggcatgattttcttaagtatttactaaagtttggtaaaaaaaactaaatggatgcacgtctttagcaactttaccaaaaaatgatatggtttgaaatgacatcaatctgaacaacccctgagatacgcatatttgcttctcaaggtatcaaccattcactgagttgagaaatcatgtaaaaaaaaagttcagaaatatcttcagataggcgggttctgaagaaaaatcaagccgaaaaaaaaaacctccagccctgggcttcggagattgaaattccgaacccccttgccctctcttgcttaaaaaaacaaaagttcattgcttgcttgctttattggttctgcagatcactgtatgtattgctgtattggatttctaatgttgaatccaaaacagaaaagttcatctactcttgtactgtcctgcaatcacagtttgcaatactctggcacatctgcacgagtagaaattcagttgctgtagtagttggcacagccttgctgggagatcgtctgaatttctgcattgccgaaaattcgatgcatgctgtacttctcaaaggactggaatgcagggcctcggccgaagattcgatatacagtatttctgaacgcaaaggtgaagtgttcttatatgtggctttgattacaaaacaggatggaattcgaattcagaacatgttcaagcaaaaaattatgaaagaggacgcattagtaatgttcagaattcagaagatgctttgcaggttgttgaatttgcaccaccaaagctttgaaatagtgtaggctttgatccatggaccgaacatatacatctgtaatttatctgattatccctttgataattggcagaaactttctctctgctccatgccgtaggatgttcagctgagcaatccagctctcacgcaaaacgggaaagaaaaaccagttctaggcacgatccaaactgatcaagtcgcaatcagtagtgtgcgtaaaggtgattaatctctgatcccgttgctttcggtaggaaaattagaagaagaaaaaaaaatcctctcttgggttcggagattaaaactccgagtcggccttggccgtaagtattgctgctgcaaagcctctgtgcttgcttgcttgctttattggttctgcagattgtcgtatgtatcgttgtcttggattattagcgatgaatcccaattcccaaacaacaacaaaaataatgcataaatctagtcgtttctgtatctggtctgcataatgtataagcccatgtcgttcaagtgacatagcaaatcctgaaatataagggttaattggatccatgcctctacaaatatgcaaaattagaaaaatggcactactattcacgatatcggctatatgccactggaatttggagaaattgattccataccactccctcgcgttttccgtccacttttctatcatccctgttaatttctatccttgtcgtcttgctgttatctctgggacctcgccactgcaacgacaagcacaccgccaccactggattcactcgcgccgcacgcaggcacagccgcccaactctggccgcgagttgcggtgcaagaagcggaggaaggaagcagagaggcggggagcgaggaaaccggtgagtttaatttgagtttcggccggatagataagtatgtggttcttggcccaaaaagatcagccaagatggggttgggccggtcgagagagcccattaaaatattaatatgcctcaatttatccccggcccaccaaaatggcccgcacgcaagtcctaatccagttccgggcttccggcccagcaaaaagccggatatagtgtcattcgataattaagcagaaggttagatcactgagatgtattagtagggtctctaggaaaatgtcaggcatctctgattaagcagtatgtgacaaaattatcgaagtacaggcaacagaatgacatggtttctgaatcacaacacagtcaaggttacaattaaatcgtacattgttagagaatagagaaatggaaatcatgagccggaagaatcatagatctggaattacatccatttttctggtgtttaagtttttttcctggcgctgacatcatcttcagttcctgaatactttttcttgttctgaatttttcttcatgctgatcggctttgacttgtggcacaacaccagacataacaccaggcaattctgaattgatgaaattaggacgataagagaatattagtaaatgagattgcatacataatgtaaaacaaggttttcaaaaagtagttgaggcatgaaagaatgtgctccaatcagattaagtgagattcatgttaccctactacttgatagtataatggtagcagtagataatcttaaatagtgcagaaagccttggaatgtgatcaaagtatagtgcaaattagaactttgatgtatgtctagcacactaggtcattagctaggtctccattgaatatttttcatacagttttttttagatggtccctacaaattgctgaaagcaattaggtagtttaaacattaacttggcaaggaactggttatgagttataaccagtccatttgaaccacttgcagaagacagagttcttcatgatagattcaatagaaataggagaacagactagtgttcaatttacaatcaatggcaaatgggactgaaatataaatcatggtcaagatgaagcacacatggtccaaagaagacattgacactttggaatctggactcatattgcaacagtgaagactaaaccccatgactgaaatgaattgagaccaaaccatgtttcatgtacactacagtctctatggggcatagtttagtattttgtagtccaggacactctgttgcataaagttatctggattcagtgatgtgctcgtccatagtttgagaaatacagctctctttttttttcaagcctggtacataataatgctaaataattttaactggcacaacagttcactattctcaattcgacgagttaacttcatgataacttctgctataattatggtgctactgctcctcatcagggaaaaactagctaactgcatttacttgttctagatgacaactccaaattaaccaatagcagcttggcactgaaatatctcagtatctctagctagcatgttcaccacaatggtcttgcaaagtgcttaagcaaattagtgctacacatggatgctgaataagaacaacactacattttggccatcaagaacaaaacaatctaatggtttcatctgcacatatagatgtttaccaacaagcgaagctattgtaatctaccacctatccttgacgaccaatacatcaaatgctacctgagtaggagtagcaccctaaaatcttaagttcaaatctccatatgagcaaatttcatatcaggttttttgagagactaagtttctaattttaataagttgcatatatccggttggatgtaaaaaccaggtaaaaaattgccttctttaaaaaatttaaaataaaatacgcaagattttattatctgaatgttgtcaatggaacaggttcatctagcaaatcgaaagattaaaaacatgcgaaaattttaacaaaaatgttacttacttagtcatgtcttcctctcctccttgaagtcccagagctgcagcctccgctccccaccattggtcgtcgccgccggagcagcagcagcagcgccgccgacgccgcctgcaaggaagaacgggaggccggcgacctcagccggagcggcggcgaacctctgcagcaggaacgggtgctgcgacggcggcggctgcggcggcggcggccacagcgacgcattggactgaagtgtgccccgatcgaaggcggccaccgtggcgtgctgctgctgctcctgcgagaacgcgaggtggggcggcatcgccatcacctcgaacgacatgggcgccgccatgtgcgcgctctgcgccgccgcgtagtacgcaagcgtcgcctgctgctgttgctgcaatggcttgctgccgttggtgttcgagcagtggaggagctcggcgaacgcgccgccgccgttgtcgcagggggcgttggcgagggagagcacggagctcttgctggtctcggatgtgctgacct

SEQ ID NO: 23903 - DNA, 3103 bp, Oryza sativa
gcgcccctcccctccaccggatttagcgggaggggagctggtggcgacctgtgacggcagcggcggttcggcggcggcggcggctgttcgacagcgacctccccttcgatctattttttttgatatatttgtgtgaatatgcttcctccgattttatttttgtgattgaattccgattgggaatttttttggatggggggtgattgaattccgattgggattctagggggaggtgatggacgaaaaattggtgtacagatgaagtgacgaccggaaaaatacgaatatttatattagttatagatataagaaatcctactaaaattttgacaaattaccattatggtaactatgctaaaattttggcattggttgaaaaatgacatcaaagtgaacaggcgctggatgcactgtcacccagtgggaaatttaccaaatacttccccgtggcggcgtaaaagaaggaaaatctcccatctctgtctcctccgctccgctccgctccttgcgccgccaagacgagtcgcggctgaacataacaggggaggggcggcgatctccctctccatctccatctccatctccatctccatctggcgagcagagcaggggaggggaggggatcctcacctggtcagcctctttctgattcatctctctctctctctctctctctctcccatcgggactggaatttgcttgcgttcgttcgttagccctagcttctcttctagatctggaagaagctcttcttttaatttcatagccttaaccttaatacaagtaacagtttgtttgttccccgaaatatttgggggttcaattgaacccccatgtcccaagttggatccgcccctgcttgcagaggtttattgctgtgactttgagggcttatgaaccatattctccttgcaggaaagtgtgggtaaagcgcagggcaacaagaaatggcagcattcctgaggtcaaaatgttcgtcaggtattgagatttgagaatgcctcaacgtttatatgattgtacggataggtttgcaaatgcctactagacacatttggcttgtgcaaagttaggatatatgttctactccataaacaaaccatggacaaagttatggcttctaacgatagctgttggttggacctaaaccagtttagattggcttttagcctaaattaaccaattgttgattacttttgggatttgatctagtgcgaaatgatgattaattcatagcattcaaacacgtgcacaattaaaattgttgattctgtgcgactgatggcctttaaccataataaaacagtatcttataccttacaagtgctcttacctctagttagatttttttgcctctgcctgatggcttaatatttttagcttatggtgctgtggtatgatgctgatctaatttgcatattgctcatggttgttcttcatctttttagttggacgtaccttgatgggaggccttgggaacaatctatttggagccgttaactcatctgttgaaacggtgtcaagaccatctcattgtgatcctatctttcaggtatgacttcttctatctagcagaaacatcttgacatcacttcttatagcaacttgaaaagtctaaaattaattaatggacaaacgtcttgttcttttcactagagaacccatggcacagtagacaagcatatatttattccactatgatgtggttttgttgatatgattgaataccttttattattttttttacgatcgacatcagggatttgctcagttgtcaaactagattgtttggcagattggactccatcttagtatcttatacgtttcttttttgtcgtactcttttagccattctttaggaggaatttttattgttcttatctcaaaacagcagggactccatgtcttggtattttaaaataaattttatgtgccctgctattcgtgcgacgataataggattgttgctgggtgccggcatatgtagttctttgaagttagttatctcatcatggatgttttccatgtggaataaaactttaactcgtgttctcattctggtttcagcaaatcagaacattcatccagatgagaacaaacctaaaggtggtagacaactctggtgccaagcgcgttatgtgcatccagtccttgagggggaagaaaggagcgaggctcggggacactataattggatctgtcaaggaagcacagcctcgtggtaaggtgaagaaaggagatgtggtctatggagtggttgtccgtgctgctatgaagcgaggacgcaacgatggcagcgagatccagtttgatgacaacgcgattgtccttgtgaacaacaaaggcgagctgattggcactcgtgtatttggtcctgttccccacgaactcaggaaaaagaagcatctcaagatcctagcgttagcggaacacatagtttgagatgcttacatacctggcaacctacctgttagttctgcagaatgaaatgagcatggtgctgtctcaagagtattccaccgttgttttgatcagttctgtttgcaataatgtaccctcaaaagattaaatgagctgatgccctgcagtcagtcctagacaaatcagattctgtactactatttaacctctgtagtattgcattccattcagatggaaacgcatacattgcttatgttctcttgttaaacctgaaactgcaactgaactcttgtgctttctgatctcaaagtgtttcggttcatgtgttacattgtgtgatcatgccatcctattcctagtttcctaccattgtcctgctgggacatgcagaagttataaagcttcatctacccacatatttctctttgcttctgatttcaccttaatctcccaatcaaatatgagtattttactctgtacatcaagtcatcaactgcagatgatcagatatctgtttgtccttgatcttggacttggaagaagcatgcagagtttgaaggaatgtgttgagtttgtaatttgttgttgccaaatttgtcatggtcagagtcattacctctcctataattaagctgaacctatggagataaacaaggcacactggtaactaatgctcaccttg

SEQ ID NO: 23904 - DNA, 9308 bp, Oryza sativa
aggtggaggaggagggagctggcgcgagtactcgagccacgatatccacgagttcgacgcgtccaacatcgggatcaggaaccacctgctgaagcacgccgcgtcggcgtacctgcagtccgccgtcgtcgtgccgccgcgggagcaggggtgcctcgcccgcctgtggcgccacgtcgtccggctgcgcgccgcccgcggcggcggcggcggcggcggcgacgggggagcgcgggggcgcggccgcggccgcgtgctcctgcgggcgtgctcgtggcagggctgcgtcgacgaccccgccgagctctgcgcctcgttcctcgcgcgctcggcgcggcgcatcgccgccttcctcgccggcatctgggcctagactagcctcgccgcggcgcaccgcggcgcgccgccgctcgccgtgcgcgcgcccacggattcttctcgtgatctcgtcttttgctgctactattactgcagcagaatagcacgtaactacactacattattaggagaggcagacacaaaaaattatatatattaaatttcttccaagaaaaaggctgattaccgatttactaaaccttgatttttttggggtttttttctttgttagagaaagctggcaagtaattaagatcaatggatgtaattttgctattgatctataattctgtaatctctacgtaaagctgctacttttgtagtaaagtaagcaatgattttttttttttgcacatctcaatataaggatggtgagataaatgagttggtttagtttgctataatgccaaaatatactaggtaatgtcaaaattagttaagttccagactttggcaatatatatgtgtattgttgtgaagtgtcaataatttggtagtgcataatttgccttcaaatcaaaatgatcccatatacataaatgtatacgagaaacaacaaggaccattttggattggtgtcgaaatgtccttaccaataatttagtagtttaaataatagtgtatgtggtttgaaagctaaattattaacattgccaatgtccaatttgatgctttctatattatattcgaagcttagccctaaattggactcaaaccatatactactaaaatattttgtattgatattactcaaagctttgatacaacaaaggtttttgatattactcaaagctttttcgtggtatcaaaaattatctagattttgacgctaccaacattttgatagtgtattgaaccaaataagccctaagtccataacttgtcttacgagtatagtttgtgaaatatctttgtgagaattattggcaaggctttttttccctttagaaatactcttttacgaggattttagaaatatatttagtctcatatcaatgagtaatgaacaattgaacatagctttgacaagatttgttgcagatgatgtactcccgctgtctcagtatgtagcaatttaggatgggattagacatactccctctgtactcgtaaaggaagtcgttttggacagggacacgatctccaatatacaactttgacttcttgtttctataaaaatatttattgaaaaatgatatatgtatatttttatgaaagtatttttcaagacaaatctatttatataatttttacattttcaaactcaacaacttgagagttattcataatttatattcccaagatttgacctaaacattgttctaaacgacttcttttacgagtacggagggaatattctagaactatgaatatactccatttttgcagtcctagaatgagacgaaggaagtaagacattgatattgttaaccttttttaaaaccatttttttccaccattgagatattgcaagtgcaaccttgatgtcaggggagtagtacagtttacaaagccccttggccctaccctacccatctttaagaaggttcagctaagactagtataccaacctagctctacatagacgatcgaaggaaccgccatagtgatttgatttcaaacagaaaagaccattggcgatcaatgaaatcatgacatccatcccctactacagtgatacgagacgagactaaacgataggagacaaatttccgctttattttcctctttaattatcctcagggcgacgcatctggaccgtccatccaaccccccccccccacccccaaaaaaaaaaactaatctaaccctaatttaatcatcatcaacaacaacacaaaacgcacgcacgcatttcgaattcgaaaagagaaaaataaaatccccccgcagttgcaacggtcggctcccccctccattttccccatcgccctcctccgattcctcgccatcctcgccgcctccacgcatctctccatccctctcgacgcgggatcgatcgataggcgatagccttctggggcttggcgcggctcggattcgaagtgggggtttggcgcggcggaggagattgggcgtggatttgatttcatttcggggcgcggtggttgatggagatggaggaggaagggagcgggaggggaggggatggccccgccgctcatggccggataggtgacacggcttcgcttggtgcttcgtgcgtgcgtgcgggtgtgggtgtgttttgggttgggtttggtttggtttctgacatggtctcgattcgatttgcttgcaggcggcgactcgccggtgatggtgtcgtcggcgtcggtcaggaagacggtgaagatgtccgagacctgcgacttcatcccctacgtcgacgacgacgacgacggcaacagcgaaggttcgcgcgcgcgccgcgccatttctagatctcgaattctcgatacatcgcgctggattttttttgaatttgtctgaatttttttctcgttggactgcgcggtgacgaccagaggagaattccgcctcgtcggggatcctcccgtgcgacgggatgcagcacgacacgcccgattacatcaggaggggcgccgcggccgccaggcacaggatcgcgccgctcgagctcttctcgggcccctcgccgccgcagggcccgccttctccttctccggccatcggcggtgccgccctggaagccacctccaacgatggcgtggccgagccgcaggttcatcctcccgaaggcatttctagcatcataagcacaggtggtggagagcaggagaccgccaccatgggttcacaaagcgtgcatgaaacacttcacattgaggaaaatgaggtgatgcttcgaaaaatttgttctccctttgtcccaaaatataagaatttttagaatagtgctaagtcaaacatttttaattttgactattaatagaaaaaatgatcaatcatgtaaaattgatgttaccagattttatattttgggacggagggagtactaagaaacaaggaggtactagttactgctgttcttggtgcttaatggaaggtgatgtatttgttgcagggaaaatgcagctgctgtggacagctcaagcaggagtactctctgcttttgagggagaaggaagagtgcaggagagttttggaggacttgatgagggagaacgagctcaagagcagggaatgccacgaggctcaggcgtccctgcacgagctgaggatggagctgatgcgaaagtcaatgcatgttggctctttgggtaagaactcaaaatttgtgtggctaatctactccagctttccaatggtagtaggcgtaatggaagattaagttcggctgtgattggagaaatgaataagttggatgtaaatatgtcagctcaaagtacttgtaggaattcgctatttatgtaaccagtagttacagtggttgtttaagtatctcatcaaaaaaatgtcagcatgcttgctgagtggctgaatgcaagctttctttttcatcatgcagcatttgcagtggaggggcaagtgaaagagaagagtcgttggtgtcagttgctgaacgatttgagtgagaaatttaaggtaactggtttcatattcaaagtttgtttactactcatgtacaaatagcacaattgtctgggaagtcaaagcagcatattttattttattttcaaaaaaaaccacaggcattgaaggcagagcaccagattttactacaagaatcgcttgaatgcaaaaaatttgtggcagatgctacacaaatgactacgacaatccaacaacatggtataagtgtggcatttcaactagttgtacaccctttagtttgttgcgtgtatatatttctccacttcctagagttggcaacactaatatcttaaatggaacagtgaaccaatatgcaagtttggaatgtgagtttaaggatctcaaagagaagttcactgaggagacaaaagaaagaaaagatctttacaacaagcttatagaggtcaaaggttggtttgatttgttgctatttgttggtttgatttattgctactgcaacagatggtgataataatagacttactaattactatgtcttgcgtattgatcaggtaacataagagttttttgccggtgtcggccattaaatggtgaagaaattgaagaaggggcttcgatggcagttgattttgaatctgcaaaagacggcgaactaattgtcagagggcatgtatcttcaaaaaaggttttcaaatttgattctgttttcagccctgaagaagatcaaggtaaatcccttcataactagtacagtttatcaacctgtatccttgctcaagtttttaacgatgtaatgttctccgatttctctacagaaaaggtgtttgagaaaactgtgccttttgcaacttcagtgctggatgggtacaatgtttgcatatttgcttatggacagacgggcactggtaaaacatttacaatggaaggaattgaagatgctcgaggggttaactacagaactctagaggaactctttcgaattaccaaagaaagacaaggcctttttcagtatgagattactgtcagcgttttggaagtgtacaatgaacaaattcatgatttgctgctgacagggactcagcctggtgcaacagccaaaaggtatgtttcttgtgaattctaacagcaacatgcgagaaccaatatatcatggcacttccttcacaggctagaagtaaggcaagttgcagaaggagttcatcatgtgccaggacttgttgaagcacgtgttactaatatgaatgaggcctgggaggtcctgcaaactggaagcaaagctagggttgtcggttcaacgaatgctaatgagcatagcagccgatcacactggtcagtcccttaaattcatacttttctttgacacatttttcatccatttatgctaaagttgtaattattaaatcctaacctcgttaattctgtatcagtatgcattgtgtaatggtcaaaggagaaaacttgatgaatggggaacaaacaaaaagtaaattgtggttaattgaccttgccgggagtgagcgagtggcaaagacagatgctcaaggagaacggctgaaagaagctcaaaatattaacaagtccctttctgcacttggagatgtcatatctgctcttgcaactaagagccagcatataccgttcaggttgtgaattactgtcctttaagtctaatttttcattagtactgtcttatgagcccagtgcccactgacatatttattgtcccaaattgacaggaactcaaagctaacgcacttgctgcaggactcgctaagtatgtagaactttttccttgagtggtaggatttacatctattctttatttttttggtaataatgtttgcaaacaaaacaggtggagactccaagactttgatgtttgttcagatcagcccaaatgagaacgatgtgggtgaaactctttgctcgctaaactttgcgagcagagtgcggggaatagagcttggacaagcaagaaaacaagttgatgttggtgaactgtcaagatataagctgatggtacagtagtactatgtcaatatatatacttttagtaagatcttagattccatctttttttaatctgaattcatactgctcgttttgctaggctgggagagccaaacaggacagtaagaataaagatgctcagattaagagcatggaagaaacaatccaatcgcttgaagcaaagaacaaggccaaagacctactcactatgaatctccaagagaaggtacttcaagcatcttttatcttcggctgcttaattggttcctccagcgcctttgcaatataaacaccttaatcagttaatcaccaattcaccattactttctaataaagatgttgtcctcatactttcatgaatgaagaattcacatgcttacagttatttacttgctctctcattatatatccagatcaaagagctggaagcacagctgctggttgaaaggaagatagcgaggcagcacgtcgacaacaagatcgcccaagatcacctgcatcagcagcagcaaagcaagaagccagaaaactcaccgtgcccgacgagaagccccatggcagagaggaacctcaactccacagcagagaagccagtgacgttgctcaaagacctcggaatcgcgaggcagatgttctccgacagcaacacggacacctacagcatcaaccacctgatgtccatgtcgtcggagaaggagaacaaccctgccggcggcgcgcagcctacaaaagccagaagagtctcactctgcggcggagctcaccagcagccggctgctcctcctcgccggggctcgctgatcccgctgccgcggcggaactcactgatgctgcctctaccattgcccaagcccgcaacacccgcggcggcggcgtcgccgctggacatgatcaccgagcagtgctcctcgccgctggtgatcgcccccaacgacatcaggggtggcggcggcggcggcggacggaacaagaggatcatcaacagcatcctgcgtcgcagcctgcagaagaaggtgatcatcaggccgccactaatggcagctcatcagtcagggaggagggccggcgccggcgtggctggtacaaccacccatggcggcggcggcggcggggtgatgagagcgcggcgtgtgccggtgagcggcggccggggaggaggaggggtgcagcacaacagggagaaggagagagggtggaacaacgggaccagcctcaggcagctcaactagagtgatactccctctatcccatagtataatggattttgaaaagaagtgatatatctaggactatgaatgatagtcatagatacgtcgcgtccctctagaatcccttatattatgggatgaagggagtattatgcatcgtcactcagctcagacgggtgagtgaaggagagacttatagaattgggagtagttttaggagggtttcaggtgttgatacctcattagattgtgtggtgtcgtgggtgtgcttgagttctcgagtattgtgagagaactctttgctgatgtttcattgtgttcatagattgatgattggattggttgatctggctgccagatcttagattgctggagtgtttgatctggctgtcagattctattttacgaaactgtttcttgctcggatcaggtttacaagtgttttccagttcaagtttgatcaaattctgtaatgatctcaagtgttttccagttcaagtttgatcaaattctgtaatgatctcattttctttccttcgcgacagagaggaattaagttcgagtttgatcaagttctgtaatgatctcattttctttcattcatgacaaaaaggaattagaacatgacgggagaaaaaaaaagtgaaaattcatgcttaccccctccgtcccaaaataagtccaatcctagctacgaacctgaacacatgtgtgtccaggttcatagccagagtttggctttttttgggacagactagtaggttaaagaaaaaattgttgcaatctgcacattttggtatagaaaactggtgatacaatagaaccatgcgcttgcataaacattaagcagtttaggccctcaagccagactatggtgatgcataacttatggctatcatacatgtcccatacatcgagctcctcggtttgtttctccaacacaaatatgttatagagactagactaaaaactaaagagtacaaaattggtaccacggcctcaattcaacaatttagctccacgtccgcttcatttctgctttccttagctcctgaaattttcgagagagagatcaaatgtcagatcatagctaaaattttgttggtaaattaaatacatcaaggttatggaagaatttcgttcaggcaacatagaacacaaggttgggttagtggaaaaggaatgtattatcttaagcaggattaatgaaagagtgcatgtaccagcaaacaattgtttctaaaaaagtaaacaataaacaaaaatctagtaactaaagtaaaaaaaaatatatctcagaacttcagaagacggttgcccatccatctcatagaaaaagaagacatttgacgtatggatgcactccgaatagattgatttaaataaataaaatgtcaattttaatcaaaccatcgactgtggaaaaagcaggtataaccatcatggttagttcttttcagtcaatagcaataagcaacgttagcctccattggacattgatagacgacacaacaacaggatgaatattccgtggacttacaattcaatgatgatcccgcaagacaagtcagccttgcttttgtgttagcctctgctaatggagtagtcttctcttttgcaatcatccgagcatcccagatccttattataccatctgatgaggccgaagcaattaggttgcacagttcagatccatcgttcttgtcgtcgaagacaacaatccctttcacacgagttgaatgagcatcctcaatgcgtgatgtaaccttgccactggaaagatcccaagcagtaataccgcgttcctctcctccagtgtaaagtattcccttctaacaaattaaatcataaacaagtgagcggtatacaaaaggcaacaccatatagtcactcaatgtttctataatatctatagcatccaaagattaacctcaatcctcatgcataaagcgaaatgatcagctccagatagctaaaagaatagcatggactggagctccaaatgatagctaattcaccacaatatcggtaacaatataatcaatcaaaagccgacacattgaacaatatgacaaatttcatcaaatactcagcacctacactgtaactactagcatttatgcctaaccatttagcaaccacaactcataagca

SEQ ID NO: 23905 - DNA, 10982 bp, Oryza sativa
tttgcaggcgcaaaggcgagcacccttttgccgcagtcgatctcatggatgatcctagcatcctcggagtcgtgcacggtcaccttctcctcggcggccatcacgaagcggtccccaccggcgccatcctcggcgtaggcgatcgccgtggccgggtgctcgaggcggcaggagaagctgcggcggccgcggaggaggttgagcatggcgaggccccccgagcggccgacggcgagcgcgacacgccccgtggggtgcacggcgagggcgtcggcgggctcgcggtggcgcgggaagacgcggagcgaggcgaggagcgggaacccctcgccggcgtcgtagaggtggaggaggccgtcgtcggaggcggcgaggaggttgcgcgggacggggccgagggagtggatggcgagggcggagaccggcgcggcggggtcgaggagcgggccgaggtcggcggcggcggggaggtcgtagaggcggacggtgtcgtcggagccgcccgacgccgcgagccccgcgcgcgccgccgcggcggcgcagcggatgggccccgcgtgggccgggtaggagaagagcggcgcgagggctagggtttccgacgacgacgcggaggcggaggaggaggttagggttttgagggagaagccccagatgaagcgctcgtaggagccggcgatgagagccatccgggagagcgcgccgccgccgccggcggtgagaggaggagggtttgggaagagagaggagagaggagaggagacgaagggtttggggggttttgtttggtcagggacgctgtcatgtggggccaggctcaggctcggtctttcagtgcagcacgaatcttgacgatcatcagatggctagtagtagtactaacatggaagctggtttccgagaccgacatgtgggcccactaggggctgtgttgctttcttcaccttccccgctcttttcacgcacacatttctcaaactgatggatagtttacaaacggtgtatttagttcatgtcaaaatttgaagtttggttgaaattggaacgatgtgacggaaaagttggaaatttgtgtgtgtagaaaagttttgatgtgatggaaaagttggaagtttgaagaaaaagtttggaactaaactcggccaaaacttttctatataaaaattgcttaaaaattttcaggctagtattttaagcaactccattttacgtgtggaagagagaagttgcaaacctcagggaacaaacacagtgcaaacatgcaatctgtctttctttataaaacaaaaaataattaagaattcaacctctacgtcaataaggatgtgcaacgtcttaatctgcatcgatgaaatacgatttgggataattgatttgcttggcatgggcctcatcgcagaaggttagaggcaacatatgttagttgtgcacaatgaacttgtaagcaaaacaactctgaatttgcaatggaggattcatttgtgttgtctaaatctttcttgtttgctgtaggaattggattgcttctaagaaaatctagcaaaatagagggcctaaatcttgtatacatcaatgaaggactcgtataaacatcaagattttatttagctggtgataatcaaaatcaggtgtaatacacaaacaaaccatttgcacaatatatctacctaacaaaactacaaagacaaaaaaaaagagatcatctttgcttcttccagtatctgtttcaatcgacaactaatgttttcattttatttctaacccgaaaacctcttttccttcaatatagctttacataaatttttcatcaggggctctcttataccaaagagctaccagctattataagtatagagtgtggtgagttgatgtgcgattatgaaagagattttaggctaaagttgagttccaaataaattgttgcagtgattatctaattaattatagtgataatttgctccattttgtttagagaacaactactcactccaattcataatttttgatgttttggacaagattgagatcaaacttttatagctctaattattaatgtccaaaacgtcaaaaattatggaactggagaggatactatgtcgtaaaatcaagaatgatggtttcttcgtgcaaccaaaaaaatagataattgttatctgaaaatatctaattgttcaaggaaaaaatatggtgctagtgaaaataagtaagataatgaaatattttttatcactaattcatggttgtcaacgatcttacttactgataattatttttgacggttaaagtcaacaaactagcttaaccaacaatccgaacatgtgttctaaccagaatacaaaggggaggggaaccatcgccacaatccaaccgttgctccccacatcaacggccgagatgtaaccttcctgatctcatcaccgacttaacaggaaatttttcttatttccaaaaaaaaaaaaaaaaaatctctcctctcgtcgcactcttccccccgaatccaacactaaccctaaatcgcagcggcgggcggcggcggcggcggcgcgatggaggaggacgcggaggggatggaccggttcgacatggacggcgacttcgagggcggccggttcggcagggacggcgagttctactacgagcgccgccgcgagcgcgcgccgcagacgcgcgacgacgcgctctacggcgtcttcgccgagggcgactccgactacgactccgacgacggccgccgccgcagccgccgcaagcgccgcagggacgaggccgagcccgacctctcgcgccccgtccacttccagtccgccggcaagttcatgcccagcaaggagcccgagcccgagctcgaggagaggcccggccttggcgccgctgcctccgcctccgcctccgcctccgcggcgggtgaggatgatgcggcggaggaggaggaggatctcgacctgcccacggcgttcgggcagcggatcgcggagggcgcgagggcgaggcgggaggagagggcgcgggagcgggagacggccgcgcggcgcaggcaggcgtcgggggtggcctccgggaagccggcgccggctctggggagcctggggtccaacacgaaggtggccaagatgatggccatgatggggtacaaggatgggatggggctcggcaagaacgagcaaggtatagtcgcgccggtggagaccactctgcgccccaagaacgccggtctcggaagcgtcgaggggttcaaggagcccaagccattctttactaaggagaatttgccgcctccgcctccaccggcgcccgccaagaaggagcagcagaggtggtcgaagaaggccggtgcgaagaaaggccccgtgctgacgaagaacgagttgctggcgatgcgcagcgagcaggagcaggacgagcagcctacggttgtgcagaaggtgatcgacatgcgagggcctcaggcacgcgtgctaacggacttgaaggggctcaacgtggagcaggagatggaggcgaacgatgtgccgatgccagagttgcaatacaatgtgaggctgcttgtcgatgaggccaaggctgatattgtgaggctggatgggcagctgcgacgggagcaggagaaggtggcaagcttagtgcgggagaaggagaaagtggcaaaacaggaggctttgcagaaacgccaactacaagttatggagaagattgcaggagtgctggagcaggtccgagtggatgatactgcaggtattctctctctggaagggttgcttaagacctttcaggaattgaaggcatgctacgtggaggaattcaagatgtgcagtgttgcatggattgcctgccggtttgctcatccgctactaatccgagtcttccaggggtggcaaccactgcaaaatccgttgtttggcttggagatcatgtcatcatggaaagatttgctgcagggggatcaagcatatgacttctcaggtgatgttgaatcgatggctccatatgcacaattggtttgcgaggtcatcctacccgctgtgaggatatcaggaaccaattcatgggaggctagggatccagaaccaatgcttcggtttcttgaatcatgggaacggttgctgccccctatcgtgctccagtcaatattggagcatgtcataatgccaaagctttcagctgcagtagattcttgggacccacgcagggagaaggtaccaatccatgtatgggtgcatccatggttgccaatgctaggacagaggatagataccttgtgccattctattcgatacaaactgagtagtgttctccatgtttggcaagctcacgatgcatcagcctatgctgtgttgtctccatggaaggatgtatttgatgccgcaagctgggaagacttgattgtgcgttatatcgtaccaaaattgaaaatggcacttcaagaatttcagatcaaccctgcaaaccagaaactcgaccagttcaactgggtaatgatttgggcttctgcaattccagtacaccatatggtccatatgttggaagtagatttcttcagcaagtggcagcaggtcctgtaccattggctgtgttcaccaaatcctgatttcaatgaaatcatgaactggtacaagggctggaagggccttttcccaccagaattgcttgccaatgagcgcatacggatgcttttaacggctggccttgacatgatgaaccgagctgctgaaggccttgaggtggtgcaacctggcgctagggaaaatgtgggctacttgagagcaacagagaagaggcaatttgatgcagcacagcaagcatcacaatacatgactcaccatgcggtgccaggagcagccatggcggatatgagctttaaggagtctatccaggcatatgcaatggaccaaggcttattgtttatgcccagagttggtaaattctacaatggtatgccagtgtatgagtttggcaccgtaagtatttgcatcgactctgtgaagcgcctactctacgcacaacttcaagaaggaattgagagatggagtgctgtctctcttacacaattgatagaaatgaaccggaaggcgaggcaacgctagttgatcatcctattgtgtactattactaaaaggtgtcagttttgatcatcattgtagaatatttctaaagagcagatggtttaatgatgtatctgaacaggttgttgtttggcctagtaactttgtagtatttatattcatgctttaatatgcaccgtggtgcctttttcttgccatagaatgaacaaatgatttattaactattagttatcaccatgacaattctatttggttgtgtcatcaatatttttatttcttggatgcttctcttgggctgtacaatttgttgatatgtgcttgctttgaatcattcagttagatttgaaaaattagaaaatgaggttgggctctgggtggctagttgaattgtatcttctttatttgcataaagctcaggacaatactgtaaagagttatactatgctccgcaattcagatgaattagccgtggcagatttagtgagcattgcactcagttcttccttgttcttcaggacatttcagcattcttgcctagtgttgctataaagaaatgcttggtcaagcaagaacggtaatatagaaaaggtgtgatatttggtatccttacctactataccaagatactcacatagtatgtatatcttgagatatatcattctttttgcttaccttcgatatgcaggtaaaatcatttgatggacatgggattctttattttctctaagaagatagctgctgccattgttcattgtcaaggaaactcaaaagcttgatgaatattgcttctttattagatcatacttagataacctgtatgactgctataggaatgagtgaaaatgtatgtcaatttgttgtggatgtgggaggtgtgatctcatttcatgttatgacattatacatgtaaatgtaactgaggttatggtggttttataaattgttcattctgtgaatttatggaatcttctcagttcccatgatttttggggcggtttttgtttttcaggcattagaggcttgtcctggtgtaatttgtcaacaccagttgccattgttgggtgagtttgggttgtggtcgaattctatttgttttgttggcctgatgggtgtgtgggcttatttattgctaaagagctgcagctttttgtaatctttcggaccaaattctgttattatcagaaaaaggtgtcaagtaaagtttttttcctttcatattttgtaaaatatgaataactttgcaataggtactgaattaaactgaaaaatctcgagatgtggctgagcagtgtgttactgactactgattgctggaattttgctatcttgcttcttcactaatatatgtggaatttgatttgctttcaggaataggaaaatattcatgaataccaattcggagcaagaacacactacaaaagcatcttagttgtacgaaactaaaccaaattttctcgtccactaatcaaattggaactgagttactgagatgctacataaactgaagccgaaagggtaaacaacccaagaaaatctttgccatgtccaacttggagcttctaggatggccaagctgagctctagatcagtcctgtaatcctgttcagttccattcaggcagatcactcgatgtcgtcgacgatgggaaccgtgccatcatccacggcggtttgccgcagtcgctgaatcgccttcatcacctgtcaaagaagcatcaccatgagcaccaccaccgttgatcaaagcttccatggagagatcacaaggatgaactaaagagcacacctcattgtcccagttggtcctggcagtgatgatgatcagagctaccgtttgcacagatactcctatgatcaagccccaccagatcccctgattaacataaacaagatgttatgagttgcaactgatgaaatctgtgtgaaaaactgtaacatagaaaagtaaactggaaagaaattaggagagagcagtagtatttacagctgcccccaggcttgttttgtatccaaggacgcatccaattggcagcccaatcaggtagtaggcaccaacattgacataggcaaccaccacctgccatccactaccaacggccactcctgcagatttctcaaaggtaaccaagcaattcttcagttacaatcatgctactacttggcagccgagaaatgcgaaatgcgaagcgtttgtgctatgtgaaatgcacctgagaggattggctgaattccattcaagaagatgctgatggacagcaacggtgtcagtttgatgacagcctcgatcacggtggtgctgcttgtgtagagcgtgctcaggggatacctgagaactaggactagaattgtagccaggatgctgaaggcaacgcttgctgtgataaccacgaagaccgagaaccttgccacatttggatggccagctccaagctcattaccgacacgaatactgcataataagttcatgcaaaagtttgaataatgaagtgggattgagaagtgtgtatctttcatttgcactcacctggccgcatagcttaaaccaagcatgatctggaagtcccaattccagtaattgatgctgacatgcgtaaaatacatagcgatgtgagttacatatatatgaatactgcagtagtgtataagcagacatttgaaactgcaagaccaatgagtatcatgaggtaaacagggtgtgggcggcataccagatagagagcgaatcaagtgcaatctctgggtcggggaggaagccagtaagaagcacaaatccttgcacataccaaatctccaacctgaccaagaacacatgaaaacaagacataaacacgcaagaactatggctcatagctcaagataagtagatcactcacgctagcatgacggctgacgcgaaggcaagcttggcatatccccagaggcctctgaacgcgagcacggacaatccagtccacgtctccttacaagccggagtccagaccatgagcccccatgtcaatgccacgagcacccaccaagagaagctcagcgtcagtgccgcgccgaggaggccaaagccgagcacgaacacggtcagccacgatatgaggatgtggaagatcagcacggccatggtgatgtaggcaacggggttgacgatgttctgggcctgcaggaacctctgcatcgggcagaagagcgcgaacgcgagcagctgaggcaccaggccgcgcgcgtacagctgccccgctgccgccacatccgcggcctgcccaatgagccgcaggaacgggccggcgtaccagtaaaggaatgcgatgacgatggctgtcgcgaactggagcaccagcgccctctggcacacaatgcccatggccctgaacttcctggcgccgtacgcctggccgcacaccgtctgcaccgcgctcgccatgccaatctgcagcattgcatgcaagcaacacacacatcataatgctttacattcccaaacaaccagagtgcatgcaagaaatcaaagttaccatgatgccataggctaggccctgaatgccaatgttggtgatggaggcgccggcgagctcgagctcaccgaggtggccgacgaacatctgggtgacgaggctgagagtgaagctgaggagcgtgatgaggatggacgcccacgagatgcgccacaggttgccggcctcccatgccgccagccgcgacagaacgctccgcggcacgggctcccggcgcagcagctcctccgacgcacccgaagactcatcgacgtccagcaatggcgaccgtgcactgcttgtttccgccattgtctcctccccttaagtgctttgctcaacataattcataatggaccaaggcatttatagacctgccaaagattcatagctcttttgaattttcagtagcagctaactaaccttcaagtgccagacctaccagtccgtttgctgctgtgaataagttggttgctgtgaagaagtaggtgcagtagtaaggcatgaccaattaaccatggagtttgcaatccagctgaacatagacaactaggaagctgccagtttaggaattaggatagatgaattgcagattgcattgcatccagaaagcaaaagaacaagctttacagcatgtagtatcgtattgcctctgactctaaccatcacaattgcttgtttttcgaatcttaaatattggatgaataaatacaaatagatcgatacgctgtaaatcaattgctatcttgttttacttgtttcagaagacctctttcagcaaacttaaccatgagttttccaggaactggtttgtttttctctgaggccagttgattatcaactttttggcataatttaacatcaggaattaaatttctccggaacatacgacaggccacgttgtaggcctgaagtccgaggcctctattcagaaaactctccatcagaatgtggcatgtttgagcatctctcactgaagcagttctcagtatcttgtagaggagactgtaagcctcattaagtttaccgaaagcacatagcttctcaacgacctgattgtatgcgctcttcatctcttgtcttgctagcattttttccagtagattgagcaagtcttccaaattgcccttctcacagtatctatgtatcactgtcctgtatgtaacaggtgtagggagcacgcctctgttgagcattttctccacaagccctgtcgcttcttttaatctacctttctttcccaaagcatcaacaacaacagtataagttacaacatcaggatgcctgttgctcagatacatgtcgtccatcaaagagagtgctgattccaaatcaccctgccgagaaaatccatgaatcacagtagtgaaattaacaacattaattgtacagcctttgctctggcactgttccatgaagtctttggcctctgctggttttctgtccttacatagagcatggatcagtaagttaatctccacagttgtggggaagaaacccttctgcaacatctgcactaccacatcacatgattcttttagtttcccttctcttctaaatccatgcattacaacgctgtaagtgatatcacttggagtccaccactcctcttcgctcttgtttagcaattcccaggcctccgacgttttcccaactttgcagagcccatttaacagagcagtatgtgtgactgtatttggcttgcaatcattcttatacatatgcttcatcatctttcttgcttgatcaagttccccaatgcggcaaaacccatcaactactgtgctatatgtcacaacatcaggttgacacccctttgagatcatctcacctacaatctcttttgcctccgccatcctcccattcaaacaaaatgagtgcacaattgcactatatccaacctcatccactctaaatcttttcccctccgattccctcaagaactccaatgcctcatctgcatggccatgctttgcaagcccatggatgagcacattataagtgacctgatctggaaatagacctgcatcattcctcatcctttgaagcaaacctcggacctcttccaccctcttctccttacacaagaagctcatcactgtatagtagctaatcttatcaggagggcacccattttgcagcattacaccaatcatctccatggcatcaacaacccgccgagccccgcacaaccccttgataaggcaattgtatgtgtacacatctggctcaaccccaacgcggcgcatccgttcggcgaactcaagcgccttgtcgacacgcccggccaccacgaggacattcaccgccatgttgcaaatcgatatgtcaggcgcgcacccgtccttctgcatgaggtggagcacgcgcatggcggagcggagcttccccgcacggctgtacgagagcatgagctgcgcgaactgctcggtcccacgccg

SEQ ID NO: 23906 - DNA, 4957 bp, Oryza sativa
  unsure (1)..(4957): unsure at all n locations
tcaagcactttgtcaaggctgtggtggatgtgtttgctgatcaatacttgagagcaccaactgctgaggacactacaaggttgatggctataaacactccaagggggttcccagggatgctaggttgtattgactgtatgcattggaggtggaagaattgaccaacaggctggaaaggacaatactcagggcatgtggatgggccaaccatgattcttgaagctgttgcatctaaagatttgtggatttggcattccttctttggactaccaggttctcttaatgatatcattgtactacagagatcaccactctttcaaaggcttacattagggacagctccagagttggagtttatggtgaatggaaataaatacaccatgggttactatcttgctgttggcatatacccttcttgggccacttttgtgaagaccatttctaatccacaaggtaacaagagaatacattatgcaaaagttcaagaaggagtgagaaaggatgttgaaagagcatttggtgttctacaagcccgctttgcaatggtgaggggtcctgctagattttgagatacagagaccctatggtacataatgacagcttgtgtaatcatgcacaacatgatcattgacaatgagcgagatgaagatgtagattttgactatgatcaggaggacagtgaggtgttgaggaaggaggaataccaacgacgtaataaacctgtgttagaaaaatttctaaagatacataaagaaattgaagaccgacgggtacataagcaacttcgagatgatcttgtggaacatttgtgggcgcttcatggtgctcggtagtttgtttcattgcattttctatcatgtgtgggttatgttcattatttacttctaggatatatcatttccatgtttgaaaattttgaattcaattttgaatcgtggtgtttgaaattgcaaatttgaatatggttgaactccatgcgctagaattatttatgtttaaattactatgtgttaaactagatataaatataaattctataataaaataaaagagaaaaaaaataggggctaagatatggaggctactactagacataaagacatatttagggtctagaacattgagggcagcccccatttaacttttagggactcgaaagtaggggctactgctagagatgctctaaccctctccaaatccaaatacacaaccatttccttttccggagaaaatctagaggaaaaaaaaaagaccttttcagtatcctccctcgacatctgaaatgtcaaatcggaagagacataaacagaatttgcagacacagcaatcaaacttaatgaagaccacaagatatataattaatttataccttctccgttgagctttcctcttcgagactgaccggccgccgctgttcgccaccacacactgcccataggacggcaacaagctcgcctccggcggcggcggcggccgccgccgccgggagcgactggtcgtcgcacgccgcgcggagcatgagagacgcgagcgcctgagacagcgagtcggagatgtccgccaggatcacctccacggcgccggagctcctccctccgccgccgccgcctcccgctagcatcgccttgagctggttggtcgacttctgcgcgctgcggatgagcctctccgtcgccgccgtgccgcctccggcgccgctagccatgtcaaaatgaggggaataaagtcaagtgtttctctccttctcgtgccaatggtttttgatgctggtcgatcgatggtggcgagtgtgcgctagtacagagggtaactattaggataatcaatgtatcttgcactttattccttttcgatactgtcagactcacttttgtctttgttaattactccctattatacattgacttttcctagctaacttcttaaatttaatttaatcaagtttataaaaaaaaatagtagacgtattcaatacaaaacaagatcctttaaaactaatttggtgttataagcgtgtggttaaatttttatataaacttaattaatcttgaactaattaattagagaaaaaaatttaaaacatatatagtactaatccgagtgatacccttttaaatcagtgaagatataccgtaacatatagagatggtaatgggcgatatgaactgatacccgacagattttactctattactagtcacatattatctaatttttgtactcattggtctattagcggctaaaaatccttagctgttgagtacatgggacctgttctttagtcagtcatacctataaatctatgtgtaaaaaaatgtgtgccattaatgtattgtctaattcttatatggtttgtttatttgctttgaatgttattaatgttagaattacggtcttctgtgatgaagctggtatcaccatcaagctcagaggactaatgctacctctattttttaatttgtaggacgctgactagttaatgtttaaactaaccagtgtcatataaaaaacaggagggagtattatttttgaatgatcgattaatttttatggatgtcgatagctattgatcatagaggtgacaggaacggtgaagccaggcggcggccgcctgaccttgcccggaaggtggatccgccgcgcggaccatcttatgcaccagctgaaagctacgtggcaattttttactagtaatttaattcttacgtgtttatcaaatttcagctgagtcgacgtgtacaacggcagaccatttgtatcaattttcatgagcacacgcgtcaaatgttttctacggtcaaaaaacgcaagaggataagcgcgcgtctaagttctgacactccgaagcctggtatgttattctcttcgtccaataatatacgttctaatataaatgaattgtttatctagatttattctactaggatatactaaatccacctaaagtgccttatattatgagacagaggaagtattgtatagcatatattttataaataatgtcgaatagcaagtcaagtacataaccactcgatcttaattaggacccatttggtaaagttctaactcctaaatttagcttcaggagttaagggtctatttgacacagctccagctccacctctcctggagctagagcgtagccaaacagtttcagctccacctaaaatgggagtggagtgggtggagctctctcacaaatgaattagcgaggtgaagctgggtttgggcanntncacnactctactccagacctaactcctggagttaaatttaggagctgcagctctaccaaacgggccctaagtctggagtggagttggtggagctgcctaaccccagctacaactctctagttcattttgtgagaacgcttcacccagctccactaccatttcaagtggagctgaaactgtttggctggacctaggagaggtggagctggagctgtgctaaacagatccttactatctgtcgagcaatctttgtgtagttgctgcactgatggagaaaggaactttagtcccggttgtgcaaccgggacacatgatccgagactaaagatgtctaacagggactaaatatgcataccaagttaaaaaaatgtgtgggatgtgagatttaaactcaagatctctcacctcagccctcacgcacgttaccattccacctgctacacactaaagatcgattttttttttatcccgggactaaagatactccatctagcatcaacccggacttaaaaatcaatttttttcctggggctaaagatcatcttttagtctcggttgatatcaccaatcgggctttaaaaattgatctttagtctcgggtggtagatcgttgggggcctgacagctgttgaacctttctattcgaaccaagacaaatatgatcttttggcatccgagtaatgatcagttctccagtaatgtagtcttgcttcatggcagtaatgttttggactggaaaaatgtatgatcccaccatatcctatgtaaaaataaggtatcattgccacaatgcttaagacaagaatatatatgaagatgggttacacatctagatgtaaaattcctaatttaagattaggcccaccataccctataaccactctcaccatatctggtgttggtgtgcatgtgtggccttatgatccattttatggcacattatagatgctctcacccactgactctttaagtagtggatccactactttaaggcattagaggtcagggctaagggcaatggtgctaaccttctcgttaactcagtgtgtcacctcaaatctcatttgccatcgcggtggggtaagtggtgttgtggatagcggcggtgtggattgctataacgtgttagacctctgcgctagaatggatggtgctaaaatcagggcttattttttaaaacatttaacgggtctaatcttacaataatatgtttttataagggtaaatggtcagattttcggtagttcaatattatcgatcatgaacaggataattttagccaacatttactaatattactgtactctcgtcgtgtcataattgtaggaactcgagatgatatttggctgtaagtttcacatttacttatacgcgattcggtcaaacatttaaacttcaaatgtttcaaaattagaaccaaatttagtctaaatgccaaatgtttataactggtgctatacccgtctcaaaattataaaatataacaatttttagttcacttgtccgtattcatagctaaaaattacaactaaaattttagggtggaggtacaatagtatttatatgttctctccttctcatggaactgatttgtgatgctaatcaactgtgcacaaatgtgatttgtggtcttaggccccgttcgtttttattaggatataaattttaccagtatgttttttaaactgttaaatggtgtatttcgtaaaaaaaacttaatt

SEQ ID NO: 23907 - DNA, 8854 bp, Oryza sativa
tcaaacatttaaacttcaaatgtttcaaaattagaaccaaatttagtctaaatgccaaatgtttataactggtgctatacccgtctcaaaattataaaatataacaatttttagttcacttgtccgtattcatagctaaaaattacaactaaaattttagggtggaggtacaatagtatttatatgttctctccttctcatggaactgatttgtgatgctaatcaactgtgcacaaatgtgatttgtggtcttaggccccgttcgtttttattaggatataaattttaccagtatgttttttaaactgttaaatggtgtatttcgtaaaaaaaacttaattaatcattggtttggctttgttgttttaggtattcgtacctaggccctgtttagttccaaagtttttttttccaaactttcaattttccattacatcaaatcttttatacacacataacttttctatcacatcgtaccaatttcaaccaaatttccaaatttcagcatgaactaaacatagccctagtctttttcttcatcattatctaacggggccttattacgaagtactaggactgtcaaatatcgtgcactttattattttcaaagattttctcgatgcacccttttctgccaaaattgtttcaagtcagtcaagatggtgaccagttattacctacgtggcatcacatcgtgctcttatgtggcatctcctgttctagctagcaaacagttggatatgcatgcatgttgcaaatttcaactgagcgccgacgtgttcacggtgcaaaccagatgcacaaaacttaatatcagacgccaagaaagatatgccaaaaagcgcaagagatttcttgtctgaatctgacgtgcacttcggatttaactaattaattagattttgttcttttatttttgctagctagtacatttctcctttggctgaccacttaattgatactatttgggtaaaagtttccttgcttgaatttaatattaattgtctcgatctatcattctgacatcgactctttgagccaatgtcatacatccaatctcctttcaggaattccttcaatatttgattctctattctttaaaaaaaatgtgcatacagttaagaaatcgatatctccgggtcaaagcttcagcaagcgaacaagctaagggctctttttaaccataggaatgaaaaaaaaggagaaataggaaaaacataatattctgataggaatgtaagggtaaaacagaggattacaaaatacagaaaaaacatagaaatgatcgtttgattggaccatagggaaacacaggaatcggataagagagatagactcaaaggatttttaccaagaggttggacctcttactaagtttcctccaaaacctatacgcaaaaagtcattccatcagaattttgtaggatttggaaaactttaatcctttgaatcaaagggccgtataggaaaattttctataggatttcaatcctatgaaatcctatgaaattccttcataatttctttgattgaaagggccctaaggtagtatgccctggacaaacctgatgtgccttgttcaggtagaatcaatttctgttttctcagaagagtgtactgtaattgtaatttgcgcaagcccaaactccataacagtgtttatgctttactgcagcagtacaattagtaatttgagtgctttcacatggtctctaccgacagtactgtactactcgtaaaaacgaccttaaacattgattcatgtattctactatatgtggaataatgatacttcaagtaaatcatgttgcgagctttgcaattatttttaaactcagttttgctcgtcgcaataattgccttaagaacaaatagtgaatttagacttggacgataagtgatgcagaaatggtgttagttgtgcactgatagcaggagtgttcgcctgagtcgattaagaaccgaactttgtgtcacccactattgtttaccgtacatccacatgtgctagttatgggatagacttagttgattaagttatttagggtctaaccttatattttggtaggccggagtagtatgaattagttttagtggtgattaagaggagctaactatttgcccgctaagggtaatccaggcaactatgtttatccaatataatggtatagtccctcatggggaaacatatgtgtttgacgtcatatcgttaggtttaaggcgtgggccagccacctaatagctctaggtcattcacacttgtcgttccagtgcaaagctaggctttgagtaatgtaaaggttacgttgtaacttctagaccgcattcaacacgtagagtgttgtggtaccaatgggtaccggacaaattagagtactcacattatgtagttaacgttgtacaaactttgtaaagtgtaaaactgttaacaaccaaatttggtaattcaagtatcggagatgaagataaaaccgaagcggaatccaagacggagatcgttctggaaacagagcaagaatcagttaaagtccgaatcagctaagatcagaatcggcagagttcgagtcggacaaggttagccgattaagccgattctgacaatatgactcgatatatgacatcgggttaggttaaagtgctaaattcacatggattgccatgcatagattgagttctgaaaaggcaattgtatctattaattaggatattttatgtaatttccttagagatatgttcgggaaaaagtctgccgtaaagacttatggtatcttagagtttgttatagataagagtcgtgtccgacatggacatattttgtaatctcgggtataaatagaccccgagccccatgtaatcaatataacacacgttcaataacaatctcggcgcatcgccacccatttacttttgtttactttcgacgagttcttgcttttaggttgagctgcatcagtttcgatcttcaactagaggtaaaacttgttatggcggcttgcgttctcgggattagtgcttccatctttatgatactctaatcttgtttatgtaattcgtcgagttatcatatattctatataatctctgacaatattgttatctaaccttcaatcggctaacatctaccattagaaggcagtcgattaggttaaatagcaatgttggcttagattatatagggtatctaccatcctatgaaacatccaatggcttgattgtctagatattgttcttctcttcatacttatagttgcatcagttgagtttgaccttataagtcgtgattagaacaatgatctctagcctgcttttggttgccgattagggtagtgtcgggatttcagccgatcttacctgatttagctttatattttatgtgcttaattgatatgctagatctgccctttatgttaagatcttaatacaacaaagtatgttaggcttctgtttgatatattttacttgctttaatatcttgatatagagtagtatcagagtattagccgatacatgctaggtctatctgatcggctatgttataagcatctataatcttattgttaatatatattttgatctaagtgatttatactatctcggcatggcgaccgatctatcccaatcacttgatttaagtatatatcgacataaggattatatactgttaatatctacagccgatcgaatagatttagttcttccttacttgttcatgattgccgatcgacttaaatatgacatcggctcaaagataagtgatacgtcatcggcggctggccgattggctatcatttatggatttaactgcggtttctttgtctttatttctcgttgattgcaggatcaaatcaactggcacgctcacgaacctaaaggcaagattttttggacatgcactggagttaagcagatctcccaggccttctgtttctcgcatcaacaaaaactaatcgattagccgtgctcatgtttatgcgcgacatagtgtgggtcattggcatagattttgtgttttataaatgcttttgaaagtgatatttaaaatgatgttgatgatgatacttgtgtatgattgacttgctgctgaggagggtagcaagcatgctacttgtattatgatgatgaatatgatggtaatatgtcactaatatgatgctataccatgataactatactaagtcttgcaaatgcttatttaaaattctgttgcaaaatgtttgtgaaattatttcagcttaatgcaattatgagaccataaatagccattccttggtatttagagcttgtatgtatttaggattgtattgccttgccagtacattaaacgtgttaatgtattgacacttgtttctttgtggtatattttagttgtgttgcaggtagttgagtgcagcgcgttccgttgatctcttcaggacggttcattagtggtctacccctagttggcttgcttatgggtctttggtagataaacttccgtgtgaaccactaattataaggccggtcgaccgtatgtttcttaaacttagactctaaattatcaattttttataactccttgtttatggatgccatttgttttgatgaaagtgccttggtatgttctatgcttatagaatatctagacatgagtgtggattgttgaacaacatagatattctagaacttagcaaattaagtcaagtctcctagtatgtgtaacacatctggttgccaccttcgaatggttaacgggcatgtctcagactgaagttgaccggcacgctaagttttactacctccgtcccaaaaatgtagctatttctagcatagtgccttgttccaaaatgaaactatttcttcacctacctcctctcaaccaatcacaaccattcttcttcacctactttctattttcaaccaatcacacacttcctccaatcattctcacatgctttcttaatacccgtgccaatcttaaaaataggtatattttgggacggaggaagtagaaatatctcttttgcttactatttagcactacatagattatattgaatggtgtttaattgtgatcatagggcacattgaggcttgagtgactattatgcatgtttggatcccactcacccaaaataatgtgatggtcgcattaaacattagactatatattttttgggtgctctacataacgacgctgtagatcccttgggttataaaaggaggggtcatgccactagaaaaagagattttcaggggaaaaaaggaaaccctaggtagaacagaaaccctagttcacttcacaagcttgtattgtacacttttgcatccacatagtctcaaacacgggagtagggtgttacgcttccgagcggcctgaagctatatactcgcttgtgttcatttttacattttcgcggtaaacaaactcgaactctgttcggcccctggctaaatctccaatggggggaggagggggggtcctttctgccctgttgtaggagtaccgatatccgatatatacttttgtggtactttgaaccaccccgactgtcttctcaagcatatgaacgacagtcctgtacgctggctcctattcatcaataaactccctatgttgtagactgtttcttcaacatatgacaaattggatgtacacaaataatagagttgaggatgatccaaagtgtcacaaaggtatactaacccagtccaaagtgaaaacattggttaaatggtggttcaaagctaaacaccggtaataaaatgttgtcgaaagtgaagtttactttaacctttttatatacacattgcatttattttgtttttccattactccatattgatttcattttagtttcatattctatagaagttatacacaacttagtgcaattagttatgacatgggctttggtttatacaaatcaaacacgtttatgcaccaaaacaaacaactgacaggtaaatgtacgtacctcgtaaaggtgtactgactatgcaatttacttgttcattaattttatttagctttaaaaatcaataagtagatgggcagctaaatattttgcatgcttaagtagatgtgtgaaaaatgattataacatatcattatatcaatacacccttaaaattgaaataaacaatgaaaataactaattagtgttattagctaaaaatcaatgattagatgagcaggtaaatattgtgtatgcataagtatatgtcgggaaaatgactcttaatacacgcctaaatccctaaataatatgatatgctgtatatttttctccaatttttctagcatgggctgtgctggagtccgcacgaaacgccttctgttgcaggccactaacgggctagcagcccacttcggaagatgtaggaataaattcactttgactcccttaaaagtggcccgaatttattccatgatcctaaaccgtaaaactattgaaaccggtacaatatatttgactaacttgttggttttggaggacgatttcgctgacgtggtgatgctgacgtggcagggttgacctactctatgggttgacatggcatttagttagcaattgaattaaaaacgtatatgtgaacctatttatcattcacacgcataaaaagttgtggggcccactgacatgtgagccccactgacatgtgggcccacctatcatcctctctctctttttcttcttcctcccatcttccttcctaccctctttctctccccttttctccccttcgaccggccgccgccgctcggcggccggtgggaactgaagcggcggcggcgatgggagctgagattagcggcggaaacaatggcgtgggcagcgccgggaagcatgggggaggtgaggatgccgaggaggaaccagttgaggctgagcagcgggacggtgttggaggaggagaaggtcggcctgccgccccggagcgcggcggcggactcgcggaggaagaagaagcgcgtgacactgcacatggacacgcccatcgtggcgaacagccccaccagcagcggcaggcacggcgcgtccgccgcccacgccaccgcccccaccaccgccgccatgcccaggctgaccaggctccgccgccgcgccaccgccttgccccgccgcatctgcacggacgtctcggaatcctactcctccatggtcacctccgtcgcgacgccaccgccccctcctcctcctgagcggcggcggcggcggcaacttcctctgcttcgtcttcccggtccttcctcttcctcgtgttcgacgggcgcgtggacgccggtaagctctcgccgccgtgtgccgtcgacggcggcttcttgtcccacatggacttgcccctttactcgttgagccgcatgttctccagcttgagaggcttcagctatggcgccgcaccacgcaacaagtagctcatcagttccccaccattgatgaacatctcaatgcttgacagttgacactactttacttacctgggtctcgaggagagtgatcctggcaaaggcgtcgtcgtgcttctcctccatctcgtcaagaatctcctccatggccttgctctccttgagcgccatgctcagtttctcctccagctccctattctcccacaccaacctctctatctacatctgcatctcccccaacagcccgtgcggtggcggctagccgaaggggagagaaagagagaagggaagaagaggggaggaagaagagagaggatgacaggtggggctcatatgttagtgggccccatattttttttttttgtgtgaatgacaaacgagtcccatcccacatatacgtttttaattcaaatgccaactaagcggcacgtcaactccacagtgtaggtcaatccgccacgtcagcgaaaccactctctaaaaccataaagggagtcaaattacacctgtttcaatagtttgggggtggagatatccggttttgcggtttaagatcatggattaggttcgggtcacatttaaggagtcaacgtggatttattccgaagatgtagcgcgtagcctcgataggccgaattcctgttccagcctaacaactatgggccccgcgcgggtcggccgcaatttcgtcctggcccatgtgaatttggccctgaaaatatctataatagaactgaggcccattgttgcgcgtgctgggctgaaaagaagaaatggagaaagttggaaaacatatcacgtatggaaaaagtccagtttgactcccttaattgtacaccgaatctaattcgtacccctcaaccagaaaaccggatagaacgactccccgaactattgaaaccggtacaatttgactccctcagcggtattggaggacggttttgctgacgtggcgctgacatgacggtgttgacccggttttcgtcccacgtggcgcttaagtggcattagaattaaaaaaaaattgtgggacccatctgtcattcatatcgtgggacccattgacatgtggggggcccacatgtcatcctttctctccaacccttcttcctcctccctctctctctaccttctctatcttttctctccttttttctcttccccatcggatggtagtgccggtgaaggacagggggcggcggtgccggcgtcggggacatggggacgcggtggggcgaggaggccgcggcggcgaggaaggcacgagggagcgactggggggaggcggcagcgaccggcgcgggcggggatgtcgcgcgccgggagggggggaagggggggcgcggtcgtagctgccggccgcatcagcggtggggacgacatgtcggggatacggggtcgcggtggggcgaggaggccgcggcaacgaggaaggcacgagggagcggctggggggaggtggcggtg

SEQ ID NO: 23908 - DNA, 17889 bp, Oryza sativa
tcgtcctcgtcacgagtcgggccacttccttgccgccacctccccgatgacgacccagactccggcttcgcgcccgacgacccggacctcctctgcaactgccccgtccccgaccgcctcctcgtcgtctccgcgggcgtagccgccaacctcctcttcgccttcctcatcgtctacgccctcgctcgcccgccgccgccgctctcgtctccagcgtcctcggccgcagatggggaagggggagagaaaggggagagagagagaggaagggaggaggaagaaggattggagagagaggatgacatttgggccccatatgtcagtgggtcctacaatatattttttgtgtgaatgacagatgggtcccataattttttttaattctaatgccacttaagcgccatgtgggacgaagaccgggtcaacaccgccacgttagcgccacgtcagcaaaaccgccctccaataccgctgagggagtcaaattgcaccggttcaatagttcggggagtcgttctatccggttttctggttgagaggtacgaattaaattcggcatacaattaagggagtcaaagtggactttttcctatcacgtattcacgtgtgaaatctaaaggggacctgctctatacttttattttttaaaaaaaatatttagaaaaaaaaacttatgataaatcaacgttgtcatgagcttgtgacgtttgttggttggcctcttacgacaaaataacactcgtcacaataatattgccactagactaggttacgacgatttgtagttcgtctcattgatgaaccccttatttttgtcgctaagttacactatcccatagagagcgaaataaaactgaatgacataattataaatagcttcgatgtcaggaaaaattcttcgcaaaaggtcatgtgtgttgtagtggacggattattgcagaataatcagtgcaaggatcagcattttggtccttttgaaaaacttatttcgtaaatagatccctagaaaaacttatcctaaaaatggtcctttttggggcgcccccctgccgacgttgcggggcgatgctgaggtggctagggggagtgcgccagagtggctgacgcccacccccctaaattttttatttttgttttatttgtttgatatttttttcacgcttagagacacacaagaaccaaacataaaaaaaattgaactcaaatggacgtaatatgtgacatgtagaatttttcctctcctctcctctctctctgaactagtgcagaggaaagagatgtgcaacttttttatttttattttatttttttgatatttttttcacacttaggaactcacatgaaccaatcatgtaaaaaataaactcaaacggacgaaatatgtggcatgtgcaattttccaaagctctaccgaaaaacttctctcctcgaaaacacaatcttacaagcggaatttggaggttttaatatcgccgaacctggcgaagcttgggagaatcggatgtaactttttctgtagatgtccatgcatatattatttgtctgattccgagtccgtatgagaaagttacgcctattttaatagatgacatattttgtccgtttcggtagagttttggaaaattctatatgtaacatattttgtccgtttgagtttattttttatacagttggttcctatgttctcctaagtgtgaaaaaaatatcaaaaaaatgaaataaaaataaaaaattgcatctctatgtactgtttaacttatatatgtcatttcatgtggttatagtggtagagtgcattatgtttaacatgctgatcaaagggttttactaaaagaattatggtctaattttagtgaaggtacaaagtagactaagtggtatgctagatattttcagacttagctaagtggtagttctagtttaaattttttttgtggttggttgtattgtgatcctgagtgtgaaaaaacatccgaaaaaataaaataaaaatgacaccgttgcaactccgcacagagaaacagggatgcagccgccggcgccagcacggctggcgccctcctcctgccacgtcggttcacgtgcgccacggtggcaggaggacggcgccagccgccgtcccgttggatgacggcgccagccactctggcgccccaaaaaggaccatttctggtataagtttttttagaggtctatttgtgaaataatttttttaaaaggaccaaaatgtgaaaaatccagctgcaatcgccatagagcaagtgaacgggagtcccgagaacccggatcgcatagtatacttgtatataaatagaagaagttttcttctaaacttttgtatcctgttattctaagcaataagaaacacaccaggttagccccaatttccagattgagtgtcattccacattttatttccctttgttctttgccattgcaggacaactacattcacccgcaaggtgttcgattgaggttctaggcaacaaaggaattccaaagtattgaaagtaaatgtgcaacatattaattataaactgaaatgtaaaaattcgaaaatgtacatttttctgatcgtttttacaggaatatttttatggattgtcttcccaccgtcaccgtgatattatgcataatttatctacttaatttataatcttgtaggtcctgtcatgccatatgatactacaggacagtgtacgtcgtcaatgcgtacaatcagacgggggcagagctaaaataaaatagagaagggtgacacttgcttaatttactctctttagattaagtttaacctgatgcgggtgtctaaatttgtattgagtgggatacacacataatgaaaataagtgagatatagcttaaaaaaaatttcttgaccgggttcctggtacccctccaatactctagtactcgatgctctccgccttcgacgtcgccatcagctcctgtttcgtcttgttgcctttaaaaaaaaagcgttgccagtaagggtgaaaacggtacggaaatttccgagaattccggctaccgtttccggtttgcgccgaccgtttcagtcggtatcggaaatggaaacggtaatcgcttttcggaaatggtagcggaaatgatatggggttttttccgaccgttttgtcggtaaccgttttttatcggtaatttccgtcaaatttccaacaaaattccgaagaagaaagccgactgggcctggctagcaggagcaggagcagcccattaggcattaagagactaaagcagtcgacatcgctgacgcgggtcgcagcctccttcgccccgatggcctccgtcgctgccggccctcttttcctcccccatcctccactgccggcctctgtgccgccgagccaagcgccaccgcgccaagcgccgagcgacgtcgtgccgagcaccgccgcaccgccccggcctcctcttccccaccggcaccgcccctttctcctctctctccttcccccaccgccgcgctgcgccaggccgccatctccggcgcctctctcctctcgggcgcgcgtgaaggagccgaaggcagagaagagaacgggtgagaaaacagagaagaaattgagagagcaggagaaggaaccgagagaagagaaggataagagagagagaaaagaaaagaaagagagaaaaacaaagacagtgggacccaccggcgggccccactatcttgactcttctccgtgacccccttacctggaaactaccaaaaagtctagtttagcatgaagcttaattacaatggtagttatatagtgtcaacaaaaaacttaattacaatggtagttaccacattgtatgctttagccatattgatgttgaaatatcgttgaactttttatattgtttgtcgaccttattgtcaacttattaatcatcgtataacggtgttgtgtggcagcgtgatgatgcaagggtgaaattataaggtcatcttcatacatagttaaatgtgggatgataccacagttcgttgtttccgacatgaatttttgacttccgaccgatatcggtagattcccgttccgacgattccgtttcagatataccgacattactgatatcgttactgtttccgagtagaccgttccgattccattttcgagaaaataaaatgaaaatggaaatggtatagggtttttccgaccgtttctgaccgttttcatcccttaccaagccacagatgttggtttcacctttccttctcgtgccactgtgaagtgattagggacaagcaatggagaagctgtagtcctgcctgatcatgcgtgttaaatgttgtcaacagcgcttgtcgaaacatgaattcggcaataataaaagggggtagcgcacgagacctaaaagtggatggatgcagagacaaggatttagacaggttcaggccccctcgttgagaggtaataccctacttctgtttggggatttgaatccgccatgtatattatagatctgacgatctagttgtctcatgccccctagagggcctcctgcccaccttatataggatgggggccatgattacaagatagaaaccttaaccaatacggtatcggtttcctaaatctactttacaatcttatcaaaccaggactttaggccgttccataatatagagggaaacataatacccaagtcatgatccgttacatatttcatagatataagttatcccctataaccagtcggataactatgccgtatgggtatggggtacccacaatcttcacagtagcccctgagaccttcacagtcgaaaagataatcttttctcgaactagattactccaaagataagtgcttcaatcatcttcgccatggtctcccgagtacttttaccaaatcagaagactgtggagggctgaaaaataattaaatgaaattttaggtgcatcgactagatgcacctaataggtgtagcccccgactatgtggttagttgagcaaactgaacatatagtcaaagagtaaataatccaaccaactgagtgattcttgataattatagtcaactaagtgacttgatagcatatacggtgtgaatccctaaataacatgatccaagtgatataccgactgctttgtagaatatgatgcgtgcaacctaaagttgactacatcattgaaaattcacatagcaaaatagttataaagaagcttgtatgttgtgaataaagaaatttccaaagtattgggcacacaccatgcgcacactgctttaacagatgtgcttaagtccctaaaagacacatggtttcaccacacatggaaatatatggcatatgtagtgtaacatccgagtaaataaactcataaaggatttaccaaccgcctggaaaatgaccaaaatatataatcagcctaagccataatattggtaaataaaaatgcacacttacgtgacaaaaagcaatgatattgtatccaatcaattgcttgataaacccaaacaacaccttgactatataaaaaagtcagcgggacagctatataaagctttactgttcgacaccttttaagatgcattgtaccaactcctaaaaagttgagtaactgtggtataaaaggattttaaggtattgggcacttgatcacgcgcactttgacctaagaaaaaagtgcctaagtccctaaaagaacgtgacaggtcacacctgaaaatatgggctgcagacatattaggcctaggccaaaaaatatgccttcgacaccctttaaaggatgacgcatgtaacatgctctcgagtaataaatcttccgggtgatatagaccaagtgtagctcatatgaatagcttctaatctgagtgattatcccttatgggatactccaaaatagatataataattgaatcccgactggcgcaagtattcggttgataacccttactgggaataataaatagtccagtctttgagcatagaaaatagacccatgatcatgaattcatgttgcatgtatccggaacaagtccaaattgaaggtataatacttgtgtttgagctagtaagcccctgatcatatagcttgtccttttgtcgtagttacaatggtccattgatagtagctgacgcagttggcatagagacaagacgaccaatatagagataatattgcccaccagaggtggcaaaaatattggtggtggtgaagatagtgataccaatcaaaagtgatgaagttgtacaaccgtggaggcgaagaaaccagtcgacagcagtcaggtcagccagcaatgaagatgaaggcgcccaacgataaagttgtgtagccatggcagcgaaataatcagtcggtaactgatgaggcagctggttaagaagatgaagatgcccattagtggcgacataataagccatccatgaaggcgaggataccggtcggtggcgatgaaagcaagccgacggtgaagatgtagacacgcatcaaaggcgatgacgaaatccaccaatcatgaggatgaagaaaatagtcggcgacgacaaacgcaaccgacagtaatgatgataagtagcaatcatagatgattgactatgatgacgaagttgcccatcaaacagcagtagaataggctatgttgaagaggcttgacaggatattgatgaagatgacgatgtcggtgatccagtcaatagcagtgtagcaactgatgataatgatgaagatgctcatcagcgtttgcatagtaggtcatccgtgaagatgaaataacaagtcggcgatgaaagtaggtgatgacagaagcaaccgaaggtgaatacgtagtcaccccttagcaacagcggagacgtcagggccgatgaagtagaggttctgttgatgatgtcagtgacaataatccttcaaattgttgagaagatgtcgaagctcgaatagtttccttgatgcaagcatgtgcataatgaagactgatgcaacgccccttgatttataaagatggcagtagaacttggtgctataactgttgcagatgctttacttagaggaaagtatatgctgttgttcaactcattgaatctgatctgagttgattgtttgatgactccaaactcccagacatgtaaatttaatcttgacctaccggtgtaataattggagtcgctgaagtaaaatgccagctctgaagcgcagacgaagataataactcccagagttgactcgttgattgattgattgcttcatcttgtcaaattttgagagtcttgtatttgtgtagcccccaactctttgattagttgggaaacaactgaacatagagtcgagaactgtagcttcttgtcgtcgagtagccatcacttgagtgaagatatgtattgaggatgtccggagagaaatcttgaatattggagcaccacttgttgtagtaaaataacacggcatcatatttggtgacgcataccgagatgtcgaagctcttgtagacgtcatggctagtgaagtagcaaaacttgcgaagtagcggcaatagagtttgccggtgccgaagacaatgaagatgaagtagctccaccatggtgacaaagttgcatagctgtgatgaagtgaacacgagtcggcggcgacagaaccagttggcgacggaagaagtagaataatgacgaaaacggagatgttctttaacggtggtaaaataggccagccatgaaggtgaagtcacaatgggcggcggtgaaagcaaaccggcgatgacgatgacgccagtcaatgacgatgaagacgcgcagccgtggaggcgaacaagccagtcggcgttagacaaggcgaccagcaatgaagatgaggacgtccatcagtagtggtagcggtataaatcaaccgtagaggcaagggcactagtcagtagcagacgagatgaccggcggtgaagacgataaggccaatcaacactggcagaatcatgtagccatggaagtaaagaaaccagtcggcagcagacgtagacagcttgcgttgaaggtgatgatgcctgtttgcggtggtggcgacgtggccaaccgtgaagacgatagcaccagttggcgtcatatgaggtggccagtcggagaagatgtagacgtcctacaatggcggcataataaaccaaccgtgcaggcgaagacaccagtcggcggcggcgaaggcgagccggcggtgaagacgtagacacccaacaacggcggcataataggccagccatgcaggcggagacaccagtcggcggcgacgaaggcaagccggtcggtgaagacgtagacgcccaacaaatggcggcataatagaccagccgtgcaggcggagacaccagtcagcggtggcgaaggcaagccggtcggtgaagacatagacgcccaacaaacggtggcataataggctagccgtgcaggtggagacaccagtcggcggcggcgaaggcaagccggtcggtgaagacgtagacgcccaacaaacggcggcataataggtcagccgtgcaggctgagacaccagtcggtggcgacgaaggcaagccggtcggtgaagacgtagacgcccaacaaacgacggcataataggccagtcgtgcaggtggagacaccagtcggcggcggcgaaggcaagccggtcggtgaagacgtagacgcccaacaaacggtggtgtgaccaaccaaccgtataggcgaaaacaccagtcgacggcggacgaggcagccagtcggtgaagaaaacggcgcccaacaacggcggtgtgaccacccaatcatataggcgaaaacaccagtcgacggcggacgaggcagccggtcagtgaagaaaacgacgcccaacaacggcggtgtgactacccaaccgtataggtgaggacaccagtcggcggcgacgacggcaagccggtggtgatgttctgactgatccattcctgtaacataggagataagcttaaagccatgaatccctttgatgcatatctggatctggatcctgcagaacaaatatataggatgagtagtatctgatgtaaatacagtacttgagaaagattcaagtattaaaagtgtttataaatatgtatttctcctctcgtcaattttgatttccccgagcagatgactcattacgtttaaacactctgcctgactagtcatagccaccaagcaccgggagtcggcctaggcacttcccaaacatgcatatgagtgacatgagttcgtcattaatggaacaaagtttcacgaatcaaaatttactactcgggtatttttgcaattgttaagagaagaaaataaataaatttatcttatctctatgcttttgatttattccgaatataatacttagcatcttgcgttactcggtccatccaacgagcccccgggtgctaggaatcggcccaaaggcaactatccatcgacaaaccaaacggaaagcataggaagatagaactccataactcgatagtcacttttgtactcagattatgtcgcaagcaatcaagataaatattatgaaaattgttgaaaaaatatgacatagcatctctagcccccgactcactagtcaatggcgaaccaattgatgtagtgagttagaggaaaagaaaaatatcatataaagaagaaaattaatgatgacttagctttgtaatattctccttggtgacggagagatgaccgatataggaacgaagtcatccgtcaatggcgatgaaataagccagtcatgaaggcaaagacatcaatcggcggcgacgaaggtgaccagtcggtgaagacgaagatgcccatcaacggtggtgtgatcaaccaaccgtataggcgagaacactagtcggcgacgacggaggcaagccagcggtaataacgaagacataggcccttccagactcaacgccatgttgtactgatccggtagtggtttataactcaagctcatgatgtcagaggagtgcttgaagggaaaaccggagcatgttttgatggagtccgagataatatctcctgatgatgtcagccaatatatcatatatcctcacgtaggagtatggtgctaggactcctgatctgattagttggcaaggtagccatatatgctcacatgcgtatgagctggatggaaatattaattggtgtcccttattgaggatagctcatgacaaccaattaacgatgtgtatgcctggcaattcttctgggatgtagatgcaaaaccaatagctctggaattgatcaaatgcatagcgttcgttgcttttcccagagctggggtactggtaagtgttggggctcgtgccgaccacattcccagtgctttccttgcatgccgagtgtatttttgttttgacctgatcatccagtagtcagccgagtccgagaatgatccaatcagctaaatccgagtctggacttctattgtacgcctggtataagatcaatacgatctacccatatagagatgtgtgctcagtgagctgatgtcttgatctcccgtgacaatgatcgaaagactcggaggtcagaaccagcaacagtacatgcaaggcatagattaatttaattagtagttatatcagagaccaatctaataacgattagtagattggaacgacgaacctggttattcttgtaaccacaaagtgtagctcctgaagcagagatctttgtggagatgcacaggagatatcggtgaccccgacgattgaagcctccaacttgatgacgtaaatctttgatcgccgttctctcgactggttaaaacccaagtcgaagagggagagattgttggagtcaccatcaaagaagacgaatccgtcaaaaccgaaagccagccttcggggtgaaggaaaatccggccactcctgatcttgattccatcacacttcttgacggaaaacttgacgcacccctacctggcgcgccaactgtcgaaacatgaattcagcaataataaaagggtagcgcacgagacctaaaagtggatggatgcggagacaaggatttagataggttcaggccccctcgatgagaggtaataccctactcctgtttggggatttgaatccaccatgtgtattatagatctgacgatctagttgtctcatgccccctagagggcctcctgcccaccttatataggatggggggcaggattacaagatagaaatcttaaccaatacggtatcggtttcctaaatctactttacaatcttatcaaaccaggactttaggccgttccataatatacagggaaacgtaatacccaagtcatgatccgttatatatttcatagatataagttatcccctataaccagtcggataaccatgtcgtgtgggtatggggtacccataatctccacagcgctagttctatcaccagaaaccggatgaaatcaattcccaatgcctcctaaacctaaaattgacacatggtatttcccttctttttttttgagacggtcgctagttagatgagggtttgtatgtgtgttacgcgtgcgtactaacacctcgaaggatgttgtctaatttgtcaagtgtgactgtgagagtgacttttagggattgggattttgtggatttggaataaacaaagcctatatatgtagtgaaggaatcatctggtttttttttgtttgtttttgggaggaggggttaaattaattatttcgtatacatgtgtcaatgaaacaaactttttatccagttttactaaaggaactccaaagtattgagaggaaatgtacaatgcattaattataaactgaaaggtaaaatattttttttttgaagaaaccgacggtaggagatctaccggaatattataagaagagagttgaccttgttaataagaaaaaccgggctcaaaaaccttacaactgcatagtttgctaaagggaaactgacgaaaccttacacagaagacagagaaaaaagcctgggacaaacgaccgaaccacaaaagtgaccgagggaagagcaagaccttcaaggcgaagcctccaaggaggggaacaacgacagaagccgctgccgacgcctgcccaaaaattggactgagttttcacccaaagggggagagagtccacaaagcagcacctccaagaaggatacgacacccacaagcgtcgatgttgccgattctggaagacaagacagggctttcacccgagactccctccaaaggaggatctacaatgggccagagcaaaagtgttgtgttatcgttgcccagctcatcggctaagcccgatgcagcagctccgactccgccaaacacaaaactctggcactgaagataagcacaccgctccaactcggcactacgataggttcacttagtcgcaggacactagaagcacttgcgaggcccaagagccctgactacagacagactgaaccaccttcatagacgaacacttctcctcaaccaccgaaagactccacggccgagactggaagcagacggccaaaaaaagggaggagcatcaaggaggagagaaggcatcgaaggcatcggtgtcatccatgtttccggcgaggaccccggccttcgcaggacaccccttacagctgcgacaaaccacctccaacttcaccactagcacagagagaggagcactggtgtaagaagcaaagcaactaaacaactaggcagcagagctgccagggaggaagcgagaagaagggagacaagggtggcggacacccccttctgcttgcaaagaggaagaagccaagagaggggagggtggttgtggctactgtcgacaccggaggggtaggtgtggcgatggggggcggctggcgagccagtgtagccgacgcccccagcgacgcgcctcgccgatcgggagccagcagatgtcgccatgccgcctcgcaagcgccgtcctccgcgccaccacgcgcgcaccggaccacccacgcgcgcgctggacttcgccgcctcgcgccgccacgcgcgcaccggccgccgccaaccttgccgcctccgcacacgccgccccacggcgccgccgccagtactccggccgaaaaccggagaggctggccagatccggcgacggcggcgccggatctgccactgcctagcccagaggcctcgccgccaccactccccgacgccggcgaacgtctcctccaccgcgccttagaagggacgccgccgcgaagaaggccccgccgccgccatcctagctcgccagccggcaaaggagagctccggcggcggcgaggtagggggaggggggagggggagcggcgacggaggcgcggcggcgacgcggggggagagttattccttttcagatataacagatctgaaagctaaaatatacatgttagctgttttgcggtctttgatcagtttgtgacaaaaactcgaacctataagcgatagctagctcttcgcataatatcaaagcgaaacatatgtatcgcaaattgctgggcatcactgctagctccagctgacaaggaagtgcaaactacaaaacactgcgaaccatcaattcctttttggatgaatcctgtatgcatcccatgcctaactgataccaggaaacataatctatgctttttaggatgaagcaggtaaaagtttataagaacttggttttagaaaactctacaccatcatcggacaattcgaagagcattttcagacatggattcgattcgtggtgctcgttcaaatagccaaggataaatattttgcctcaaaatcaatttacacgtagatccctttcttctgactagttctgtttgattgttttatttattcttatatgtgtatgcacagtatactattttggtaattttaacatatttcaaaagataccaggagataccatagtttctaatatatataaattaattttgatatcctcgaatgaagtaccaaaaaatttaatataaaatttagataccttgagatactttctcaaatactgtataatttctcataatattttacgtgtccacaatataagaccatatcgtccactctttaccataaaaaaacataatggattattagaggattccaaaggaagcaatgatacaaataggcacatcaggcacagtgggatgtcaattatacaaatttcacattgggctttatactaacacgtctaaactactaagctggtttttacttgggtaaccagattgcacacttccatccataagtagagggaggaggcttggtaagatcaggcggtgtttttctttaaataccaaaacaagaaacagaactgatcgagaggtggcatcaaatcaaaattgatgtttttgatgcgttgaacgtaacaggattagggacaggccatggagcagtttagtctttacctactagtgagagggttcacactgaaactaaggcacatgctgaatttattttgaaaatacatgagatcattgaaaagatgactaaaaagtatagaattaattgctggtagtaaaggtaagcaagaagtgaagtttgaaccgggtgatttagtttggttacacttgcgaaaggatcaattttcagattttagaatgtctaagttaatgcctagagctgatggtcctttcaaaattattgaggaggttaatgataatgcatataaacttgaattgcttcctgagtttggggttagtcccacttttaacatttagatttaaaaccatacttgagagaagaagatgtacttgagtcgaggacgactctaattcaagagagggaggatgataaggacatcactccttcggatacacacaacaatcctccaccggtcattcaaggaccaataacaagagctcgcgcgagacaattgaatttagaggtaagctcgttcctattcttctttgtatgattttgagaatatattgctacctaataattataggaatcatggagaggacaaagagacacttagggtgtgtttgcaacccctttttctcaacccatctccctcgtttttcgcgcgcacgcttttcaaactgttaaacggtgcgttttttacaaaaagtttctatacgaaagttgctttaaaaaaatcaaattaatccatttttaaaaaaaatagctaatatttaattaatcacgcgctaatggaccgctctgttttccgtgtctattgttccggatgggaacatgaaccagcgaacacacccttagagagggacttagaggcgcggaggatcatcaaggacgtccaagtcaagatggaggcccaaaccaagtcgacttcgagtacgattcggagtccaggaccctctgcactaaaacgggcacccagatcgcatacatgctcggattatggcgttctttatatggctggaaagctaagaagataatatttccaatggttctagtcccacgtccaaattctttccaagtcaacaggaatcgaccgaacaatttgacgtcaagaatctgtcccggtgctgcgtcaccgtatttgggcatttgggccgtgtatcgtattggaacccattagggttgcatcaagggttgtttgcacgaccgtaaactctatatatcagtaccagccgtcacctttagggtttaggtttttcttagattattctgttaagaacactttcgccactagatcggtttgtaagacaccaacttgtgagcttaatcattcatctacaattttagttgtattcttccttgttcttgtttgtgttcttcgattcgcaaacagggattagccttttcggcgaggtcttccgcgtttcgatacgggtgataaccagaggagacgtggtgctacgattgcggggctcaagagcgtgttcgttcagaagccggatcgggctgtgtcgcgactccgctcaaattgactgcctattagaacctttcggaagatcggtaaccctcgtccacatcacaatggaccactatgggctgcagttgctactcacaatgaggaacaaactataaaacttggcgttgtcatcggagaggcagatgaatccagtatggctcccatgcctaattgatggataggaagaggaatctgtggtgctttggtttgctggtatccacaatatactccgcaagctttgtatgttacaggggacatgagaaatcactttaagacgcgctctctaggaattgatgttacagaggaagcaatgatacaaacaggcaaatagaaacaacgggatatcaattataggatagacgatctgaagttctgaacgtactcttaaacttttaagtcagaactatcctctggattgaatgaaagttatgggctataaagagaagttcaattcagcagttgtaataaagacaaaatggtactttttttcttctttgattcagtttaagaactagctagtaagcaatatgtaatagtataataaaaaatacaaaaatttcgtttatacattttcaagccactttctgtactttaccagctcaacttactagttcgttgtaaaattgctctatcagtagacactggataaaatcaattcccaatgcctccaaaacctaaaattgagacaaaggtaatcggatgctggtttgtatgtgtgtgtatgagtatgaacgctcgcatactaacacctcgaagattgttgtcagaattgtcaagtgagaatgacttttaaggattgggatttggtggatttgggaataagcaaagcctataatgcaggcatcatctggggtctttttttgtttttgggagaggaggggttaaattaattatttcgtacatgtgtcaatgaaacacactttttttttccaatgatactaaaggaactccaaattaaagattgaaagtaaatgtacaattcattacttaactgaaatttaaaatatccatgttagctagctgttttgcggtcattcagtttgtgacaaaaactcaacctataagccaaacatatgtatcacaaattgctggcataactgctagctccagacgaacagcaaactacagtacagccaaccatcaagtcctttttggatgaatcctgtatgcatcccatgcctaactgataccaggaaaaagatgttggctaaccgatgactcagctcctctcacgcgagcacacacacgagaatgaaacgcaaacaagattaatttcttacaaaagaatctgtgctttttaggatgaagcatgtaaaagtttataagaacttggttttagaaaactctacaccatcatcggacaattcggagagcattttcaaacatggattcaattcgtggtgctcattcaaatagacaaggagaaatacttgcctcaaaatcgatttacacgtagatccctttcttcttattactccttccgtcctaaaataaatcaacttctagatttcaaatttgtcccaaaataaacaacttctaccttcttacctgccaccaatccgcaaaacgagaaattttattacttcaatacccctcacctatccattattcaatacaacattcacgttaattaagagtattgtggtcttttatttctctccttaaaagctccttgggaagctaaggtttgatttatgtagggatagagggagtacttctgcctgattgctttatttattcatatctgtgtatgcacagaataatatttgagtaattttaccattgttaagaaggtactgagagttaccatattttctaatgtaaattttggtattaattttaatgtaaaacttatgtacctcaagatattttctcaagtactgtataacttctcataatattttacatgtccacaatataagatcatatcgtccactttttaccataaaaacacaatggattattagagggttccaaaggaagcagtcatacaaataggcacatcaggcacagtgggatgtcaattatacaaatttcacattgggctttatactaacacatctaaactactaagccggccggtttttactt

SEQ ID NO: 23909 - DNA, 17383 bp, Oryza sativa
ctagttctagcaacaaacgcaggatgtaatcgattcatgatgcctcctaaacctagctaaaacctgacaaaagcgaaattaagttcattatggtttcagattgaaggggagagggaagttacagaagcagcaagaggcagggtggtggggaagggttttatattgagatgtggtagctggatgaagggtttttttttttaatgtgtgtgtatatatatatccatgcgtgcatggtaggctctcgattggtgttgtcaaatttgccgaaggagaatgaattttaggaattgagatttgaagtattcaagagacaagtgggaaaagaaccaagggaggtaaattgggggcctacatgtgtcatgtaaccggaaaaattcgaaaatatacatttttctaatcgtttttacagaatatatgtgtttatagagagaagtgccaaaaatataccatcgttgcagttaactgctctacgagttcgcttggctgctcagtgaacgggctgggcgcagcagcaagttcgcttgactgcccatcgaactggctggctaatggctaatgacaccgttaaataccatgattacttgttaattactttataatgatattagttaaaagaaacttggaaggaaacctgtgcggatgcacgggcacctcacttattatttatgaaaaaatgctaaaagaaatcatatctcagtacaaattatttaaataaatagaaaaaatatctatgttgtaaaatatacgtagacttaaatatagtaaatattactttgtcttgattatgaatggcaccaaggctttctttcatgctgcctctaaacatggatctcccattgatgtagatctactccttaaaaccagcatgaaccataatttcatattgtctaattcactatcggcatcctcatacataattgcatcgttaagtaggaagttgagttttatcgccaatcgatttaactatatgtatgttcttaccatacttataaaaatatagtaagctctgttatccatgctcgaggccctttagaaaagaacaaagagaaaacgaagatgatgacaatatttttttaatgttatgagttgttttgcagaatagcgtagacgtaatttatttatggtgttaatttatcaataatacttaagtttttattttttaaaatactatacaaacgcatgtgctcataatgccaacccacttacctccctatgtatgcgcaaccacatatcctattcttataatcacctccgaaagattagatcagcatatcttaaaattggtgaagtcagcaccaaagcaagtattcataatgcgcacacatataccttaccctatgagcaccttcaaaagattggaccgatatatcttaagattgatggacctagtcatttgtttacttaccgggtgaattgcagggaaaatatgaaagacatttgttgctgaaaaatcctgtgcgtgtgtgcaggtgcgtttcctttgtgtccattccggccgtgaactcttgagttcgtgcttcgattcagccgtgagtgttcattctcagttgacgcctattggtggccactaaaaactccaattcgagtacaaaaattttaataaaataaatggagataacatgttaccttatcgttgtttctttacactaatgggattctatgagttttgttggtctaacaggttttgcaagtttaggtcataaaatgtaaacatgtcgggatatttgggcttattcccaattgaattttgaaggagcaccaaaactacctataagatatgaaaccaaatcacatatttgagtataccacattgaagtcaacacgacgatagaacagatatatggtttgtctgatttggaatctggacgaaggagatacgataaccagaaaaacaagccatcttgccaagctgagggtggagagtatggggtcaattggaaggaagagaagtcacatggcaacccagattaggaagaaaaacttaactctaaattttcttctcaccttacctctatctctatcgtattttcaaaactaggaagttgattaggtgacgatacttaagaaactaccgattgaaagcaacagtgctatccatggccgccaacgtcgtcaacaaaaatctcatccatctaccaacggtaagttgacatgggaattaaggatatgcattgcggattattgagaaagcagttcacaattaattcataatgccatcaatatgcctgtaccggacagggccatcattgatgtcagtgtcgccgccagactgcggcgtgatctgttccccgaaagatctggtaggagtagccgacggtgatccggggggcgaggaatgagcaggtgtgctcggtagtgatggtgacgcctccagtgagcttgccagggaagaatttcccctttccaccaccaccggttccttgcatggacatctgccgggtgatggtgcttggtaccgcggtacgaagcctaccacagatgtcgtcgagccagctggttgctcgacggtctcctccacatcaaattcagcagagacctactcgcctgtagctctataccatggtcaaacaacattttcttcaaatatgacaccatgacttacatggatgcgacctcgacgaggatcaaatagtcgatgcaccttgctcccttcttccacgcccaagtacacatacggtgcacttcggtcgtccagcttctcgaggtgtggtactgtgttcttcgcgtgtgcagtacacccgaacacacgcaaatgcgcccgcaaatgcgccaagtgcggcttcttaaccatccacgcttcatacggagtgcgatttcccatcgccttggttggcggccagttgagaattgaaggtacactgtgtggcgcactgcctccccccaaagccagcctgacacgctcctccccttcaacagtgagcgcgccatcaccatcattgacctgttgcggcgctcgccaccccgttctgctgcggcgagtacggcactgtcaaatgccgctggataccagccgattcacactgttgtgcaaactcgccggacaggaactcgccaccgtgatccgatctcagcgtctttatgcgccgcccaaccacgttctcagccaggggtttgaacttggtgaaggtttccaaagcttggcccttggatttaatcacaaacacccacatccaccatgtaaagtcatcaacaatcaaaacaaagtatcggttaccagtcattctcgccggtgagatccacccgcataggtggagcaacgactcgcattctcgccggtgagatccacccgcataggtggagcaacgactcgcggcttaacgctccaaaagaaaacttctggatttttcttgaaattttccggcaagttgaaaccagtcatgtactaccctgtttccataagaaaagtgaaaacaaccaaggttagcctgcaaatgacagtgattatatagaggtaaatataaagtattagtcatggtaatctctgttataaatcctccccggcaacggcgccagaaatgttgttggtatttcttaacgacgttactagaaatataattcccagcaatagcgcagaaatacttctggtatattatggttacagagttcatccgcaagcgcacggatataccattgtagcatttcacccgagagtattccaagggtatcgtatttgtttaatcccgtgggaagattataatagagataccatactaataatttatatattaattgtaataatcaaagtctaagcatgagttaatataatccaaagggtagagtgacactaagcacaagcattcatactcttactcataattatctaagctaagtggaaagaacatagaaagatcatattcctatacttctagtatacatacatattatacatacatcctagccatattattacttagctaataacctctttctgataacctactggtgcttcgagaagccaaccctgattgccaagttccttacgacaatccgtcatgaccatccaatcagggctaaatacggaggactaccctccccaggaaattaacttaggactatatacacgcgcggaggaatacatgtactgagctgtcaccatcagcggcccacctcgcttctacaacatataaccccaaataatgatatccagtaatctaaacaccatgcttaaattaccaaatactattctaatatcatcgtcatgacatagagtcatcgtaaatatgatcattatactcacaccattgtatctcccagataagctagcatcataatgaatataacttgaacatatagtaaagtagatattcatatactcgaaaagtaatacaataccaaagtagtataaagaagaatattctaaataaaatataagtcttacaaaagaagaaaaagctactagagtccccgcaaaaaaaaaagctactagaggcatacccaaattcttccgaagactccgaggactgaagattctattatatttctattccgctatactccagggactatactaaatttgagagatgaaatgatcttcttgtttgaggtgtgtcttgaaatggagagagagtgagccttttacagacaggtagtgatggttatggcggttggaaaggttggtaatacccttcaatcgctatagggaagccatccacaccatccatcaccaaccctggatcgagcggcgctgaggagggttcgaccgaaccatgggtcggcccaaccagcccaggttttggctggtggcctcctcttttgctcccatgtgcagacttgtgaattttggcccaattggtcatgtcatttctgcatttttggcccattcgttgataagtctgattcttgacatcgtccgattgaacgatcgcttgttttgatgttgattctcgtccattttttggtcattctatgcaagaggttagtaatcctagtgctagaggactatttattattaaacataaatatgcattgcaagtataactagttctcatttattttagtaatattgacggtcaaaactgatcgctaacgaccgtcaataaaaccggatctgctgccgccggaactatggacatggtgtcagatcagccctcagcccgagtgctctgataccacttgttggcgacaaacctcggatcaaacactttgtgtgcacactgcagcaatccgacacggcaacagacgagaacatagaatgcagaaagggatcttcagaggaagaacagtgaagtttcagagaacaatcgatgtactggaaattgtggggttgattttctgtggtttttattcaactgaatagagtaacatacaactcaaataacatgactagaatccaaggctcaaatcgcgccatcccacgataccacttttcgaattcaatgactcacacatccgcgctaaactcacgcacgcgaaccctactgacacagtctgcttaaggacttgatcgccgcatcatctgcatctgctaacaaactccagcagacttattccttcaacctttgcaactgctaacttctggaacacgtaggagccacagctgaactaacaaactcaacaacgtgtgactatattcatcgcagcttgttagcaacggccaccggcaccgacgccggcgacctagccgatgtagtacatggggtcaggcagcttgaaggtgcgagcgccctccggtgcacccaagatgtcactccactggtctccgatgttaccgacgatgatgaagccggcgtcctgcagcttctgacgctcgccggacttgtacgccacagccgataactggagcccgccggcgacatgagctgccggcttcaacagcagcttctcccatccagtgtagccctgccggcggaggttcgcgacggtgatggccctctggtcctcggtgcggcctgtcaggaacactggcttgacaccgagctccagcagccgccggtacaggcgcctcgtctccggcagcgccggcgcgctcccctctgccacatactcacgaaagctcgtgtcgttgtacggcgtagctctgccaagggattagtaaagataattataattaattaatttcttcatatgcataaacgtatgcatcgttgcatgcaaggcaaagttaattattcgaataaaacagaagctttcaatggaactgtcgaactcatggtacaggaccgaattcacgaataaataaagttgcaagtttgctggaaactgtacaaacttaatcattagtaaaaagaatttatagcatatgagcgtgcagtgcgtccatagctccatacttgtctaggattaaattttcgatatgatatatatagcatgcagacaaaaatgtatctgtcaagttatcttgtcttcactgttcatatgcatacatgcatcatgcatggtcccagggctatacataagatcccgatgctaaatataaaattaggttgtacattgaagaatttccaagatcaaactttttaattctgtttacttatggaattgcaacatatatattttgtaataatactaagaattgcaaaggatattcctgatacaagtgtaaaagatatgctctcttcacgaaattaaataaaggatgttatacgggaaagcgtaacatgtccttgttcaaacaaaagaaagagcaaaaaaaccttgttcgatctgcttgagccttgatgcaatgttgttggaaagttgtaatatctaaagatttcttctatttactgacaacataggccggccgatttcaactttttccatgtagttcatgaattttgattcacgttcaatagtagttcatcctagtttaacactgtcatcagcaagatatatatccttgttgttcatataatattccatatactttgtcagcaagttgaggggtaaatatattacaagattattaaagtcccaacttcaattaatgaagagtatatatacctactgaaattaaatacgttcaaaatactaattccgttttttatttgacaatgttgaattattatataacttttcaaatagaatgaagtgcacgggcggttcttaaacttgtacagatgtgtcatctagatgactagatttctaacatctcaaaaatgcatttttgggtccccaaactcgtcatgtgtcatatagatctaaatggactccaacccgctccgtgagatgacgtggtataccacggtgatactttcgtgtcagtgggatccacatgcatgctagtcatgtagaaaaaaataaaatttaaaaggagatgagaaaataatgttttcaattttgaaaaaataaatgaaaaaagaaaggggaaaaatatttcctttttttttaatatgtggcggacatatatatgagttctattgacacgtaggtgccaacatggctgccacgtcagcacacggggcgggttggaacccgtttggatctatatgacacacgagacaagttaaagggctaaaaagttcattttgagagtttagtgacctagtttagtgatctagttgatacacccatacaagtttagagaccgcccgtgcactttactttttaaatagtaagaccaataatcaaactgtgtctatgtatatacatatatacgggatgccgggccccacgcggcagccgcacggtgcgcccgaaggcggccacgccggcgcagcggcgggaggcggccccccccccccctttgggcccccggcggcggccttaggcccggcggaccggcggccgaaaaaggggaagggaagggggaaaagaagcggcggtccacggctcaccccgggtcgacggcgacgacggaaacggcgaccggagcggaggaaggcggcggcgcggctcgggtggacggggtcgacggtgctccggcggtcggcgagcgaaacggaggggtggacgaggtcgtcggggatgcggtgaagccgaaggtggcgacgccgaggcgggaggtggtccggggcgacgacagcggcggaccggagctcggcggtgacggcggagagagagagcgacggcgcgagctcgattccgacggggagagagggcggcgagtggcggaaacggtggagggtggcacggggaaggtttatataggattgggagggggagggagctgccggacgagggggaaacgggcgcggaagatccggtcgccattgatggcgccggcgaggttaggggagaggtttccaaacgaatgcgagggagagagggagggaaaaatggggggaaagagggagggaatcacggggaatatttccccccactttattgcgcgcgtggacggcgggaggcggcgggattcgcggtggcggcggcgctagggcacgggcgaggcggcgggagcggcgggaggaaggggatgacgggtgggccccacccgtcagtgagggtggcgggcgggcccgcccgtcagcggcacgcgcgcggggaggaggccgaatttgccgcgggggagaggagagagagggagagagatgggcgagccggcccaagagggggagggggggaaaaggactttttagggtttttctttttataaaacctttttaactttgtttatttcttcttaattattatttgtgctctgaaaattccactaaaatttatttacgcattttaggcttttaggaaatatacaaaaatcctccaagccttatttgacttttaactttgcacattttaattgttggaggctttcacacggattttaattattctaggcataatttcggggatgtattttagagtcgttttgggacgcgacaagggcgctctccccggtcgcgggaccatggagagggaaccaggaggtactgaacctgaacctgtcctaggtcacatggttgcggtggaggattatattctctgtggttttctccccccgccttctgagtttctacagtctttctttcctccatttgaaccccaattccatcaccttcctcaatatcttttcgcatctttgtgaggcctacattggggtagagccatttctcgacctttttcgcttctactacaagctgcgttggatggaatccaccagggtatctggatgcgtcggtttccgactccgggatggcctaaagtcgcgctatatccccttccaatgcccttcttctcgcagcaagtggcaggcgaggtggttctatcttcaggtagaggattcagatccaatctttgttgttcctgaggaacaaccagacaagattccgtcttggactgccaaacccgccttgaccccttctcttcagttcttcatcaatcccatcgatgacctccgagtacgaggtttgtcgaggtatgaagtcgctgccgacttcattggtaggcggatccagccgctccaggctcgagcccacccagcctttgactattctgggccggaggacgcgacccgagtttctcctcgggtatttttctttgtgtttaatttgacttccttatgtgcatgttcctcctgacttaccgaattctggttctgtctacaggtttgaacagcgagaccatggagcgttgcgtcggacaattgatgatcagtggcccgacaacggtgagtaacgtccccatccccctttgcgagaaggggaaggctgagcatgaagccgcaattaacgtgagtgtatttgacgaccccctttatttttgctcctagatcgcataatgacttcacgcggtgcaggctctccctctgaccgacgtcattggaccgctcttggaccaccaggcggcggcctcgttgaaggagggcgtcgcccaagaggcgtccgacgcggccattgctgctgctgccacgactagtggcagccgtgtcccgaggaaggggaggaaattcacctccgtgctcggcagccgccggaaagcgtcctcccatcggtaagtctcttgagttgttaactacgtagtcggaagatgtccccctcacgtcgtactcggtttacttaggccttggatgcgtctccgccacctccacgacggcagaatctggtgacacttggcgagaagtaagtggacaaaatttgaggtccttcccttggttgaattctggcgacttgtcttgagggccagacatgttaatcttctgtaggtcggcgcgggcgaaggcggtgcaagacgggtccggagggaactccagcacgtctcctgcgatggcctcgaccgatgtcgtggtcgtgcccaggagccgtgaggtgacgcccaacggcccagccagtgatctcgtgcctgctcgaggcctgcctgctgacgtcctcacctggggggagctccaagtcgagatggggcacatccttgaggttggtgctcatggcataagtcgcgagattgcggaggcgaggacggcagcagcgtcgtcggcaaatgagcgtgccgataagctggcgcgtgacctggcggaggttcgtgaggacctccagaaaatgagggaactagtggccggcaacgagtgacaacggtggggactcgagaacccgatgtcggaactcgagaatgtcacgtccggaaataacccaacgggcgttccttacgtgtgtgtattattccttgtcccaggaggcaaggtacacccaaaagttgatacaattcagagtttaacaagcggaagcgtatatagataatttattacatgggcggcgaaggcccagcacacaagaagacaaacgaaaaacagcagaagactagggcgacgaccacaggcgcttgacggcaggcaccagctagacaccaaagccttcatcttccgggaactcctcttctgggtttgggaaaaattgagcaagactgagtacaaccaccgtactcaacaagacacacccacaagtgcagaataaatgcaagggagtacaagggagttataacataggggttaagttttgcagtaaacagcatttaaaagtcacttagttgccaaaacctattttatgaagacgatcctagagctatacaagattattaatcaaggccgtgaacccacacaaacctgccttaacccaaggcctacgatgattcaaaccgaactggcaacccgaccctgggtcccagctcgtcccaagccaacccaggccaaccattccacattttagttgttaagcaggttttaagaattaaaacactaacttgggtacattgctaggcttgcccataaccgagggcgcggctatttgaataggttttactctgatcagaggtgtacatctttacccacaagacatgtcttcctcacgtgtaaccacatgccacataccaccacggcatacagacggaagacatgacatagtttccaacccatcctagccatagacaagagtaccgacccaaccccacctacggcaggaacctccgggacaggtaggcaggactgagcccctagcagcaggacaccagccccgtgccatgacatctcgactaccgggccgcagctcgtgtagccttcatttgccctagagatgtccatcgacccccgacttcgtccatctgcatccgtgtacttttgtttataaccagactgagccacaaactaagccttacccactagacatgtggaagtacggtagtgctttgcaacagaggcccgaagaccggtccttatgtggccgaggtgctactatcaaaaccatgcaccccgagcccagcctaaaaccattttgagggttttgaatagagggggaggtgtgaatccaattccacaataatccaaccattccaatgtccatgtgatatgaatattcccaatccttggcgcgaagcgtcacagtacaacatgaagtccttgcgagtatccggtaagattaaaaccggcgaggaaaccagcctttccttgagagtttggaatgccttctcgcattgcgggctccacacaaatttctcttctttcttcaacaactgtgtcatgggtcgagcgattttggagaagttctcgatgaacctccggtagtatcctgccaaacccaaaaaactgcgaatttgagtgactgtcttaggttgcttccaatcagtgacggcggtcactgtttcggggtccacagcaactcctttagcagatatcacgtgccctaagaatttgacttcggacaaccagaactcacacttgctaagtttggcatacaattgatgttcccgcaactttcccaacaccagacggagatggtgctgatggtcttcctctgattgtgagtacaccagaatgtcgtcaatgaaaaccacaacaaacatatccaagtattccatgaacactttgttcattaagttcatgaagaaggcaggagcattggttaaaccgaacgacatcaccgtgaattcatatagtccgtatcgcgaggtgaatgcggtcttcgggatatcttcttcacggatgcgcaactggtgatatccggaacgaagatcaatcttggagaataccgtggcacctttaagctgatcgaacagatcatcgatccggggaagagggtacttgtttttgatagtaacttcattgagagctctgtaatcaacgcacatcctcttcgtcttgtctttcttctccacaaaaatcacaggagcaccccagggggaagtactcggccgtatataccccttttctttcaactcttccaactgtttcttgacttcggccagttcatttgctgccatacggtagggtcgcttgtacagaggagtggttcctagagcaagatctatccggaactcaatctctcgcttgggcggcataccgggtagttcttccggaaacacgtctccgaactctctgatgatggggatttccgacagtcttatctgatgaagttctgaactaccgacagaggttgggggtgcaaagaaaacaaccggttgttccggccctcggtacagagtgacagtgcgtcttgcacaatccactactccttggaattgagccaaccaattcatcccaaggatcacatccaagttcttggtgtctagaagaatcagatccgaggaaaaaggaattccctgaatttctataggaacggcagggctataatactttgctgtcataacccctccaggggtggtgatgagcagagggttcctaagcctttctacccccaactgatttctccccacgaatggcacaaatataaacaagtgggaagctccagagtcgaacaaaatggtagcagggatggaatgaatgaggaacgtaccaacgatgacgtctggagttgtcagcacgtcctcggccatcacgtggttcacacgaccccgtatgacatccttaccaccgtggttggagcggggaggcgcttggccttgctggcacctcggctttgggcatttatccgcaaagtgcccaggctcgaagcagttgaagcacagacactgctgaccttgaacgtccctgcggccttgaccaggctgcacggctggcgtaggaggacggggcgcacgagtcccttgctgactctgctgttgctgcggctgtgggacgcgcaccacgaattgaggtcggggcgcggagcgaggttgctgctgctgttgctgctgcgaggaggatctccctggatagggattggtgtagcggtgtagcggaccttttggttagccccctgttggttgcggaaattcgccaagcgacgcttgtgcgactccagttccttgtgcttggcttccaagcggatgctcttgtccaccagacgttggaaatccagatagtccccggagaccagacgcacggacagctcagggtccattcctgccaagaacttctcttgcttctcctcatcttcacgaacatcctccagggcgtaccgggccaggttgttaaactcatgcaaatactccatcacggagcggttgccttgcttcaactctcggaattcccttttcttaagggccatgactccggcgggcacatgggttctccggaaagcggcggtgaagcgggcccaagtaataggctgcccctctggctgcatagcctggaaatggtcccaccatagagatgcgggcccctgcagttggtgggcggcgaagatgacttactcctcatcgctacactgcacggtgtctaactttttccccacggcatgcaaccaatccaacgcgtccacggggttattggagctagagaaggtaggtggacggatgcggaggaactcggcgagtttagagtgttgtgggggtggtggtggagcattatgttgtggcggattttggatgtggtggaggaaagcagccatcatgttggcctgctaggcgaggatttgggtgaggatggagttggtgtctggtggtggtggtggaggcgggggaggaggtggaggtgggctgccatggttgttgtggttgctgccttcggggtgactgccttcaccggtagcagcacttctcctggttgtcaccatctgaaaaccccacacagaaccagcaaacagagagagctgacaattaaaactaaccacccacgactaccataattcttgaatttattactgctattaaattggttcattaaagttcaagttgcttaagcaaataaaataaagacaagctccgacacagttataccacacaccggcataaccatgccccatacgactctagcagaaaaacaaacgagaagaacacacacgcaagcctactaactgctcgtctactactgcgacgggccagggcggaaggtgagcagcagcacatcctccgtgctgccaacgccggaggctccatcctcctgaggaaccacgggcgcgggctcagcacgaggggtctcgacgaagcaggtccacgccagggactgacgaacaagctcgggcctggaggtactcttgcgggcggtgatcttcaggctgcggcagacgcggcgacgcttggggcgacagacctctccctgggcgatcttgagctgacgcagctgcgcgtccactgcgtctaggtccttcttcagctgcagattctcctgacgcagctccaggatcttcatgttgttctcgaccaacccacgacgcaccatctgatggaagtcgatatgggccgcgtcgtacgcctccaccatgcgcgccaggtgcatgatggtagcgtcatcctccgagctagcatcccggaaggtggcgtagtcgcgggctcctccgcggcaagggtggtagcggtagggcgagtgctgcaactcgttcgggtagcactggtggagagtgccgatggcgaggagtgcggcgttctggcaagcggcagagaaggaatctccacccacggtgactaccaacgaagtcctctcgggtgagccagtgaggatcactgcagtaatctcccaagcagcgtggggctctgcatcgtcaccctcctgctccgggagccgcttgccctggtagtccactccatgcggataccccaggacaacgcacatgccccgcagctccaaaacgaagccagtcaggtccagaccacgacggttgatgctgccggccatctacaaacaaaagagaaaagcaacattttaaagatcagattttgacgataaatgaagcagcaggacagagagagactaaaggattttcacaaataagaaaggatttttattttgaaaatattgctaaggcttgggatctacggctcgtcctagggtcaagggggctctgataccaacttgtcacgaccggaaataacccaacgggcgttccttacgtgcgtgcattattccttgtcccaggaggcaaggtacaccaaaagttgatacagttcagagtttaacaagcggaagcgtaaatagttaatttattacatggccggcgaaggcccagcacacacaaagacaaacgggaaacagcggaagactagggcgacgaccacaggcgcttgacggcaggcgcgagctagacaccaaagccttcatcatccaggggctcctcttctgggtttggcaaaaattgagcaagactgagtacaaccaccgtactcaacaagacacacccacaagtgcaggataaatgcaagggagtacaagggggttataatatagagggttagggtttgcagcaaacagcattaaaagacacttagttgctcaaagctattttgtaaatacgatcctagagctatacaagattattaaacaaggccgtgaacccacacgaacctgccttaacccaaggcctacgataattcagaccgaactagcaacccgaccctgggtcccagctcgtcccaagccaacccaggccaaccattccacattttagttgttaagcaggttttaagaattacaacactaacttgggtacattgctcggcttgcccataaccgagggcgcggctattcgaatagattatactctgatcagaggtgtacatctttacccacaagacacctcttcctcacgtgtaaccacgtgccatataccaccatggtatacggacggaagacatgacatagtttccaacccatcctagccatagacaagagtactgacccaaccccacctacggccgaaacctccgggacaggtaggcaggactaagcccctagcagcaggacaccggccctgtgccatgacatctcgactaccaggccgcagctcgtgtagccttcatttgccctagagatgtccatcgacccccgacttcgtccatctccatccgtgtacttttgtttataaccagactgagccacaaactaagccttacccactagacatgtggaagtacggtagtgctttgcaacagaggcccgaagaccggtccttatatggccgaggtgctactatcaaaaccatgcaccccgagcccagcctaaaaccattttgaggattttgaatagagggggaggtgtgcatccgattccacaataatccaacaattccatagtgtccaggtgataagagtattcccaaagtctagagttgtaaaccacctaatgttacctaattaaccagcgaagcatctaactaaaatcatactagtggtaccttgagtagagtgtccactagttggggttttgtttattctagggtgaacaaggaaataataacaataacaataataaggtcataacaaaggtacataggcatggctagataaaacagtgataacgcgggaatttaaataaagcgataatgcaaaaatttaaatcaaaataattttataaactgggattcaatatgttcaaggatgatgtgacttgccttgctcgctttcccaaacgtcggcttcaacttccacgaagagcggatcttccgaagctgcagcgtctacacgaccaacggaaaagaaaaggcttttactctaataaactccatataacaagctggaacaaagcacaaaaatgggttcttgacttcttaaggaaaaattagagacttgaacggtccaattccgagttcaaatggccaagttatggtcatttgaagtttatatgctctttaaatgaatatttgcgaatttcttcatttaaattttaatttta

SEQ ID NO: 23910 - DNA, 2592 bp, Oryza sativa
cggacggaggaggtgcggggagggtttaaatagagcccggtcgagagagggtggccggggaagggaggaaaacggcgcgggaggtccggccgccatcaatggcgccggcgagatttgcgggggcaaatccgcaggtcttgaacgcgagagagagagggaaaaatggggggaaagggagaggggatcacggggagtgatttccccctctttattgcacgcggagacggcgggaggcggcgggattcacggcggcgacggcgctagggcgcgggcgaggcagcgggagcggcgggaggaaggggatgacgggtgggccccacccgtcagcgatggtggcgggcgggcccgcccgtaagcggcgcgcgcgcggggagaggccggatgggccgcagggagaggagagggagggggagggagatgagccgagccggcccaagagggagagggagggaaaggggactttttagagtttttctctttataaaatcattttaactttgtttatttcttaataattattatttgtgctctgaaaattccactaaaatttatttacgcattttaggcttttaggaaatatacaaaaatcccccaagccttatttgacttttaactttgcaccttttaattgttggaggctttcacacggattttaattattctaagcataatttagaggatgtattttagagtcgttttgggacgtgacaatctcgaccccgagattcggaagaactggcgaagagatcgggatgggctgtcttcaactcgtcctcacgttcccaagtagcttcttcctcggcgtggttgctccattgaaccttgcaaaaacggattacccagttcctggtcctgcgctccatgctgtccagaatcttcaccggcttctctacataggtcaagtcttcgcgaacttcaatttgctctgaatcggcctgctcggacggcactcgaagacatttcttgagttgcgacacatggaacacatcatgcacattgcccatggatgcgggcagcttcaactggtaagctacttctccacgtcgagcaatgatgcggaaaggacccacgaaccaaggtgcgagcttcccttttgtctgaaacctgtgtactcctcgcaatggcgtgacccgaaggtacacaaaatcgtccactacgaattccaggttacggcgtcagttatctgcataactcttctgccgggactgtgccacctttagattatcccgaatggttctgactttagcttcagcttctctcaggatatcggtccagaacacttggctttccccgacttggtcccacaacagtggtgtccggcatttgcggccatacaacgcttcatagggtgccatttgtatgctggcttggtagctgttattgtaggagaactcggcataggggagactcttatcccaggtcttcccaaaatctaggacacatgcgcgaagcatatcttcgaggatctggttcagacgctcggtctgtccaccggtttgcgggtgatacgcggtgctgaaatttaatcgggtatccaactcttcttggagtttcttccagaaatgagaggtgaattgacttcccctatcagatacaattttcttgggaacgccatgaagacttacgatcctagcgaagtagagttcagctagtttgttccctccataggtggtcttcacaggaataaaccgagctaccttggttagtcgatccacgactacccatatagaatcatatcctccctgggtttttggaagtccggtgataaaatccatcccaatttcatcccatttccattctggtacttgtagaggttggagaagtccggccggtcgttggtgctctgccttgacacgctggcacacatcacaaagggccacgaactctgcaatttcccgcttcatactaacccaccagtatttctctttcaagtccaagtacatcttcgtgctgccaggatggatggaatagggactttcgtgagcttcctgaagtatcagctgtttaagttccttgtcgtccggaacacatacacgatttccattccatagggtttcatgttcatcttctgtgaaaccagcggctttaccctgtttcatattcttgaggatcccatgcatatctggatcattcttcttagcctcgcggatttgatcgagcaaggtaggcttggcttcaagtgtagccaagaatccatggctaacgatgctttggttcagggcttccaactgttgattaagctccggtggaatgccacggacgccaagagtgttgcaacggctttttcgactcagcgcgtctgcgaccacattggccttaccagggtgatagtggattcccacatcataatccttgatgagctctaaccatcttctccgccgaagattcatcgagaacttctccaaaatcgcctaaaacgacccaaaacgaccctaaaatatatcctttaaattatgcctagaataattaaaatccgtgtgaaagcctccaaaaatgtgcaaataaattttagtggaattttcagagcacaaataataattgttaagaaataaacaaagttaaaaaggttttataaaaagaaaaaaccctaaa

SEQ ID NO: 23911 - DNA, 34851 bp, Oryza sativa
ccgcaccggttaccttcctccccggccgccctctcccccttccaaccctatataaaccctccccgcgcctccctcgcccttttccgccccttgccgcaccgtctccccgccggaatcgagctcgcgccgtcgccctctctctcctccgtcaccgacgaccttcggccggctctctccgctcgccgggaccgtctcccgccccggcgtcgccgcctccggctttgccgcaccaccgtcgaccccgtccaccccctcgccgagctcgccgaccgccagaacgccgccgaccccgtcgacccgagccacgtcgccgccttcctctgctccggtcgccttttacgtcgtcgctgtcgacctagggtgagccgtgaaccgctgcctcttttcccccttcccttcccctctctcggccgccgctccgccgtgcctatggccgccgccggcgaccataggggcgcgggcgcgccgcctcccaccggccgcgccgacgtggctgccttcgggcgcgccgagtggctgccgcgtggggcccggccgtcagctgcccgcgccctcgggtgcggctgacgcgtggggcccacggtgccggccggagtgagcccgggtgcaccctgtccaccgtggaccgtgaggctgctgggtgggccccactcccgtggacccggtccgcgcgccctcccccgtcggctgacgcaataaatcctttttttaaaattaaaatttaaataaagaaattcgcaaatattcacttaaagagcatataaacttcaaatggccataacttggccatttgaactcggaattggaccgttcaagtctctaatttttcctcaagaagtcaagaacccatttttgtgctttgttcctgcttgttatatggagtttattagagtaaaagcctttttcctttccgttagtcgtgtagacgctgcagcttcggaagatccgctcttcgtggaggttgaagccgacgtttgggaaagcgagcaaggcaagtcacatcatccttgaacatattgaatcccagtttataaaattattttgatttaaattaatgcattatcgctttatttaaattcccgcgttatcactgttttatttagccatacctatttatcattgttatgaccttattattattgctattgttattattaccttgttcaccctagaataaacaaaaccccaactagtgggtaccctatgcatggtaccactagtatgaatttaggtagatgcttcgctggttaattaggcaacattaggtggttttacaactctagactttgggaatattcatatcacatggacattggaatggttggattattgtggaattggattcacacctccccctctattcaaaaccctcaaaatggttttaggctgggctcggggtgcatggttttgatagtagcacctcggccacataaggaccggtcttcgggcctctgttgcaaagcactaccgtacttccacatgtctagtgggtaaggcttagtttgtggctcagtctagttataaacaaaagtacacggatgcagatggacgaagttaggggtcgatggacatctctagggcaaatgaaggctacacgagctgcggcccggtagtcgagatatcatggcacggggctggtgtcctgctgctaggggctcagtcctgcctacctgtcccggaggttccggccgtaggtggggttgggtcggtactcttgtctatggctaggatgggttggaaactatgtcatgtcttccgtctgtatgccgtggtggtatgtggcatgtggttacacgtgaggaagacatgtcttgtgggtaaagatgtacacctctgatcagagtaaaacctattcaaatagccgcgccctcggttatgggcaagcctagcaatgtacccaagttagtgttttaattcttaaaacctgcttaacaactaaaatgtggaatggttggcctgggttggcttgggacgagctaggacccagggtcgggttgccagttcggtctgaatcatcgtaggccttgggttaaggcaggttcgtgtgggttcacggccttgattaataatcttgtatagctctaggatcatcttcataaaatagcttttggcaactaagtgacttttaaatgctgtttactgcaaaacttaacccctatgttataactcccttgtactcccttgcatttattctacacttgtgggtgtgtcttgttgagtacggtggttgtactcagtcttgctcaatttttcgcaaacccagaagaggagttcctagaagatgaaggctttggtgtctaactcgtgcctgccgtcaagcgcctgtggtcgtcgccctagtcttccgctgtttttcgtttgtcttcttgtgtgctgggccttcgctgcccatgtaataaattatctatatacgcttccgcttgttaaactctgaattgtatcaacttttggtgtaccttgcctcctgggacaaggaataatacacgcacgtaaggaacgcccgttgggttatttccagtcgtgacagagaacaacctgtcggagatccgtggctcgttacgggtcacctacaccagcctacaccagctcgctgggaaatgtggtgttacgaccaccatcccggtgaaccccgacaagttctcgctgatgacttcactcgcagaactggccacggcgatggaggcgataccctccaagcatgcggccatgatcggggaggagacgtccaacgggatttacaccggggcatgtcacgtcctcgcgtgtgtgaggttagcgcaccctgaacttgatcttcagtggatcttggatcagggagcgactaacgacgcacgtaagggcgtgatggaggaagtcggtgatctgggagagtctgttctcccactttttgaagagtaagactttagttcccttgtactctttaatcagtcatgctttgtaaaacttttgttggcttcaactgcctttgcgtgcgcaatcatcaccttcattttctttagcattttaatcccaagtactttgttgtcgtttgtagagatgtcgatgtcgaggatgtccagcagcgcgggcagcttgagttgccggtgatcgttccgacgcttgcgtttgaaccacgtgtgtcgcaggacgatgtagatcaaaatttgcccgcggacacgggtatggtgacgacttccttaggttggtcatctctgtttccatctcctttacccttccgtttggattgacttgatttgctgtgttctcggaagagaagagcggcttgatttagtcgttttcacgctgagcagatctcgagagtgcacctgctgaccaagatcatcgcatccaatattggaagacgaaatttgaggtagcggaactcgagaggactgtgctggaagtaaagaaggagctggctgtggaaacactccgaggtcgtgaggtgaggttcaactcgtatctgaagagttgctgcacgtccatgacaagagtctgtagggagctccgagtaccccgtggggatcccgaggagtcggcggccggatacatctcgtggttgaatggggcctgcacccagctcgaaggcatcgacaagcgtattgacgaggctctgaagcaggagtgccgtcgatcgagccgatatgccggagggcatgtattggcttgcatacgagatcatcgcccgcaactgcacctcgagttcctccacgaagggttttctcgttctcagagaactccggtggagatagatcacctggcgaagtcgatggcgccgctggcagagaaggtcttctagtctatggactggcgttggccttcctggtagtctctgtaccctgtgacaaatatcttagggaaaagtgtaatatagttttggatgtttacgggattgtaagcagtacttgtgaaatagaaaagggatctatctaactaagcttccttactctagatgtagtgtgtaagagtgtcttctcacttcacgacgtcgatcagtcttttaagtcatacactctccctagcccccagccttgtcatcggagaatacttctcggaagataaggctcttggacctttgacctgccttggttttacaagcactgatcctagcccccagccgtgaagttggaaagttaatttccgattacacggcttggttaatacgcacggcaagaactcttacacgaccagatcttacatggtctttcgtctctacaggatccgacaaggccttatcggctctaggcgtccccagccgaagatcccttaggtttttcggaggccttgtcaagacggcgtaaagggacaagaggataggtttcaatgctaaatgtcatctgggtaagggatcatcgggaaggaacactttggttgtaatccgtacctgaaaataggctttattgaagctatgagatgtcttacaagtatggatacgattgacttatacatagaatttacgtaattgatcaatgttccaggaatttgccaactcgcgaccatcgctgtctgcaattttgaatgcgcctggccgcaagacttgtgtgatcgtgtatggtccttcctatttgggtgagagcttgtttcgccctgcttggctttgaacccgtcagaggacgtaatcaccgatcgaaagcgtgcgtgctcggatgcgcttctcatggtaacggcgaagggcctgttggtagctggctactcggacggcaactcattcgcgatgttcctcgagtagattcacatcgtcgttccgctgctcctcctgaccctcatcggaatactaattctgtactcgtgtactttgatgtcgtagctcggtggggagcatggcctctgagccgtacacgaggaagaagggtatttccttgttagacgttgtcggtgtggtacgcactgcccatagtactaatggaagttcttcgacccacttcttgtcatgtgacaagagcctatcatagacgcgggtcttgattccttgtagtactatgccgtttgccctctcgacctgtccgttgctctgagagtgagaaaccgaggcgaagcagatcttgactcccagcccgatacagtaatcctggaagtcggtgctaatgaactgggagccgttgtcggttatgatgcgatgcggcagtccatatctgcagaatatccctttgatgaatttgatggcgttgtcggccttgatttcccccgtgggtgtcgcttcgatccacttagtgaatttatcgatcgccacgaataggaacctgtagccgccctgtcctcatgggaatggtccgagtatgtcgagcccccaacacgagaacggccaagtaagagggatagtctggagcacttgcgctggtagctttgtgtgtttactgtgaaattgacaggcttcacatcgctgaaccatgtcgcaagcgcctttgagggtggttgaccataaaaacccttgtcgaaaggcttttccgaccaatgtgcgaccggctgcgtgtgacccacagatcccttcatgtatgtcgaggaggagatgtctaccgtcattggatgagatgcatttgagaagtaccccatttggcactttcttgtatagatcgttgccgatcatacagtagaattttgctttacgggttattttctcggcttctgcgtcgtcctcgggcaactcttcgctacctatgaatttaatcagtggggtgcgccagtcgtctatggtctcgatatcaacaatggcgcgctctgcctctgtagcccccgagctgatgtcgggggcgactgggctatcttcgctgcttgcctctttgactgatggcattgtctggacgtccagaaaagttccgggttcaagtagttctcgtctggacgcacgccgtgctatatcatctggctcgatgttgtccttgtggtatacgtgtcggacctcgatcccatcgaaccttttttccaccttcctgacctctgcaagatacttggataactcgggattagagcaattgtaatctttgtgcacctggttcgcgactagttcggaatcccctttcacgaccagtcgcttaactccgagtgcagctgcggctcttatctcggcgagtagtccttcgtactcggctgtgttattggttgccctgaagttgaggtgaattgcatgcttgaattgatctcccgaaggagatgtcaagacgaatcctgcccttgctccttggctgttgagtgcgctgtcgaacgccattgtccacgtttcgttgtcgatttggttgtctaacctgttatcaggtatagtccaatcggctacgaagtcggcgagtacctgggacttgatgattgttcgtggcacaaagtggacatcaaactggcttagctcgactacccattttgcaatgcggccgaccacgtctttgtttctcacgacttcaccgagagggaaggaggagacaactgtgaccctgtgggcttggatgtagtggcgtaactttcgtgatgtcatgattaccacgtagagcagtttttggatctgtggatatattgtctttgcgtcgtggagagcttcgttgacgtagtagactggctgttgcaccttctctctctcgacaacgatgacagtgctaacggaatatggtgtggcggcgatataaagaaataattcttcattaggttggggagcgacaagtacagggggattcgataggtagcgcttgagtgcaatgaatgcctcttcggcttcctatgtccatacaaatttgtcttgcttcttcagcagagcgaagaaaggttgtcctcgctctcccatcctagcaacgaacctgcttagtgccgccatgcatccagttagcttctgtacttgcatgagtcttgtgggcgacttcatgttctcgattgccttgatcttctcgggatttgcttttattcctcttccagatacgaggaaaccgagcagcttgcccgatggtactccgaacgtgcacttctctgggttgagcattaggcgatatcgtcggaggttgtcgaacgtttcctgcagatcgtcaatcaatgagtcgcttgtcttggtcttgacaacaatgtcatcgacgtaggcctcgacattgtttccaagttggtcgctaagtgcaccttggactgtgcactggaaagtgtttcctgcggttatctgtccaaacggcatcttaacgtagcagaataccccgaacggcgtgatgaatgttgtcttctcctcgtcctctttcgccttgctgatttggtggtagccggagtaagcgtcgagaaagctcaacaactcacacccggctgttgagtccaccaattggtctattcgaggaagagggaagtgatccttgggacacgccttgttgaggtcggtgaaatcgacgcacgttctccatttcccgttggccttccgcaccatgactggattggctagccactctggatggagtacctctctgatgaaaccagctttgagaagtttgtcgagctcttctcgtatggcttgttttcgatctggtgcaaatctccacagtttttgctttactggcttggcgtcgggtcgcaccatgagtttgtgctcaatcacctccctggggacccccggtatgtcggacagctgccaagcgaacacatccgcattgtcgcggaggaaggtgatgagcgcgagttcttatttctcgcctagtgatgccccgatcttgacggtcttgtcggggttggcactgaagagtggaacgatcttgattgcgccgtccggttttggtgtcttgtttgttttgctcactttcttgggtggctcagctgtggcgggtaggctgggcgtgtgctcgaccatgtcgaggctccgcttgtcgcattgtactgccagctttgtgtttccttgaatagtgattgttcccttcggtcctggcatcttgagcactataggtgaaaacggtatggaaacggatggaaatcatctttatcgttttcattttcatatttttttcggaatcggaatcagaaaccccggaaggtgatttgctccgttcggaagttatttgcttggccgaaagtcacaggcaacgtaattttgcccaatggtttggacgatgactggggagtgattccatggaagggttgatcggtgggtgtcaactcgcttcgtgggatccccatcgcatccaaagtgctggcgaagagaaggttgattgagctgccaccgtcgatcagaactcgcgcaactttgatattccgaatactgggttcgaccaagatcggatatcgtcctgggataacggcagtcttggggtggtcttcttccgagaattctatcttctgttcggaccacttcatcttgggtgcagccccctgccacgtcgaacagacttcacgttccactttcttgtattctcgctttgaggagtatgccgtggaacctccgaagatgtgcgagacatggagatcggagtctaggtatgttgagtccgattcctgagtagccgcctcagcgtccttctcaaccacacgtactcgcttgcctttttccgatgccatgtgctttgcgagcgactttttgaagacgaggcaatcttccaaagaatgtctgtccgacttgtgtataaggcaccatgcattcttcgcgtcgctaccttgtgggtctgggcgtttggcagggtcggcgtattctgctgcgagaacttacgcttgagctttccttttcccactcttacaatttttctttttgcttgactcaggtgcgtccttcgctggtttcttctctcctccggtcttcggcttgtcgttcttgcgtctcagtacgtcgtccgcgtgggcgcatcgatcgacaatctcgaataatctccgagtagtcgtgatgcgcctcgttgccaactcttgggtagtatagcgatctctgacactggacttgaaagcgcggattacagaagcgtcggtgatttcagggattgtatttctgcactcattaaagcgccgaacataatccctcaaggattcacccgggttctgtgtcaacacatgtaggtcgtcttcgatcgcgtggcgcttgtaagttccttggaagttggcgacgaactgctgccacaggtctgcccacgaagaaaacaagtagggcgggagatgcatcagccatgaatgcgcagagcctttcaatgcagttggcaaataattcgccaacacgttgtcatctactccggcagcgtagagtaccgtggagtagacctgtaggaattcttccgggtcggtactcccatcgtacttctctattgctcctggtcggaatctttcaggccatcggacatcacgtagcgaacgactgaaagctctacaccaagcgttgggggcggtgggttgtcggcgatcatacgtccttcgcggatgtctatctgatgatgaggatgaggaagatgatgacgatgatgatgggtcacttagttccggtgtacgattctgaggacatcggccgggttctcgagaatcccgtcgtcgccccccgttgttgtcccggcgccgatctccatcgtcgtcgtcattatggcggcgtccttgacaagtatcgtccggcacccgccgttcgtgatcgtcgtgatcgtggtggttgcggcggttatcgcggtctcggtcttcgctcgtgtggcttccttgttcttcgttatcttgacgtcacgaagagacgcgatgttgggaacggttcccattgtgtcgtgcgcgtcgcgcctctcggcagccattcaggtgatcgcggagatcaccggtgccgtgaggtggaggggtggctcgatgaggcgattcctgctgttcagggttttcgccattagcaccgccaaattgtggctgttccaggtgcgctgcagcggcggcctcttcgaacgcgttgctgaggttggtcactgattcccgtagccgttctgtccagcgtgcgagattgtcattcagaacggggtcatagggggtttccctcagtatcactgacggtccagcattagcgccatcagggctgatgtgctgatgtgcagtactgtcagggcggtgggttgtccagtgatagcgccatcagctctacaaccagaacggccctgatgtgctgatgtgttgtgcgggacagaacgactgaaagctctacacccagcgttgcctttcacttgaatttctgcttctgcattagcgcgcgctgacgtgccgatcccgtcgatagccaacacctcgcgtggcgtacttgttgacgatgagccatagtcttcgagcaaatgtagaactgatggctcgtgagggtcgatgtagattaccccaacgaatcgatccgagatcagtgtcgctccttgttccttgtccgcatccctaagagagatacgtgactgatggaccttaggaagcggcatcttcatggcgttgagaaagaccttgtagctttagagttcgtgattctttgtcttgtgaataggacaatagatatcacgagttggagaaatacgttgaattccacgctctttgcaggcacgaatttcggtgtgtacgttgagaaaaacccagcaagcttgcaaggtgtgttttctggttttgtggataggacaccaggaccttgtcgcctcggaagttatcctcgtcggctcatgattcttgtcgaaaagacaaggtttggccgcactaagatccttctcaggctcggatgtcgtcgacgttccgttctccgcttcggcgggaggatccttcgacatggagtcgtcttgggttgtagccaccgtgttctcgcttccggtcattgatggaccagctgagatcggcaccgtggtgtaaaccgggaagacgatttcgctgacttgagtccacaccagcattgtcgaagtaggaactccttggttgaggttggtgttagcgctgttgtcgacgaaactggatgacatattagtagatccttgagcaccaagtccccctacctggcgcgccactgttgacgggggatacccgtagaccggatatagagggtattggggtacgctggtacgaggatctacgtaatacgacatcaagcacacaaagagcacagattatactggttcaggccccttgataggtattagccctaatccagttgatatgggattatataatggaaatcacaagttacaaagggaacaatggaactcgatgataccggcgagatcgtaatcgagctggttcaactaaatctcctggcgacttggctcctgtagactccgacttcataggctgtggtggatgtgttggctatgagattcgatgccttaggtccttcctagggggtcccttttatatcgcaggtcaggcggtttccaagtagaactcgaagatatcggaccctgcatgatacagtgacgacccagtcctgtccgagtaggactccttccatctgtgaactccgtgatgaatttccttaatgtatgcagaaaatgtccgtatacacgcaggtataccatatcgatatgtgacgtataccgaaaggtaaagggtataccttacccgtaaccctaacagtttatatttataccccgagtacaaaataagttcattatggacacgactcaaaccatacgaacaagacctttcacggccgtctcttgacaaaactaacaaaactgtcgtaactaacctaattaatggatacaattggcttcaatgagccttatctctatttggcaatatcaattattccaaactgggcttatgctaaacccaaactgtgctgtatcggctgaatcggccgttgactgtcctggtcaatccgactcttggcttttgctttcagccgatacagtttccatccgacgcgcaatttgatctcaaatccttcatgcttggtcataaaatactgtaccgatttattcccttctatctgaaccccactgccagattttaccgttaacacattgatattgaactttgatttaattgaataatgaactaatgtgtattttacactaaaaatggtgtatgagactaatacgcttaaatctgtcgctgttctttttacgctgtagtccaacaatactctcaaatgcacggaggcacgcagtcaatcggttcaggacatgaatgtatgtggaagctggctcgacctgcatagtgcaagcattggcatggctcatgaccataggcccaagttgctagctgaggggctactcccgttggacccgtatacatgtacgcgagatatctaaatacaggaacagcagacgctcgcgataggagaagagtcacgttaggagcgccctaccccgaatgctgcatggacatgtgtcagtaaaacgaagggacagcaaatgaaccaatcagctgctagcacacccgctagctttaactcccttaaccagtgaacaaatataaacaaatataattcgtatccctaaaccataacaccggatatctcgacccctatttattaaaacctgtacaattaactccctcaatggttttggagagcggtttcgctgacgcggcatctatgtgttagtgttgacctagtctgtagagttaacatgacacttaggtggcattagaattaacaacatatatgtgagacccatttgtcatctaaaaaattatgaggcccacatatcatcctctctctttattcttcctccctctctctctccttccttctctatctcatgcactgttagccggtgaacggaatcccggcgtcctcgatctctctgcaactctcaaactaaaacactcaacaatgcctctgaacttgaacacacatgaattggcgctgcaacaccttcagcagcttttctgggttatattcatctccttttatttggaaacaacgctagtaaatcggcagtagtggaccatcatgcgcacgacacgatccgcaccgacgtgcgccatcccacacgtcagatcgtgccgcgcgagactcagactccacgacttcgacgtgaactcgcacgcctcaagtcttacacacgacgtagctgctatagctagccggcccacaagcaacacaaagaaatgaacgacacactacctgacgaggaacagtgaaaacagaaaaacaaaaacacctaaaaaaacaatgccatagacggcaagattgacaacatgcaccccctctctctcccccatgttttctcccaatttcaacggagaggaagtgcaacagcgatgacgaggagtggtggctccccagcgccatctggaacctgtacgagcacaacagcggagatgaggagtggtgactgaggcggttcctcatgcattagcgctatccagcgatggcgggagctcagcagcgacgcgactggtgtgcctccccctcatcagctccgtccccctgcgtcagcgccatccgacggcggctgaagcatagcagcggtgacgagaagtggtggctgttggaaatttggtcataattcggcatattttaatccaaaatattaagacaataaacatgacatacacaatgagaagcgatctagtgataaggctaaacataaacataagcatgcttaaggtaaaataagcatagacatcgttgacattcacataggattgaaatcctatggataacattgtgaacatgtaaataacaagaagaaaatcaaataaagtacatggtgcagaagatgttgaggcattcgtattgcctccattgatattgtctcctccgttctctccagtagaagccatggtgaagcagaagtagaggaagatgcaacgttgtcgtcgaagaacgaagaacaggagcagtcacgcttgaagcgctacccaaaaacttgatcgctcgcctacccgtgcaagttctcaagcggacggagttccggaggcacctgctcgtcccgtacacctgtgcgcgcaggtgaacagaaccggggaaggattctgcagctcaagaatagaggaggaggaactcaaagtgcaagagtcagcaagaacttcataagtccttctggtcgctgcggagtatatatatgcaagcgcgagagtaacgttcggagtcatcagccgcggtgtttaatttcgtaaccgacgcgctcgttaatacggaatcaattcacggcatttaattccgtaaccgacggaatcaattcacgacgtttaattccgtaaccgacgcgttcattgatacgaaatcaattctccgtgtttattaccgtctgttacaaaacgagagagcgcagcagcagctgtttgccttgcctcgcctcgccccgcctggttgtccatgcaccatctcaaccggtcaacagagactctccactagttccatatttaagttgagacctcttcacttagatttccaaggtggtattattacccatagcacttaatgtgggccaatggaatttattaggatttaattagacctagcccattaatctaacaatccccaccaaatttcgtggctcataggaaatgctctcgattctgatcctgtttgttataccagtgtttcggtggagactgttaagttgaacttccacctaggaaaagagctacaccagatcacaactgaacaatggactatgccttgaattgtcagtcttgtgcgattcaggtttcactcatacccttaactggtactaggctgttgtttgcatcccctctgtttggagcatataagtcatactcctggccttttcatgagtatctagagatcacccagatctcatagactgtgactagcagtcggactcatataggtgtgttccttctaagatgttctgtaggataacatctctgctttatgaaaagccactcggatcacattaaggtgtataccatcctaccatacagaatagaagagaagtgcatcatgaagataagctcattttagggtctcttctctcagttacccaatagtttgtttcgccatccaaattcacgggatctccgatcacaatggacaggtttccaccattgtgcaactctaagtgggtctcaagcccatctccctcgatgcaccgtctatcacattacgtggtagccccttggtaaactgatctgccagatttttagccgtctggacatagtccaatgctatcactccaaagtttttctgctttctaacagacttcagtcttcttttaacatgcctagatgacttcatgttctccttcgaactattcactttaataatcactgtttgattatcatagttcatcaggattgttggtactggtttttcaaccaccggcaagtccatcaggagctcacgaagccattcggcctcaactgtagcagtatctaaagctgtgagttctgcttccattgttgacctcgttaagatggtctgcttgcaagacttccaggaaacagcgccccctccaagtgtgaacacatacccacttgtggcctttatctcatcaatatcaaatatccagtttgaatcactatagccctccagcacttttgggtacctggcgtagtgaattccatagctcattgtcccttttagatagcgcattactctttcaagagcatgccaatgatcatctcccggatttgaaacaaaccggctcaacttgctcagagcaaatgagatgtcaggcctcgttgcactagctaagtacatcaatgaaccaatgatctaggagtatctcaattgatcccttgctattcttcggtttttccttaatagcacactgggatcataagaactaggagctgccttacagtcactataaccaaagcgactcaggaccttgtccacatagtgagattgcacaagtgtaatcccaccctcatctcctctcagcagtttaatgttaagaataacatcagctactcccaaatcattcatttcaaagcgtttggacagaaagtccttgatctcctcaatcacattgagactggtcccaaagatcaatatgtcatcgacatataagcacaagatcactccctctcccccaccatagtgatagtacacacatttgtcagcttcgttcacaacaaagccagcagatgtaagtgtattgtcaaacttctcatgccattgcttaggtgcttgtttgacaccatataaggacttcaatagcttgcacaccattccctcttgaccttctaatacatacccatctggttgatccatatagatctcctcctccaactctccattgaggaaagctgtcttaacatccatctgatggacgagtagaccatgagaggctgccagagcgagtagtactcgaatcgtggtcaagcgagcaaccggtgaataagtgtcgaaaaagtcctcgccttctttttgggtataacccttggccacaagccttgccttttacttttcaattgtaccatcaggcctaagctttttcttgaaaacacatttacatcctataggcttgcacccatttggacgctcgatgacttcccaagtaccattagacataattgagtccatctcactgcgtaccgcttccttccaataatcagcgtccggagatgaatatgcctcttcaaatggttcttggagtatcatccacaagatatacaatgtagtcatctccaaaagactttgcagtcctttgtctcttactctttcgagttgctacaatgttatcctcctcaggattttcctcaggcgtttgatcaatgtgttctatcggcgcaaagtgcttaggggataaaataggttcttgactagaagtgctaggtgtatttttcataggaaattcattctcaaaaaatgtggcatctctggactcagtaattgtaccaacacgcatgtcgggtactccagaatttactattaagaacctatattccacactgtggatagcataaccaaggaacacacaatctacggtctttggtcgaagtttacgctttttggctatagttacatttaccttggccaaacagccccatgtgcgcaggtgagagagacttaatttcttcctttcccatttctcgaatggtgttacatccttatgcttagtaggaattctattcaggacatgacacgcagtaaatattgcctcaccccaccattccttggaaagtcctgcggtgtctaacatggcattcaccatctcagttagagtgcggttctttctttcggctaccccgtttgactggggtgaatagggaggcgtcctctcatgaataattacatactcttcgtagaaagaaataaactcattagaaaaatactctccacccctatcagacctcaatcatttgattttcctttccagttggttttctacctcagccttatagatctcaaagtaatgtaatacttcatcctttgttttcaataggtacacatagcagaatctagtgcaatcatctatcagtgtcatgaaatatttctttccccctttagtcaacacgccgttcatttcgcacagatcagaatgaacaagttctagtggtgccaaattcctcgcctcagatgccttgtgaggcttgcgaggttgtttcgattgaacacaagtatggcacttagagcctttgactaaagtgaattttggaattaaactcatgttggctaagtgtgtcatacaaccaaaattcacatgacaaagtcgcgaatgccacacattggactcatcatcatcatcgcttacatggttcacaactttattacacatatcatccaaggaaaagcggaataagcctccgctgtcataaccttttccaataaacgtttcatatttagatacgacatatttattggattcaaacacaagtctaaaaccatctctacatagtagagagccgctaactagattcttctttattgaagggccatgctgcacgttcttcagttgcacgatctttcccgaagtaaacttcagatcgaccgtaccaacaccatgaacagccgcaagcgatccgtttcccatcaacaaggaggaacctctcccaacttgataagaagaaaacagggaaatgtccgcacacacatgaatattagcaccagtatcaacccaccaatcaggtgagtgacagacagagagaactgtaggtaaaaatttaccataccccaatgttcctccgccctcactaataaccatgtttgcagacttcttgtccttgcgctcaggacaatccttggcccaatgcccaggcttgccacacacaaagcaatctccttttgcctttcctttgcctttcttcttaaaattggtagtagcctttggtttgacatcaggcttgactttcttgttgttgttgtgagatgcatgagggttcttcttctgcaccaaattggcgctagaacctccctcgatctttttgccctggttgtcctttgccctcgccttctcctcaacacccaaagagacaataagatcagtaacactgaactcttgcctcttgtgttttagagaagtagcaaagtctgtccaagaaggtggcaatttggcaataatgccacccaccacaaacttgtccggcaactcgcagttgttgttctcaagttcctttgccagcatctgaacttcatgagcctgttccactacagaacggtcatcgaccatgttgtagtcatagaactgctccatgacatacagcttgctaccggcgtcggaaaccccgaacttggcctcaagatcatcccacatgtccttccctgaaggcatgtgcaaatacacgtccacaatactgtcggcgagcacactgatcaatgctccacggaacaagctatccgcagcctcgaacttagcctcctcctcaggggagagaggcggttcactcggtttgccccgtgaaacaaagaaacaatgcatcgccgtcaaccacaaaaagtgtgtgtgctttccatcttttctaatttgaaccatcgaaagcatgtggttttagtgatgcagcaaagccaactaccgaaaaagacctatcaagtttttggattgttggaaatttggtcataattcggcatattttaatccaaaatattaagacaataaacatgacatacacaatgagaaacgatctagtgataaggctaaacataaacataagcatgcttaaggtaaaataagcatagacatcgttgacattcacataggattgaaatcctatggataacattgtgaacatgtaaataacaagaagaaaatcaaataaagtttgaatcttatacccagataatggtgcagaagatgttgaggcattcgtattgcctccgttgatgttgtctcctccgttctctaaagtagaagccatggtgaagcagaagtagaggaagatgcaacgttgtcgtcgaagaacgaagaacaggagcagtcgcgcttgaagcgctacccaaaaacttgattgcgcgcctacccgtgcaagttctcaagtggacggagttctggaggcacctgctcgtcccgtacacctgtgtgcgcaggtgaacagaaccgggtaaggattctgcagctacagaggaggaggaactcgaagtgcaagagttgggaagaacttcgtaagtccttctggtcgctgcggagtatatatatgcgagcgcgagagtaacattcggagtcatcaaccgcggtgtttaatttcgtaaccgacgcgctcgttaatacggaatcaattcacgtcgtttaattccgtaaccgatggaatcaattcacgacgtttaattccgtaaccgacgcgttcattgatatgaaatcaattctccgtgtttattaccgtccgttacaaaacgagagagcgcagcagcagctgtctgcctcgcctcgccccgcctagttgtccacgcaccatctcaaccggtcaacagagactctccactagctctgtatttaagttgaacctcttcacttagatttccaaggtggtattattacccatagcatttaatgtgggccaatggaatttattaggatttaattggacctagcccattaatctaacagtggctagagcggctacccttgcatcagcaccgtccagcggtggcgggagctcagcagacgcaactggtgcgcccccccccccccccttctccctcatcagcggcggtcggccagggagatggccgaaggcacgctcgccgtcgcaaaaggcggggtctcatcgtcagggatgcggtgcaggttgggggagctattgggcatgatgattgagcgcgcgggaggagactgagatcctagtggaggagcgcgttgtgagcgacgggtcctccgtctcttcgcaccgcctcgaaggataccgctccacgccgccgctcctcatccccgctccccgctccccgctccccgctacccctcctcatccccgctccccctttcttctttgctgctagacctgcggaacgacggtgaggatgatggcgatgtgcggaggagccattgataacagtggcagaggggctccagcgtcaaggtccccgcactcttcgccaagctttcctctggcttggcatcatgcgcttaacgagaaagcccctgcacagccgtctcctctgccgccgcctcctccgcacatcggtcagaccggtggcgagcaggcgatcagaccaacgggagtaatgcggtcaaaccagcggatatccaatggtgtgaccggtgtaaattcgccaaatccaagggtaacttttattttcactaaatttttttggtttttagtatttctaccgttcaccctcctctgatagatttggttcgtgtactcgatcctagagttgcatcataaactatgggtacatattgcagaagatctgagtggtcaagatttttaaaaggaaggtaaccatcatttaatttgctgcggctgggacggcacaatatttttcttaatcggtgttgattcggttgaatgatatgttattctaatttaaagacaagacacctatataaggtcagtgccgattgaataaacccctcaacccaatcgataaattgattctacgattattgttctgttctttttttctggagtagattaatctatctctctttgccgatttgattgaaaatcggtcgctcgttgtcgaaaaacgcaatggttatcttgttatcaatttgttcctgacaaactgcgtgttgcctatttttaacgcctaacacatatccggcaaagtggagctatatctgaatatgtggaagatttgatggtattatacatcagctgctggcttacaataatgcaccaactctattgtaatttttttaacgaaatttgtggaaaattttagggatgatattagggcagtcgtcgtgattcagaagccacgtgatttagatattgtgcctgtttaggcgagattaagattctgagaaatagctggttggtagctagcttctaagaatctaaaaatgttgggtttcgcagattctgacttctagttcattttcagattctgactttcaaaagctggactgtttggggagcttctaattttgaaagaaactgcagccgccaaaaggtcccccaaataggccaattatttgcccattaaccaaaataaccttatagatatacaaggttctacaatatattattgggtatggcttttctttttttctttcaaaaatacccaaataccatgtatacttatttactctttgtggatacaaatgtcgggtttctgtccattataaaacaaacaattccatgttgtttagataacatattaacattgcggtgagccactgatgttcgatgatctgttacgtagctccattctggatgcagcagttttaattgtatggatggtttacagggagagatcaactgctagaaacatgctgctgctgttgatctgttgttgtaagctgacattagtagatgatccatttattcatgatcaatgccagtctaccaaacacagacatggacatgcttcagaaatatatgtattcttgtgtgtgcgcagctggtatggcacacgtattatcatgctagctgatagaaataagacactaaaagacagagcagggcagttgagcagagttatattcctgttgacagcaacagttaatttatggacggtttggatggaatggaattaggcaaactaagttctttagttaatcaagctagagctagaatgcctaaacaaacacttgcccgaggggaatcagaataagcagcattacaatcttagtttttttttttcttttcaatcacagtatgtgttctctagctctgagctaatattcagacacctgaatattttgttctgtctcccttcatcaattcttctctaatttgtcctaaatatttagctgtcagtctggtagtatctcttcttaaagatgctcgtgcgtatcttgcaattatcatatcgggtcgacgacgagtcggcgactgctgcgcgcctgcgcctacgtataagaagagaatcgaagtgaaaaataggtcattttgcgaaacacaatcagtagttggtagctcagttgatagtgctattaggcagcttctcttgccaactcaattgagactacgacatgagaattagaattgcagagcaggtgaagatgcagaagcagagtacataacgatggcgttaggactcgacgttcagagagtgagctagtcagcacgccattgatttttgtgcagagatcgatggatagacggcggattcggccagatgtggagatcgaatctgtcgccgacgactctgccaattatgtccaggttaaatctctcgactcagctgaagtgcatgcaatttactgttgattagtatgtttaattaatggtgattagttcattaattaagctaattatgtgtgtatatcaattgcatcgtgtagaacatcaggttggtgattgacatcggcgacaggacgatccaggtccctctcaatggccacaccgtcgtgcagaacatcggccgtcaggctgccgcctccgtcgccggtgattcgtcgtcagccggcggcgttagtgagaaagccggtggcggcggcgaggagtggctgcaagaacaggacggcttgctgtgcatgcgcgggtggctgatggcggcggccacgctgttcgccgccatggcgttccaggcggcgctgcagccgccggcgtggatgccgaggccgcgtgactggttcgcggcgctgctcgccgccgacccggcggcggccgccgtcacgagggaccaggccgggaaggcgatgctgtatctgatcgtcagcacctgcaccttcgccacgtcgctcgccgtgctcctgatgctgctcgccgtgggcggcggcggcggctgcgcgtcgaggagggtcaccgcgaggctgatctccaacatgatgacggccgtcgcgctcttcgccgcggcgacgttcgcgctctgcgtcgctgacgactaccggctcatggcgttcgtcggcaccgtcgtcgccgtgtacgccgccgtcacggtcgtcttcgtcaggtgcaaccttgctctaccgtttgggagaggcggcggcggccatggttgttgtagctgggtgccaagaatgtaaaaagaccgataatactgggccggccatgcgtttgattcagccatatattattactatatacacgcgcggcgcaatgcacaataatggagttttgtaccacatgaaaaatttatagtggtagagacccgcattaaacaggacgtggtagtgttgctcccgcggagcttggtgatgtgagcttgtcaccccagctgtggcgggcgggagttggcaggatttggccgatgttgggtggatcgagggtatagataagatatccctggtctcgttgggttgcttagagccctgcgttgtttaacgtcagtgaacttcccagctactttaacgagagaagcccacggccatatcatctggtccaactctcctcttttctttttatgatgctatttttcttttacttttcccttcaaatatcaagtggggtgaagatgatgagaattagaattgcagagcaggtgaggtgaagatgcaggagcagagtacaaaacaatgacgttaatcatgttaggattccacattcagagagtgagctggagcacataattgatttttgtgcagagatcgatggatcgattgattctgtcgccgacgactctgccaattctccaggctaatcaactcagctcaagggctttcaatttactgttgatgaacatgttcaatggtgattaattagttcatcaggctggtgatcgacatcggcgacaggacgatccaggtccctctcaatggccacaccgtcgttcagaacatcggacgtcaggctgccgctgccgtcgccggcggtgtcagtgagaaagccggtagtgctggtggtagcggcgaggagtggctgcaacagcagggcggcttcggcttgttgtgcatgcgcggatggctggatggtggtggtggccacgctgttcgccgccatggcgttccaggcggcgctacagccgccgggtggatgccgaggcccagggactggttagcggtgctgctcgccgtgggcgatggcggcagcggatgcgcgtcgaggagggtcaccgcgaggctgatcaccaacatgatgacggccgtcgcgcagttcgccgcggatacgttcgcgctctgcgccgccgacgactaccgcctaccggctcatggcgttcgtcggcaccgtcgtggccgtgtacgccgccatcaccgtcgtgttcgttcaggtgcaatcttgctatgccgtctcggagaggcgacgccggccatggttgtagctgggattccaagattgtaaacgcgtctatgcaaaaattggctcattggctttgtatccaaaccacacaaggacacattgattctgcaacgaaaattacgatgaggacgaaacataataagaccagatatgataattactgggacgccacagcccatattagtgcacgtgtaacccataagaacaaagtttcgtaccacatggaaaatctacatcggcttaaaccggtataaaaaagaacacgatcgagatgctaccaccgagctcggtggcgtgagcttgtaaccctagctgtagggggcgggagttggcagggtttggccgttgttggggtggccgttgttgggggatcgaggtatatagggagatatttctccccccgggtctcgtgccggatgctagcattctatatctccttgccattgtgttcgggtcggcccttgagccgccgcctaacgaaaatgttctaggtgactccctttctactcacgagagaagccacgaccctatcctgtccaacttctcttttctttttccattgtgttcgggtcggcccttgagccgcctaacgaaaaatgtctaggtgactccctttctactcttgagagaagccacggccctatcatgtccaacttctcttttttttttgaattcatggtacattcttattttcgcacctcttttctttttaaattcatggtgcattcttatttttgcatcctttccaccgacgagatcatccacggattcatggtgcagttcggtgccgagcggattcgagcgatctcgtcctttaggcggagggagcgattgcatcgatgcatgcagccgtcaggcctaagggaagtcaaggtggaatatttttttattgtttcatgttgcgatggattagaattcaaacgtggatccctcttctaattttatttgggtggattagagtctgattccttttagttttgtttttgtgtttgagttgggaaatttggaatcttgagaaggcgctaaccgcgcgaggcagagaaggtgctcaacgacggatgaaaacacattgtgatgatgggaaaaatccaaagttttaagtagggatagatttgattcagactctagaattctggatgatatttgccgcgactggcttttcaatctatctttgatttgtgatttccccaccatacactatcaagagtttgattcgatctctgatctgtcttttttttcctttttgctttagccggcttgcgtgtcgctcgtgtgtggatggagggcgccgctcggtcggatttacgggcaaaatttttgtgtgacaaaaggaaaattgtgaatattttaattagtaaagatatgctgttgttatttattgttgattggtacgataatttctttgtgtgtctatatagacttgatgtgatgccacatcatcaaaaccgatatttgtttgtttgagtcaaaggatgaaattaatgacaatggttttgagagttttgagagttaacagaccaacagtaatcggtttgaatgctaagcatgaaaatgggtaaataaaaaaaatcatatcaacgataaaaagtaacatttttcttataaaggcacccgtaatgttatataaaactaggtagtatacttggtattaagtactgtggaactggtacataacataccgtatagtagcactattaccagaaacaaggagataaattatgtatgtacagtctctcacacaaaaagtaaataaagcaagtggtagttctctgacagaaaaagtaaataaggcaagtgattgttgcttctatgggcctcaacttattggcatcttgcagaagtaagcaatgtggagtgtgtctattcctactacccatgtcgacaatgtacgtaatgtacgttgttgatgccctaagttataaagggtccttttggagagcttcaagttctaaatttaatttcaagagctaagtccaaagttgatttgtaattaatttgtaaaatagcctgaaccctgctctacctttctagtttattttgtaagatctatcatcctagcttgttacgctattcttttttatgctaaaaccgtttagttacacttcagcttcaagagagatggagctaaagctgaaatttcatcaaataggcccaaaggaaagagactcattttacgactcctatcttttagagaagtttggaaaataatgctatatttcaaaattgccctatattcaaaccttaaactaataaaactatttatatctcatttatagagttggcgttcacatagaagttttgcagattttttctgttaaccccaatgaccatgggtaactaccagtattcacgatgctttgtcactatgtatatactgtatcacgcatggtcacacacacatggcacaaacatgtgtgtgacgaataacgactgaccttgtgaagcatgacaagccgcaggtcactcccaaccatccatctcatctggtttttcatagcattttaagcatattatcacataattaagcaaaagattgaggtggatagagagttaatgaagtgagagaaaagatgaggtaactatttctcatgtaagaagctagttctacacataaaccaagaataaaaacaagaggatagcttccttgcaaaaaaaataaaaaagaggatagctgaacaaaatgagacagaagagaggttattggatgggaatttactatgaagaaaccattcattgagtatatagtttcttcatatagtgtttatataacatggcaagaatataaactacttttgatagtttttgacttgggatttgccctcatcaggtccatttggaattccagtacatagtgagcagtgttgggtagtaattaactagttaaggaagagcacaccgcacaccggtactactatttcaagaaaaaaatggagatcccaaaatctttgttcatccgtatcaaaaattagtttttctatatgttttgaaagaccataaaaaagctaagtgaaattaagaagattgctagacggatattcaattttcctttttgtttctttctttgtgtgtgggggtaggggagagagaagagaggataatagatatttttaaatgtcacaccgtgcattggcaaaatatacttacaattactataacttctagggtaggccgccagttcctcccaaaggctaggtacatagcacccctaccgtatggcaccactaccaaatcaattttttggacgagacttcctataggttgcacatggaccataactgctcccacatataaaaatcgctcttcacgggatcgattcaaggcatcgcgggtagccgcttaagagacccgcctgtgaaaatagatttattttcgcaggagcgcctcttaagcgactgcatgtgataatgcattttcgcatgtgggcctcttaaaggcctgcctacaagtatgtctaaccgtccacctcttttccctctcaacatcttcaaacttttccaaggcaccttctccctcacctcctcacttccttatccttaccttctcacgtccgctcctccttttatttctcacctatgggactttttacctttgttatcatatgatcctaatggttcatgctattgtatgattcatgaatcgaaaactaatggatctatttcattttcgttaatgaagttgcttctgcgtcccactgcattttcttccttctactcaggggtggatttaatgtagaaatgatgggggccttggaccccagtcaaaattacactccttaggtgtatccctagtagtatgacctatgggcccccactttaattgggaggaaggaccccagtccccaagttttcgttcctttcatcgcaatcgcgcgtgcgtggagaggtcgaacggtcgctccctttctcttattctctcagattccatcaactagcaaatccgcaaattagggattagggaagggaacaggaagcgatcccaccatcgtctcaccccatccgtcgcacttccccgcatgccacagttcatcttcacccgaatcactgcttcctgccttcctcgaccgcttgtcatcgtcagcgccttagcctcagcggcactgctcgttctctcctctctgcctccctggtacgcactcatctccttgaccctctcctccctttcgtgctgtcaatggttatagtggatggatccataggtctccctcctcatgtgctctatctaattagccttcccaagatttggtaggtgagataatgaacaattttttttattaaaaatccagcagctatgaacaccaccggagaaagttctagtgcaaatgcatctggaccaatactgagaaaaatctggagtgcctcaaccaattgatatggacaagtttcctcaggatacagtaaaaggaagagagtggcagttatcatcccaacatgaagacataagaaaatattagacacgatcactaatgatgtgattgtccatcgtttccataaaatgaaacaccgtcgtgaaaagggtaaaaaggatgccatgtactatatttataaacattatttcttatctatatatactactttcagtaatatttatatggcttgtgttaacttatgttatttctatagacaatgacattatttgaaaggtctatctatatattactattaaagataatgtaatatctcaaagtttttagaagctgcaataaggtaagtttcacttggctttctaactattctataagttatatagatgcatgtccccagtcatttttttatcctgtgtccgcccctgcttctacttgcattcttattcctccatcctatcacgatctggctccaactagcattcaggtgattgcttacgacatatttagtcatttccatccttccaaattgcagtgaaaacagagaataaggaatcaccaatgcttgaaccattcatatgcttaacacataattcaagtccgtcaaaaccgtacgaagttttctaataacacctcacaaataccgctgatactttatcccatctttacctgtttagtatcaactttctaaatacaaacttcgcatgttcatcataaaccatgaaacctatcacagtggtcatgaaattaataaaaaaattcctaacacataaaaatttcttatcatatgatatttcttcacaaatatgaaatagttgagctagttgcactgcatgccacaccaaaaagccaggcgtggcaaacaccagctaccacgctaaggagccggccggaacaggtagttgtgccacgtcagggactaattaaccttgtcaatggcaacgactgccacggggcaccctttaatttgcgacaccatgaccaatggcgcggtagctcagattggccacgccggttaccatggtgtggcgaaagggttcattttagaaataagttcctgggaggtctattattaaaactaggaaggtagcccgcgcgaatgcgtgggcatgcgttttatacactatgtttgagacagttataagagcgaaatatcaaccgtaaaacatctaccatgatttcttcgtaaattgttttcgtcgacattaattgcttttttaattttctaacctattagctttatattataggagtatcatatttacctgatatttataagcaattatttataatcttcttcatcatttgaaaagaagaaggtagacttattttctttagaaaacatgtcaacaaaaagtaagtgtaaggtaaaactaaggtatttttctttttttcaattgcatatgtattatcatggtttattcgatgatgaattgggtgagacatgaagctccactaaatatatgggtttatatagcctaatatgattgatgtagtttgagagttagtcaatctatgaacatttcatgtagagtgggtaagaggttccacgcaagctaacttgcatacgataacgatgaaatataattgtacaataatatttttgaaatgtgacatactatgaatacacacttgtgtttccttttataagatagttctaacggttagaaataatggttctactggtttaaaagatataggagtactccaagaatgtagcttaaaaattatggttgttttaatatccaatattattacgaagtgaacgtagctcaaccggttaggttccttgtgatggaacttgcccgagttcagacttcacaaattcttttagtggtaggcaacgtacccgtcgatagcgagacgtacgtggtgacttcgtcaatctcaaaatatatcaggctagtctcttgaaagtactcaaaggggtatttgcatgtgtgcgttcacagaagtaattgtgcgcgttgtgagcgcccgcgtttgtactttgtttcaaaaaaaatatcaaacattacttattatttctcttttatttaatagataaaataatagggaggggatgacagtgttgtgtacatgtgagggtgaggcggtggagattatatttttttaacttttttaaataatttaagtgaaagccaatgacgaggtgtttcatttttttctaagaatttctaaggtttttccgtttttataggacgtgacacacggtgacttaagattttttctaaaaaatagatttaatggttaaaaataatggatacatcaaattaaattgatttttcttataatttaattacaagatctaatctattggtttattatagatctagatttacatgcatatatatacttccgtatattatgtagtattgtattttatcttttttatattatacaaaatcctatttttagaccgtagtttttttcacggatactaagtacgcttttttttttgctttattttatcgtagatagatgtctatttttttcttccagctaacagtaggtagctttatatgtttttttaaaaggtagtagctatatttatagcgccatatttttcaccaaaaaaatagtaaaataaaatagtcggtatgtatttacattgtaattccctaaattatatatgtaattttagtgtatttataatgtaagtctcaaaattagatatgtaaatcttaaatttatatactaattatatatataaatggggtgtaactacggtgtaaattcgtataaatatataaataattattaattttacgacggaggtgaagtgctaatgagtttagagcttgattaggtgcatttggttctttcgcataagctgtaagatgggatgcagcctgcaagtgcttgaaacgaatcttaccggacgatctcacggttaaaacatccgactgtacacaaatttagcaataccgtttaacgtagggacatttatttttctttccttttcccagccaccggttgcatatgtttttttaaggaaaaactatcaccttttttaataatagatctaatctaatggtctaaataaacgggtccaccaatttaagtgaaaatcgacgatgagattagatagtgccacgtggcggcctaggagcgtttgtaggagtcccacgtggcggcttgagagcgtttgtaggaagtttcatggacttttagtatataatagaaatagatagatagatagatagatagatagattatttattaaaaaggtctaaaatataaaagttttccccaaggggtggttgtcttgtatcgttatgtgtagtgtcccacatgggattttctggtactgctactgattaggaggatgctattgtacgagattccattaaaacggtatgatacttggtaggtaggaggtctgatacctacgtactacggcctccgggcatgataccacataggtatcagctggtactatttggtattagttggtcctgtgtgttacaatgcatgacaccttcaataccacatattcccagttgatacttggttggtatcaggctagatccctgcataaagcacgtcggcacaagcaaggaggctttcgaacaaggacaaagctctggcaacactggctatatgacgccttgtgcttcagtgccgctagcttgtttgcaggaactcgctgccgcgctcctctgtatcaaccagttgttggcgaaaatcgagcgctagacctgctacgagctccttcggaaaacagaggccgacaacctcctagagctgctcctccaccgccgagtcaatgacctgctggacaagcccctccaccacatggcgcatgaatagtgaatgcatgcggtaatcaacagtttgcagcggttcagcacgcgtcgagtcgcgcgagcgcataccgtgcgcaacaccgatagtgaagatgggatcccgtccaatagaccaatagcttttttcctattaaattatagatttttaattaaaaaaattaacctgccttctgtcagcgcttagaacgggcaatcggctccagtaggtcactaaggacaacttaaaactaataagaaatatccccacttgagaatcggataaggaatctgtagcacttcagaaatgagcatgctgattttgcattagagtactagaacttaatatatgagactattgatagaacttgtgaggagcgacatattcactgcccggccagcgcgggcagctgctcgggctctgcgtgtgccaccaatggtgatcgagtgattgctttgcattaaaatccaacgatttttttacttcgtagacataattagaagcatcggtactggcagctagccatgcaagcagtactgttgcacgatgcaattaggcctagccagacttgactgcttcacaatggatgacaatgatccattcaagtataatatggcatacgtccgttttaatttatattaaaatcaacgtagtttttcaactagtgaaaaattatatgcatattaaactaaactatgcttttattagaaaattgttctgccttcgattggtagtaaaatgagcacataaacattatataagcgggtagcagttttatcttttcatttacaatttgcccaccccttcaaaaaattctagctctgccactgcttgtgagaaatgtacttggaatgtgatattgcgcatcaactttgacagagttcctacaaaccaggagtttctaccggtttcgtggtcaaccctctggctctgtatgactcgtatagtagcaaaatactactccgttgtatggacttatcgattccagcaaaaacagaataccgtaggagttcacttccctaagcctcccagacctaaaggcctttttctgactggttggtgtttgtttttaaactccagtgtccttagcggtttaatgccaagtgaccatcgactagaggacattactgatgagtcccgattgtagtgtaatgcctggcaatagaacatgtttgccaattctctgcaaattaatgttgttgaattagtaaaaaaaaaaaaaggtgtacagtgttatttacaggatgaagctcttgggctgatgagcttgtaggatcaagatcagatgagcattgcagatcaaacccttcaaatggactaccccccatggcctagggaccaaatgaactgtaatcacaaattaaggtataagtagggttttggtttggagtttgtttgtctttctccatgtcagcttgggctttatattcctagtcaataaataaatatgtactaaaaacatcctagtaaatcctactataagtatactccattggtcgtatcttgctgataccaatcctccaaaatatcccatgtatccatgggacaaccaaccataaacccctctaggtttgggaggcttggggaagtgaatggctgaccacaatagtttagcattttcttggttttaataccaagatttatgcaattcttacgaactactccctccattcacaaatgatcaacatatatggcttgtgcagtgataccaatacattctcacatgccacttaaactcttaaactgatatagatcaacttgcagcaccgttttgtgtgtcctgcacatgcatcaagggtaatttggaccaatggtattgcttgcatgcatgcatgcaccacaattacaattagttgaatggtacatggaacaatgcatgcaaatgaccatttaataatgcatagaaaaatgacaagtcacatgcaaggaataccaaatatgttgatcatttttcaataacattgaaaaacttatatgatgatcatttacgaatggaggaagtattgatttgcccacaacttggcatcgcttctgcaaacgagaagagtagtgcaaaacgaccagcagtagtacattaaaagccaacatagtgaccaaatctaacactataggtgatgaatttactgtagatgatatcctagcgtgtaggaacactcctatgtttgagctgaaatacttgttat

SEQ ID NO: 23912 - DNA, 9001 bp, Oryza sativa
ctgagtgaatgctctactattgccgcacttcatttccccaagcctctcaaacctaaaaggcaatccaccaaaaacctaaaaagggttctttgaatggttgctacattttcagttggacacgtgggttttgaaggattagaagctacaagagacatgaaatcaatggactatatttataatgggttttaataggatattttcttactacaaatttatttattgactatagagataaaaccaaatctgacacagataacggcattcaaatattgaccaatccactaattatacctttacgattatagttcatatggtcatatgccatggatttactactacaggaaacggcttcagtgccggttggggactctcatatgtgttgggtccccaaccagtaccacaattcctgcactgattacctccccatcatcaatgccggtttaacaaaagtatgagccggttagtccaaatcaatagcatgcctagattagtaccaaatatccaaatctttcatatctaaataaatatcaacatctcatagatcaatacatatcaatgaacacactcacatatccacattcatagatcaacaactgacaaatctaaataaacatcacaaattaaaaattaattgatgcatacaccaccccaactgtagaactcaaccccaccgaggctgtcgatctccctcttcttggctctgggtcatcattgtcgtcatcaagcctcctgattgtttgacacttttgaccaaaatatttgttctcgtttacttgttaatccacacttctcaatgtaaatttttccaatcttatcttttctttcacacatctagtagtatataactatagcctaactcagtttgcaatttactaacaggtgaatacaaacctcctgaccatatatatattaggcacagcttcttgcccaccttctttcttcactttgttgccttcctttctgacagccattgactgttttacccagtgaaagtgtgatgcactgcttgtggcacaaggcacacttgtacaatagatattttggtcataaattttggaacaaatcattgcctagtttatgtgctagaatttatgtgtcaatttgttgacgaaaaaatcgaacacaccggcctaggagatctgcttagctcctgtgcaggtccaaatataatgagatgcgggcgtgccagtcagtttgatcctgcaactgacaagatatgcaaatagtagatcaaaacagccgatcggctgacaagccgatggagtagttccagccgatagccgataatagccaatgccgatgccagccgatagcgatagggtttaagcaatcggctatatgtccaatgtggatgatgatataaaggcaatcagctgttgataatgtaataaaataacaatataaccgagtagaaaccaatcggctagagacaatatataataagcacttatccaaaggtcaaagcatacatcggctagaggttcgatgtcattaaatccataggattagataaacagtaaaatctatgttgcgatcggttaattccaatatgtatacaatccttgtaagccgatgcaacgcctagataactcatcggttgaaaccccgatgaaacccttattggcagtcaaaagcaggctagagattatggttctaagcacgacttagtagatcaaacttaactgatgcagcactgagtatgaaaagaaacataatatctagacaatcaagccgttgactgatttttcagggtggtagatgtccaagctaatctaatctagcaatgtgatttagctgataccggcagaaaccctaaaacgagaagcagccgatagagctaaattgatatgctaggactagattaacagaaacatatgataaataggtaggcaaatatatcatctaaaccagagcaatccaagacgtcgaatgtactgatgcagccttgaacgacgccgacgtagacgatacaattgcctggaccggcagaacattggacttatcccttcgccggagatcgaagacgatgcagccccgcgtcgggtgccaagtcccgccggatgataaaataaagtagaaaaggtaaaaggtggcgatgcgccgaattgtattgatcgtagcgatagattacatagaccccaggtgtacatatttatacccatgggttgatacaagtccttgtcggacaagaaagaaactaacctaaagataaaaggaaaatataaagtccttatcggacactaaacacactttcctaaagataaaaggaaactaacaaactattcctaattaatagataaactgccatgtcgcatcctctttaaactcggtcacttagggataagcttcctttagtagattgatttccttagccgaatatagcaggaatccgactattggcgacttgataactcccatcggctgattccgagatgctgcagccgataatgattctaagccgatgacgtctttgccgattaccaaatttcactgtcaacacaattaaataaaaacagagagtaacgttgagttctaaactgcttcttagatttgtttctccctcattttttgtgatcatgtttccctaattgttaaactatgtgttaaaaaattcaaacaatattattttttgattcgtattacttaattaattaagtggtaatggcttatctcgttttacgtgccactcaaaatctaaggtaagaagccttttcaaacgaagtctaagttacaagggccataacatatgaactgaggcctccaaaggtgccgttgacttgggaagcaaatcctctaacttatatccctataactttgagtctctgatataccagcccacttggtggagggttcacatgtcaatgactgacatcagagggaaataagttataggatctcaattcagttgacttgtattagttgtcccacatgtgattttctattactattattaattgctaatgaaaaataatctaccttaatctgatgtataatgttttgactctggtgatcactaaggactattaagaaacgaccttccttggggatgggttaaggaaactgtagcacttcagaaatgagcatgcgtatgctgagtttgcactacaataatagaacttaatacatcagactatcgatgaacttatgagaaatgtacttttgatctcagcaataactggtattgcgcgtcaacttcgactctttgagaatttttggtgtagaaatcatcctctagagtgctctggtggttctaccagccttgtcagcttgtctcttgttttgtatggcttctatcgcagcaaaacaccagtccactgtatgaacagatcaattcccaaaacaatgaaacaacgtaggagttcacttccatacctaattaaaggttatcgatctgactggtttttataagggtatttgggctacaatagtttggaggatatgaagttgcgagcaatcatgtgtgtgttgttactacaaaattgtaaactattggcagcttagctaatataatgctttcaaatctaggtggcttgcttcatgatacaaggaaattctccaatgtgaactgatattttagacgaacaattgcacgagcatgaatatcttctgtaatgttaaccgaagtctttggggccatccacatatcatgctatcagccattatacactacagttgatatgttcacttggtgagttggtgatatgttaagtcgttaaggattctatagttcagaaacaagcacatgcaatgattttgcagattacagagtaaattaatggatcgattagattactaacaaactattaggcaaatggatcaatttgactattgacgaactattagagaaggttaaagcaacaagtatttcagctcaaatccggcagtgctcctacaagccaggagatcatctactacaaattcatcatcaatattgttagatctggttactatgttggctttgttgcactgttgcagctggttttgcactcgatctcggtgccagagactgagcaagaagtgcagtaatcatgaatacaactaagcaaatgctgaaccattgtagcagttcacttcaccaagcctctcaaacctagaggggttcataaattaatggtttgttttcagttggatacatattggtttttttggagcataggaacccacaagaggcatgaaccagtggagcatatttatggtgggatttgctagtatttgttgttactgaagatttatttattgtctacagcaatataatgccgaagctaacacagagatgggcgtacatcaaattccagaccaaaaccctaattatgagttttttttactgtcctgcaggtccggtaccaaatcgtgaccgtttagggtgcataatccgatgatccagaaaagctggtacttggtggtaccactgctccgtccattaggtaccaggcatccgagtccgagtaccctaaaaagggcataatggtcttatcgtgtcaaaaagcttaacgcgtgagcaggtcttgcaccgacctcttcagcctttcttcttccttcccagtgcggccgcactcactagaagagctgtcgccgacagcaaggacaattggacaaggtaaagcaatgtgggagcaagaagaccagatctactcccctcaaaactagaggcactagatcaggtcgctccaacctcggggggaccagctttgccccccagtgatggaaggagctcgacctgccaatgaaatccttgccgaccactgccttccctgcactaggccaagctctttcttctcatcgtggttgtatggtcaccgcatcaccaagccactcttcctatggccagaggctggtggtgttgctcgtctggagacttgagtttgagggccttggcctcttctaccctgacggcgatagcctcagcctcagccacagcgagtaacgagcatagctagaggggcggtccagcaacggcaaatccccttcttcaccggtgacaagaagaccctcggcggctgtgcatatccatggcttcaccagcagcagctccaaagtccagcgttgtccctgtcctcaagatcagaggtcactaaacttcttgcaaagttctccagtttataaaacttcactgaatttctatgcatatgcagttatcttgtttatgtttagcgaagtttagagaatttaatggcatctcttatgcaaaagtcagagagctttcacaaaatttgaatcttatgtgtgttttgataccccacatagtgttccttgtttccctcaccctcaccacatcacaaggaatcctctcttccatgacaaccggtgatggacattctcgtacacgaagcgagtcagtgcagctggaggattcgctaggaaatcagggtttccgctctaggtggcggcggtttctgaacaagcagaaggatgaatgtggcagcaccgaggaacgatattggggcgtgtgcgaccaatttagtattggacgcaattttttactcattcccaatcctacccccaaaacatatggtaccaactgctggacggtaaaaaaatcttcctaattatacctttatgattacagttcagatggtgataagccatgaggtttttacttctgaaatctgcatctttcttaaggctgtgtgaactgtgtaaatccttggactttttaaacacacataaaaaaaactttttgctgtagatttagcccagtgttaacttgcatggtgatttgatttctgttctctggaattgtatcagctgagtgtagtctcccacttgtgatttttcctatattcattaactgctaataaaaagataacctaccttctgctagccattacacaccagcgatcacttgcgacaaccattaagaaatgaccctacttgcactacagcatttcagaaaatgagtatcactagtacagatcctctcatctgtgacggcccctcacatgcctgggcaacgtgggccgtcagaacaaagtcatcccaatcgggcctaaattaacaccgttgtagatgtactcgtccagacataatcgaggtgcatatacctatagcccgtcaccgatggcactcatcggtgacgggctcatagttaggcccgattgagattacacctatatctcaatcgggcccaactactaggcatgtcagcgatgagtgtcatcggtgatgggcagcaataaaggccgattgagataagttgaatgcccgtcacagacatcggtgacggtcttttatttatgcccgttagagatgaatgtgcgcttgttagagatctcgtttatttggcccgattgagatatattttgcacactataaatactccaccagtttgttgtctgtagttatcccactattcaatattcactattttggtgggaggttgaagggggcgaatttttgccattttttccaagaagaacatgaaaatcataaaagtaagtaaaatggtactgatcatttcttattaatttagtagtacttatcttataagatgttaactaatattttgtgtatttttcaacgatggatcgaagttggatgtatacgacttctttgaagcgtcagtataaagagtatagagatggcgtattaagttttatgaataacgcggaggaggataggagaagaagaaacaacaagttttatatatgctgatcttgggtttttggttgggtacattgaggtttttcttttctgatagaccataaagaaatgtcattacgaactgcagcatttccgaaaatgagcacgttgatcttgccactacagcactagaacctaatcaggaacagatcaaatttaagctgatgtggatgtctaaatttgctttgagagaggtgtacatatgttgaaaataaacgaactacagctaaaaaatatttttgatcaggttcctagcacccctctctcaacaagtagatccgcccttgaacctaatatataaaagactactgataaacatgttggatgaggtaaaagctagaaatgttctttgatcccatcaacaactggtattgcatctgaacttccacctgcctcgccatgcatgattgcaaaaagaccattgccaaattgtggcggaacaagtccccaaaaagtataagaatgtagcggttcacctctccgagcctcccagggctaaaattcctctggatcattttgttttggtgtactacatatggccattggggtacaatggctttgaggatataaagttgcaagggtcaggaaagagacaaagacatatatttatagtggaatttactagacctgctgttactacaaatttatttataggggagtgtatatagcgaaagctagtgtcgcaaaagaaaacggaggaaaagacttgtagaaaggacccttccaatgaaaaatatattattttagcaagtttgagaagtgtgctcaataaaaccaagggagtatctctaggacagcagcagtaatgaatgctgcctgtcctcctaagggcttccttcaagttgcagttggtttcttatgtgatttttatattattatggcattcatctattacaactttacatcaaaagtagccgacagattgtgaacggtgatggtagatcgtagagtttaagggaaagacaatagtatattatggatatcgacaaagtcagtggcatattgttgaactgtgacgaacttagtagtactaagtagattttctgagtggtctttcgttgttattccgtagggttatttttgttaaaaagaaaaagaaagtagttcatgtagatagaaattttttttaccatcgtcgggtttgtatgaatgtgttaacctaactagcaagattcaaaatgtgtaacgccttccacgcacatctgctatggtacaacttagattattttgaccagtaattgatcacttgtaaccaaagtatgcagatttttaatgatgattagaattgaccaggaatcgtgccaccatgatgcgagtcatcgtctctcatctaggtacaaacaagatccagcagtggcaccaacaccagcacgcatgaacgagtcccaattagaccggattaactcacccacaaaatactaggaagccctttccagtttttttataaaaatccacaaactttaactttaagtatcatatagaaaactttaaccttaggctgtgtcctttggacaactttcccaacttcactccctcattttccgggcgcacgcttttcaaactattaaacggtgtattttttgcaaaaaaaaaagtttctatagaaaagttgttgtaaaaaattatattaatttattttttttaagttttttaagctaatacttaactaatcatacactaataaggtatcttgatttccgtgtggaggaaattagttcccaacacaagcaaacaaacacatccaagacttggccctgtttggttccatgggctaattattagtctccaccttttagctatgaattagccccaaggatctaaacaggtgggctaatttggggctaaagtaaattcactactagaaaaacgatttttcatgacatttggaaaatatttttcatggcggctacaagaaaaaaccgctagcgtagaaaatcgggggggatcacgggcacattaagagatccaccatataaaatactatatttttcgatgtctaccagcgaaaatcagtatttttgctggcggctactaaacagatccgctagcaaaatgaaaaagattcaccagcgaaaagcaaacttcgctaaaaaattttcgcagtatttaaaacgcgcgctagccttcacccacccacccactgcatttatctctcatcttcccctcacctctcccagatctagccgagcctctccccttccctcccacctcacctctctcccctcccctcccacctcaccgcagcgacggcaggcagacctggcgggcggcgacgctcgggctcgggcgaggaggccggatccgcggggaggcggcgtcgccgggctgcgggaggccggatccgcgaggaggcgtcaccgcc

SEQ ID NO: 23913 - DNA, 8047 bp, Oryza sativa
gacgatgaccacgacgaccacgacgacaggcaaccggagggcctcctcctcctcccctcccctccctctccctctcccagatctagccggagggtggaggcggcagcgaccgccgcgacggcgatggtaggcgggcgacgacatgtattgctccattttgtttgtactgatgtttcatatatgcatgtattgatgtttgtttgttgagaatgaagtgagaaattgatgtagtgttctcttgatgttggatctgatgtggatttgaattgttatggatttgagatttggggatgtggatttgggaatgcaggtagcagcatggagtttttgctggcggctggaggccagctgcatatggtttttttttctcaaaccgattatcgctggcggccagtataacacagctaccagtgaaaatcgattatcgctggcggccgataaccgctagcgaagattgatattttctctggcctttgctttgtggcggctgcaatttccgccaggaaaaaccaaaaatggccgtcacgaaagatgattttcgtagtagtgattagctcccctcgaaacattagcccctctaagggatgataatggggctaattttttatggggaccatcgaaaagcagccctatctccccccatctctctcctctctcttcaccttttagccctcaattaactcatggatccaaatatatcattctaggctaatgtttagcctaccaattcaagactaaacattagctctcaaaattagcccggtgctaatcttctaaacagggccttaatatcgaaggtaccaaattttggtgtctcacaaattataatgtttggtgactcttagtacattttgaagaatggtaaaaagctgaaagaaagagagagaagattgctaaagtgttattctaaatctggaaaaaaaagtatgctatcatttttaagagaaacacatctaactctaacaacaagtaactcagccctaatctggcagcgctcctacaagccaggatatctgttattcaagagttggatgttgtctatgtcggctttactatgctagctgaatctggttttgcagcattcttgtcgttgacaaaagcgatgttagcactaatccaaacttgcatattgtttttagtcttgcatgagttgcatgtagataggcacgtgatatgtttatgttgatccactagatagatgcatatgtgtgtcatgtaaacaatggttagtccaagctttgcatgtagagttagttagtgctagtgattggaagatgcatgtgttgcagcataactagcaactgaacaagtctagggaataagaggattagtggcgaattagttagctgcatgcaagattagtggagcatgtttgtggcgtggtttagtcagctcggaggagcgattcttgcgcgtgagacgcatagatcgtgtgagtgagtggctcatggtcgtgcgggcgacccggtcgggctgttagctactccctccgtttcataatgtaagtcattctagcatttctcatattcatattgatattaatgaatctaaatataaatgtggaaaatgctagaatgacttatattgtgaaacggaggaagtagctatatgtgcatgtacgcgaggctacataagccgtgtaatcatcagtttgtaagtgagtgaagaaaagaaaaggcatttgttgccaagaaaaaacttgtgtgtgtgcttgtgcacttctgtgtgttcatccccagagagctattgtgtgtgtttgttgctccgtgagtgtgctgctcacgtgaatttgatccttggccaaagctaaaaagcgacaccctattgtggatgagccagtcagccaaaaatgcaccaaacttagcagccgctaagccaaaagatgcaatacagtagcagttcaattcctcaagcctcccaaacctaaaggggttaatgaatgattggtttttggttgcatacatggaattcttttaggataggaacctgcaagagacatgaaccagtggagcgtatttataatggggtttgctataccccgcaaaaaagaaaaaaagaggggggtgggggtttgctatagttttccttttgcaaagatgtgctaggatttatttattgcctagtaatatgaagcacaagctgacaccgagaagcacattcaaattcaaactccaaaaccctacttatacctttgctattaccctcaaggtccatgctgcagattcagccatttgttcacttgcatggtgatttgattttttttattattatttctctggcatagtggcattaacatcaataaaacaacaaatcctgctcaaagattggttcagctagcagtaggaggacatattaagatacagattttacctaggtttttgttagcacacttttcaaagtgttaaatagtatatttcgtgtgaaaactttctatataaaagttccttgaaaatatcaaataaattcacttttcatgtttgaaataattaaatctcaaataatcatacgttaataactttctcgttttgtgtggcatcccataatcttcatcttcattagacgggacggggtgaacaaaactagccacacaatgttgtcctcgaggtccattcagagtatatatagcataggcgtgtgatcaagcattttctaatcactctcttgagtactgactgacgaaccatgcatagagtacccaagaactgcacatccacggatgtactgaccacaaaacttgcatcatggcattaaataatttcacccgagacatggatatgctatagaaattatattcaattagatttcggatggtatcttaccataaattttgaaaagtgtgttccccgcaaaaaaaaattgaaaagtgtggtgcgttcccctagtactgaataacaaagcaccggtagtcactcccataatgcaactatacttacatatggaaacaacatattagtatctaccacataaccgaaaggtaattccagttgttggtaattcataattgtcgatagcaaaaatcacttcatgatctgtatgtttatatgatccagattattgatgaaatactcgatttcagattattgacaaactagttaggcgcacgctcaaaactcgatcagcaacacaaacaagtaattcacctcaaatccagcgttcatacaactaaaagccaggagatagatcatctgatatcatctactgctgattcatgatcatctatggcgttcgatacggtcactgtagaagctttcatgtactgcttctattttttccactactcttgtcattgccgatagtgatgccctattgtggacaaagcgagtgagcaggaatcttcacaccagctgagcaaatgatgcagctgaaatcttcgcagcagctaagcaagaaatgcaagatagtagcacctcacttccccaagcctcccaaacccaaaaagggttttatgaatggttgctccgttttcagttcgatatataggttttcgaggacaaacccatggattttaatttactgcagaaatcagcatcccttgcctaaggctgtgaactctctataaaaccaaagacatttgtaacacataaaagatccatgcagatgagccttggtcgctggcatggtgatttgatctctgttctgtggcaatggcatcaacatcaaaagaatgctgcccaaagattgaacatcgaactcaacagtactagtagccacaattcttgtccttgtggttcattcagattaaatgtatatgtgatgaagcatgttttaatcattcttcggtcttttgacttattaatgatacaatgaatacccttgaactgtacattcaaatgtgccccagggagaagtactgaaccactagacttgtatcatatgtagcagtaggacactggcattgtctcttggaaatttcaaggagatcataacattcaaagatttggggctgatggaagtgaaggagctagttgagaaggcctcaatcattttgaaacagtcactcacggaggagattgaggcaattattgagaagataaaggtagcattaatttggaagtcatttctttgcaagtgacaataaagcctcttaccaaagtatttagtatcaaatttggtggttagtgggctagaggctgcaacctaccaataagttcaacaatagtgtgattttctaagaaattattattatgtgattttggatgtggtatttgcataaatattgtgattacatgtagcattcttgttttttagtagatgataccccgcgcattggcgtgggatatttgaatcattgtggtagaacaaaggaatcacaatataagtttacaggactgtacaatcagaacaaaagggcaacttaataaaaacgtacatatgaatccaattcatgtaaagccatttctttataaaggaataaaatttagcttctacaattgatgtaaactataaacaatcaccatgaatcaaaaagaaatcttggtttatgttgttggtgattactccttgatgaacatattttatatgccaaatacattgaaatctcgaccgatactcgttatgcattacaatcaatcaccacataaaagaactcaaatcatatacttcaaatggaaaaaaaaaagctatactttgcaaggtagtccagtgaataattaaattgtagaaagaccaccaaattaattaaaatagctacggtgtaaaattaaaataccttttaacttacatggattgttggatggtgtgacgaaaaatccacactcggccgataataccggaactgtgttaacacgaactaagtcgacgaacacaacggcctaggagatctggttagttccaatgcaagcccaaaggttgatgagatgcgggcgtgctagtcagtttgatcctgcaactgacaagatatacaaataacaaatcaatgagccgatcggctgacaaaccgatggagtaattccaactgatgccgataccaaccaatagcgataggattttgagccatcggttatatgtccaatgtagataacgatataaatacaatcggctgatgataatgcaatacaacaataatataatccagtagaaatcaattggctaacaatatgatagaataagcactaatccgaaggttaaaacatacatcggctggaagtccgatgtcattaaatccaaacgattaaataaacagtgaaacctttgttgtgatcggctaaatccaacttgtatgtaatccttataagccgatgcaacgtccagataactcatcggctgaaacctcaatgaaacccttgttggcaatcaaaaagtaggctagcggttatggttctaagcacgactaggggtgatgcaacgcaaagtataaaaagaaacataatatctagacaatcaagcccttgattgattttcagggtggtagataccttagctaatctaatctggtaaagcaattcagccgataccggcagaaaccctaaaacgaatattagccgatacaagtaaattgaactaccaaactagattaactaagatatatgatagataggtgcttatattgacaagatcagagagtcgaagccctagccccgccgatgaaaatagccatgcatgacaaatataaactcgtcaaaaaagtagaaaagtaaaaaagggtggcaatgcgtcgaatttgtattgatcgttgagataaattagaatgatctcctggtgtacatatttatacccatgggtagatactagtcctttttagataagaaagaaactttcctaaagataaaagaaaaacataaagtccttatcggacactagaaactaacaaactctttctaattaatagataaattgtcatgttgcatcctccttgaacttggtctcttctggataatcttcctttaattgattaatttccttaactgaatatagcagaaatccgactatcggcaacttgataattcccatcggccgattccaggactctaaagccgatactgactctagaccgataatgacttcgaggcttaccaaatttcattgttaacagatggtcaaatatttcataaggtctcacaatgacagtgatcagtatcgaggtgattgaacaaacttagctgcatagtagcgatggaaacaaaacaacaatctaatatctgcatggcaacctgaaatagaaaaaaagaacagggagaactaacacaatgttgtgcatattagagagactcggataatattggaagataccttttgcatgccttgcactggacataggggaagctctaactggtagaaacaaattggcggatggaaaaaatgattccttcaaatcaatcgtatattggcatatctcctagaacaaaagagactgcaactgaacatgtggtgtgatcaatttgtttttatgggctggacggtgacttctgagctccttttgaggaaaattgtagtgcggtattatgtgcatacctattagtgtgcagcattagtggagtagtgttttacttcttgactccttgattattttgccattactaaacacatcaagcagcggcacctgtagaggaactgataaagacaggtaacaatttgttaggttgaagaaatcggtggcagcagtccgtctaatgaccgatagtgaatagagagtctaatctaacggttaaaacaattcgaatgatacggctgcacctcaaagcaagaaattgctattagctacactaagtgaggatgaactatataggattatatgattcgtgtgagatgtatgtgttacatatgatgatttgaccttcggagtactttgttgtaatcttgaatctatagcttccatgaacaacaagatactaattgcttgtgaatattttggattttttttcagattttgggccatattttgggagtgtttgttgaatttctatcgtcattttcatggtttctgattttaaaaacaatatttcattcgttttgtgattttttattctttacattaaattttttaatggtattactttgataaattgtaagtacaaatctaagccagtgatttgcttagccaaaaataacttgcttaattagcagggagacttgtggggggattgggtgagagtatagggatcaaccccatccccctggatggatctccctatgtgaatccatccatagtagcccaactaagccttgggttaacgccagaatatgcaatggaataccaaatagcaggtagagttgcttgtcattgttgcaatggtcttgtgagttgtggattgttatctgcgtaatgcacgtatacccaccgcgagttaaacttggatcaagctgacaagttgctccagcatcggtgataaatattctcgttctctctatgcatgtatacgccaataaaaagaaaatgcttaactcgatgagttggagcgtcccattcctgatacctcacatgcatatagcgtaacaacactgcaacagtaatccgctgatcttaatattggttattgcatgtggaggttatgaaaacgattcattgagaggtagagaattcgtaatttcagtagtagtatttacatttcaacattgccctggatttatatatagtggttttggaggcgatgtagcttacagtttctgtacgtacgtttttctgtttacttcacagaccatgggtgagtgccagaattcactattcttgtccctatctatatcatgcacatctgaataatcacatggcaatatataccgcaaaggtctgaacttggaggatgaatggtgaccggccttattaatgacgatataactaccacgaaaaaaatcgtagcatcaatgctaaaattgtggcaatagatacatgttgttacaatcttaaaatcgttgctagccgtggtaataggttattgcaataatttttatttagttgtaacaaattttgatattgccataaaatggatgtggcaaaagaatatattgcaacacttcacatcgttgcaatagataactattaccaccactccatgtatggcattagttctacataccaaactaaatatttcaatattaatttatcattctaaat

SEQ ID NO: 23914 - DNA, 5809 bp, Oryza sativa
atgaatttgagtatttaaaatatttcaaatgaaaaagtcaagttgtagagctctaaatttcatacaaaatttattataatccgtgtccatatgaaaagaataagtcaaattatgagatgataatttttttatttcaacgaatttgttgatcgtggcaacagaaaatagtgaaaagtaccatgtactatgtaaattgccacataaattaaaattgtggcgatagagtatgttttttgcaataataatgtttttgtggcgatagctcatttcctgttgcaacaaaaatattgaataaaacaatgattgtaaatcgttgcaccaaaatatagttatttgccataggaaaaatatcattgcgatagtataatatattgtcactaattattttttataataaattggtggcgatagctcaattatcttgtaaaaggtgactagtattgtccattagccagatcagcaaaagttcaccatagagccaagaaattaagcatccttgggtaaagatttgattggtgtgtgtcaatctatctatataactatataattagtgtaaagttaatggatacgatgtttaatatttgatgcggaaattaaacatcctatcatttaactttacactaattataaattttctataggatactcaaaatttgtagtatgtctttgttgttggatacctcaaaaatatgacacggtgggtaggacacccaaaaatatatagtaatttgttgagggggaacacggcaacaattatttttttttattttcgagtcaaatgaagagagacggcacgcgtaaaagatgattttgcccctcggactagcaggttgtaacacagctaggcccctactttccctccccaatcgatcccctctccaacacctagaaattgtaggctgcagcaacaatgtccatagcgatggccattacaagatgttggcctaagggaaaagttgtcttccaaatgtttgtcctctcgatttggctcgaaaatgataaaataattgttatgagtaaattgcacccacggtacaataacttgtcaggtaggtgcaatttggtgtaataatttaaaaaatgagcgttaagtgcaacaacttggcaagaaggcgcaatttagtataagaactttataagtaatcgtataaatgcaacaatttgtaaggtagatacgattttaatacaataaattaagaagttgtgtgacaacttaattatttggagcattttttatataaattcaaatttttaagtacttatttcgacaatatactagtgtggatttgtataaacatatttatatttttatcctaataactaataactgaaagtcaatcaaactggatgtagaaattattatatttcggttgatatttgaggagttgaagaaaacaaaaaattcttaaacgttactgaatgtaaattgtatgtgcaatataattctcaaagattaaattcaatattataaggctatgtattggcatattgacatcgggaaaacctcacctagcatatgtttagccaaattgatccaccaaaatactaaattgtcaagttcttgtattagaacgcacccacttgtcaagttgttgcactcagacgttcaattctcaagttcttgcactacatcgcacccacttgccaagttggtgtaccgtgggtgcaatttactctaattgttatggtatcccccagtagattactaggaacatgtcctatagccatgtcatattttttttaaggtgttcagcaataaagatcataaattgtaagtgttctatagcaaattttgtcctaattataatatgagagatactaagacttggtaggtaccaaatttagctctcacaaattataatttttggactcttactgtacgttttgtagtgccattaaaagctgaaagaaagggaaagaagattgctaaagtgatgttctagatttggaaaaagagatgctatcatttttaagagacatcatatgaagaacaaacatatctaacccctttacaacaagtaccttagccacaatatggcagcgctcctacaaaccatgagacttgtatgcattgtatctgcctatctggtattacggtgctcttctcatcgacacaagtgacaccctattatggacaaagcaaatcagcaaaaagaaatagcaccaaacttagcagccaacgagcaaaaaatgtaagttcaattccccaagcctcccaaacctaaagggtttacgaatggttggtttttagctggatacatgggttccttttagaaaggaacatgaaagagacatcaaccagtggagtgtatttatagcaagatttgctacaatttttcttttacaaaaatgtgcccggatttatttattggctagaaatataaagctgaagctgacacagagaatggcattcaaactccagaccaaaaccctagttatacctgtgctattgcagttaacatggttcctaggccatagggttttttactgcagaaatctgcatcgcttgagaattctataaaaccagagatattttgtaacacacaaaagggtccatgctgccagtttagccctttattcacttgcgcggtgatttgatctctgttctctggcatggtggcatcggcatccataaaaccacaactcctgctcaaagattggttcagctagcactagctaggacatcggctaatcattcttgagtctcgactaatgaaccatagagtacccaggatcggttgattgatgaaccatgcatagagcacccaagatcggcacatcaaatgtgctccatggatgtactaccacaatacttgcatcagatgtactagtagaacactggcataaataatttcaacagacatgaatacactatagaaattagattttatcagatttcggatggtatcttaccataaagtttgaaatataaaagtgtgatgcattcttccccagtacctgtataacagactgccggtaggcactcccatagtgcaactttacatacatacgaaactatgaaagcataggcattagtgtgtccagccacataactgaaaggtaattccagtcgctaaatacagaaattgtcgatagcaaaatcacttcatgaatgtattttacatggctgtcgtgcaacactgcattgacaaacctgcccatgcatatcaatgtccacagcaaaagacatcaacctcctctgcatcaggtaacaatgatcttggccttgtcagacaccctcggcagagccaatagcttcttaagaactttactgcccaatgaaaaagccctagtgcaatccacatttatcttcacttcctctaaaaccggtgcccagctcagtagctttcctacaaaatcaacttcgtagtccaaacccaggaagtcattcacgcttacagttacgaggtggtccatttgaagggttagatctgcaatgctcgtctgatcttgatcccacaagctcattggcccaaaatcattatcccatgggaaactctgcacaatcaatttttaatcaacgtatcaaatgtaaatagtaccaaaatttcagtcattcaaggagataaggatagagattgacgaatatataaaaggcatacccatagctcaagctttttgaggataggagcattctgaaacaatgacacggccggtcaggatttccctttggtcccagaagcatatctctaataacatcatctcgaggtgatcaaacacagcagggatcttcgtcattatgcacccttttgatagatactgcaaccagaaaaatgaatgatgagaaataccaacacagcataatcaggacaacatcatcataatgctgaaaataacaatgaatcaccgtcaagaaatagccgttgatgacaagtttttcgatgtcacttaggcttcccaatgcctgcttgaggtaacttttcccaccatgcacaactggaacagattggtattcttgagctttgtgcagagtgacatttgcagtctccagattaggggcatccaaatggaagtcttcatacttcccatcaacctctagaatttcaagttcaggagctcgaatgttcagacagctgatgccttcaaaggatttcaaaaccagcacagacaactcagggcagcaggaaatcagattatcaatgtcactgtctgtggaggagaaattttccaggtccaaagtagttaaccactcaaaacctttgaacatttggggcaaactgatgatgcagttctttatgtccagatgctccaaatcactgatggagaagaagcatgatggtatcctataccttgacgcagaggtcaatttgattgtaactgaatttggtgacttcattgacagcttgtgcatccacctaccaaatacgtcgtggtaatttttgctccctaaaattgtaatcccatgcagaggtcccctgtggagtgataacgccatatcgaccaatgtaataaacttgggtggtgcacttgttactgaaccttgacaggaagtgtaggtgcaatcacacagcaacatctctggaatagtagtccatgtgctcctccaaacgcttgacaggatgttagttctgacagcatcttgaacattcagacgagagaggatatcggcttttatctctagaggtagactgctcaatctgtctgacttcgcggcacgtctagacttcaccttggccttctttgagctacccattactttgaaaatgccctgtcgttaccagaaagcagcaaacttagatgggtatgcattccatcgccagcctcggaggaaaaataaataatagaaatcacaaaatatagtacagtgaagttgattgaggacagagtaaagtactgatgactagccagcattcagagaaacaagactggaaaatttttttaaccgaacttaacacgccgactcgtgggtccttctctgaaagcaactctaattgtcagttaaagtgtgtataaaccatctggtaaggaatcattatcaactatcagctgcagagatcaaacttgtgcacagctgcaagtatggaaccactggatcggtaagcatagcacagtttctgctgttgagatgaacccatcagaccaaggatcaagtggcacagcacatgtttggggtatcacatcaaatacatatgagaaaatcccttatgtacccatgaattttcgcccaatttcttctgtgcccctaaattttgtcttatcccctacgcacccttgagttttcatttttatccctgatatacccattccgtgagttgactgtcaattgactgttagatttttccaaaaatgtctacattacccttgtgtcttacttattgcttagtacagagtagttgattaaaaaaacatggctctcaaggtaaaagttgattcatttataaaaccaaacatgccataattacttaatctaaaacatagatttttaaataggtttcaaatcagatttgatgaaatttattgaaaattttcgctgaaatttaaataaaaaacagttttggtttttcgaattccgaataaaacattttttggatttcattatctttaaaaaaatgtttgaaaaattaattttgttttcgaaatccaatgttaataatcatgtccctttttttatttttaggttaagctttttttattaacaagacttatgtttttaaattagaaagcatgaagtacaagcgaagggcaatatagtcattttgggacaattctaacggtcaattcacagtcaactcacaacatgggtatagaagggatcaaaataaaaactcagggacatacagaggatgaggcaaaattcaagggcacgtga

SEQ ID NO: 23915 - DNA, 8590 bp, Oryza sativa
ttttttaataactgtacctggaaagcgttgccgtctaaaagaaacaaacacagaaagcatgtcacccatgtcatgtcatgtggtggttcattatccgcaatcgcctcttgtacatatgtcacgtgcataccaccaatcaatgacaccaacgcatcaaagaccacagacaataatcacactgctgttttttttatgtgcatatcctggttgaccgggaaaattttgttccatcttgacacataagtaaattctcttcttaaggatatagaagggtaaactcactgttatcaaagaaaatagtgcttgagaatctatgcaacataatagcccaccaccaatcacttttgcacgttctacagattaatccctgatattttttatatcatgcgatagtcatgtgtttgtttgaatcaagtaaataacatatatttaaataaacataggcattttaccgatagcaaagcatgggtatttcgctagcattcaagaagaagagaaacttggaaagttaagccatcatgaactaggaaggataatgtgctagagccaacagttcaacacttgattgaactaactgagccaagggaaagaaatagtttgtcactctaatcacaccaataatttttatacatgagaaaatggccgagttaaattatttaatacaccaccaaattacctcactatatgctcctttagctacaacactgtcctccaactttgatcttctcccgtttaccatatactcacaaatcactgaaagctagtataaaaatacacttgcagagaagaaacctgggatggaaacaatatgcatattattgggactaaaattgcatcttggagttgaatttacccgctgggtgccgcaattactatttcttccatactcttctggaacattatttctgtaggttttaagcacccacgaatgtactcctgcccaagttgtgcgcgctcgttgtccccaaacccaaatacaatgcctctgtttgtcactgcaacagtgtggtacaggccagtgctaatttgtgaaacatagtgatcacgcagactatcgaggactcgaggcctcattactttgtcggatgatcctcggtcaggaaaccctaaactcccaaagcccatccatccgaatgcaaaaactgagccctcatcagtaagaacaaatgtctttcttttccttgcacagacctgtcaaaattaaaggaacatacttaagcctttatacatgaaactactactagttctgtttcaagatatgattgttattagaacaagaaactcctatatcatattagcatgtagcaatgcataacttttgttttaaatacgaaaaccatagcaatgccctatttcttgctacataaagtatattacctcagcctaatctacatgattgatgatagtttaaaccaggtttattcttcgatgcttaatgaagtaagaaggaaaatggtgcaaacatatggaacacacctgcacagcaacttgactcttcaaactgctgatcaattctgggctagttttgtcattctcatcaccatggcctaatgctccacagtaacctctgccccatgtataaacctaaaattttcaaaccttaacttctgtctgaagatacataacaatcaaaacatacaacagatagttccttgaacagtgtatacttacataacccagtgcatcaagagctacagcatgctcatcaccagcagacacgcgaaccacatgaatattcctcctcttgaatgactggattgcacgtggacgaagttcatcatgctgatctccatgtccaaggcagaagttggtacaagagccaaaggaataaactgttccatcatccgttacagcaaatgtatagctggcaccagcagcaacctgcactaccggagcaaggccttcaaataattcaacgatctttggagtagccctgtctattgtgtcaccatgaccaagctggccatgtgtgttacttccacatgtatatacttgcccatccgttgtaagaatgacagtaaaacttaaaccagtggcaacctgcaaaaaggggaatagatagaattaagaaaaagaggaagagttttgcagacttgactagaccagacatatgaaacaactacctataaggctataacagccttattgtctattaacaaatttagttacaaaaagtagggtcttccctccattttatatcaacaaataaataaatttgaccacaaaactaaaacatcgttcctgttgcatcaaataactagagcattgttctgtttttacaaaatgaaatataataattgaaagaggcatttattccattgtaggagatatggaacataaaaggataataaagatgattgggtccacctgtttgcaagaaattccttttagggcctttatttcggttggtcgaaatatagttcgccccacctcaccgtgaccacagcataatgatgaattatctccacaagtgaagacctatttgaacaaaattcacagcgttcaaagtattagaaatattacaattgacaatatacagtgtttaagatgagcatcaattacctcccctaactctgtgacaaaagctgcatggttgtgagaggcagagatgttgacaacacgagaaagtgatgggaagggaaccctgctgaatgccgcacactgggttgtatctgggccatgacctagcaccccacacaaactggatccacaagaatagacagaagagtcatggaccaaaagtgtgtgatatcttcctgtcgctacttgcatctggaaacatacagcatgttcacatatataagaaaccaggttggaaatgtcttctaacattaaaaagaaaatctaactttccagtttcatactaaagatagaattgttcatgagggaaactattcccaagtgcaacaatgcaacttttgttgatcatttggtcttcatattggcaagcatagcagaatggcaataagtaacatgtccaacatagagcatactctcaaactggtagagcagatgagctaggatgttaataaaagaaaaaaaatctagaataaaagtaaattaggcaccctccagaacaatctgatgcagtaggcacgccaaataattatgcgccatatatttttaaaatgtctgacttgaaattcaatcagtgtaagaaaaacaactaagatatgatggattcaaagcaactgaggcatcagcaacatattcccattcagccaagtgtgtcgtatctaaaagaaaatgaaaaaacacaaggtaccatatgtttattataaatcatttccaatgtccacatatcctcctcattcagaagcatgccaacttacaaatcaataaatcatagaattgttagtaattttgttcatcaggaatgagctggtcaacctctcttaattctataacaagcaaaaaaaaaaagaaaaagctcacaatagactacaaacgcatgccttaacttggtgttaagatgtttcattgtccctagtgtaatccaaatgtggatatccgattcctatcacgaagtttccgaattcacaaagtcatgcatgcatgatcaaacatggatccctaaaacgggcaaaggtgtgaggcaagcacaatcatctctaccaggctatcctacaccacacaaagtcaaactaaggttgcatttactagtatctcagaattcagatgcgaagcaaagaaatcctcacgttgccggaggaggtgtggacggtgccggaggactgctcgacggactgcaggaacctgagcaccttcttccagctgccgccgcaccgctccaggagctccccgcgcgcggcggggcccatggccgcgaacgccgcccgcgcggcgcagagcctggaggcggcgtgctcggcgagcgggcggagcgcgcggcacgtggcctcgagccgcgcgaggtccccggcggcgaggcggccggaggtcaggacctccccgatgaggtggccggggagctcctccatcgagaaagcccgcggcgccttctcccccgtcgccatggatccacccctcccgccgcgatccccgcctccgcccgacgaaatcttggcggccttgcccctggatcgatcggaatcatccaaggacgacgccgaccccgacgccgccgtacggatcgaaatggcgacgaactccgcggcgagctccccccctcccctccggcggatcaaatcgaatcgaatccaatcgaatcgaatcaatcgctcaccaaatcccgccaagaaacactaatccagcagcagagcagagcgaggaattgggggagtaaatccggggtgcgatttgagggcgggggaagcggagaagaatccctccaaatccgaaaatccgcgaggatttatacgctctcgcgcaagcgcatcaacgcacgaacacgagcacgaaccgaaaggaggacgaaaaataaaaataaaaaataaaaaagaagaggaggagcaggagaaattttcttcacgcaagtaaagactaaagaggggctccggaaataaaaaaaaatgcttggatccagaggctcctccactagtagctggcgccgtcacccactgaccagtgggcccagcggcaggtggcctcacctgtcagaagtcacactcacccggtggtggcacgtggcctcgcggtgactgacgaggtggggacagtggagggtggggccggggggtcagtggggttggagggtgcgcgcgggggaaagaaggttcgagatcccggggggaggaggagaggaagaggacgtggcgggcactatcgcctacaggggtgacgtgtcaagccgggattgggcgcgagttggcgatggggacccggcacggtggcacggccaggcgatcggtttcctcggcaactcggcgccacggctggacaaggcgcaggcagcgacaggcgaggggcaatgcaaatggcatggtggggttgcaaattgcaattttgcattattagcggagcaaaagcaccaacggctcgttgattttgttcgctcccatctaatcacattattttttcgtccccagcccgggtggtgttcggtcacaggagtttttgtccaatcccttgtcaacatagtgtggttacagctcgagacttttattgtgctgtgattctttcttttcttattacattatttccgttacacggcggacacaccattatacgtgaaacatgatacacaccactgcgcatgcaacaccacgctcacacttccacgagtgcgtctcttcacacacgctcagagagataaaaactggctgtatatttatgatcacactaaatcctattgatatttacttacgtacgcgtaatatttatgggtagcaagatttgaaccctaatgggtaaagtcatgcactcactaatgactctatcaccaccccgtgctttccttactgtgtagtgattctcgtggcatcatgtctcgatgtttttatgtttatacttggagcacatcctttagtgacataaccttttattgcacactccaccgaaaaccaactatcacatgttcattcttttcaaacactagcgaagtgacaattctttcgtgataggtgatacccctcgagaatcataccatggtccattcttgatgctaccaccaataaattatgagagaatttcttttatgtccaagtcttcgctgctcataatatttctatcaccattatacttacaagagtgaggaagagatgcgggcgacggcggcacgagaggaagacaaaggcggaggcgaaggcggcgatgcgaggcagaggtgacggcgtgagaagaaagcggatacgacagcggcggcgagagaggtaaagggcgagatgacatggaagaggggatgcgggcggcggtggcgcgaggggaagacgaaggcggacgcggaggcggagacggcggcgcgaaacgatactgacggcaccagacagaggtggcggcacgagaggaaagcaaaggcggcggcggcaagagagggagagagcaagagacaacggctagggttttggatctgtgagagccactttgcgaaaaaaaaaccttcagttttgacaattttaagcacagcccttattcacttttttctcttcttcgtgacgaatatctggtttatgtaagggcttaaacgtaaaatatcagttcaaagactgtttgggagggacttagatcgaattaaactcaaactaaagggttttttcgtaaaacttcaagcgcgtactgttcctatcctacgtggatactggatagcgcgtctgcgcgcctaaccggacagccttgaagagtaaattttcatatatttttttttacccacgagtctcaaaatgccctctcgcttgtgaataagtgttgccataaaaatcatgatcctcaaagtgaaaacgagttcaacttaaaattatttgacccttaatttaaggaaaaaccagttcgaaaagcattaaaagttccctttttgattttatagtaccagaagttctcaactcaggggcaacccacattgaaggtatatacaatggtacaacctagtataggctcctaattaaaacacattagttatagattggcttttgagacaacatagcctgcacaaaaaaaaattacttttctttcctcttctctacctccatggaacaaaatttccttcattcaatgttaagagtcgatcttgagttgagttggtgtcatgcgtatgaaagggtcaattaggcctagaggggggtaaataggctaatttacaacttaagaaatgcggaagcagtaattttcagaactaggctgggaattttcggaacttccgaaaggattttcggaacttccgaaaatgcacagagcaatgcacacaaaagaaaaatctagatctagaagtctattacagggaatacaaggcacaatcagcaactagaccaatagtggcacaagcaagcaaagctagaggagagggataaagaaatatcaccaagatgtagctcccaaagttgttcccggagttcaaatccttgaggggattctactctccgttgaggagctcactaagagccgggtctttgctaaccctttcctcaagaggttgtactaagtactcctccttccactaagaggtatatcttcccttgcggaggcgagatccggccttcacaaacttctcccggccaaccacaggtagatcggtggctcgggagtgacacctagccgtctaggagtcctcaacctccaagagtaaaagatgatgtaaagaactcccggagatgatgcaagtgctcacaaatcttcacaaagaccacaagtagcatccacacaaactcgaatccacactctcacacacacacaccaaatctgaatcaaacacgagtggagagatgaatcgaggaagcaaggctcaaatgaactagagaaagagagcaagcaaagggcacaaataattggaatagaaccagcagccctcacaagtgaggggaggtgggtatttatacccacagcacaaatctgcccattggagtgcaataaaagtaattttcggaacttccgaaacaattttcggaacttccgaaaattccagatctgagaaaaaaatcgaagtcaacgcaatttttggaacttccgaaaaacattttcggaacttccgaaaatttccagaacgcttctgtgtattttcggaacttccaaaaatttccagagagctctcaaacggttctgtgtattttcggaacttccgaaaatttccagaacgctcaaaaacggttatgtgtattttcggaacttccgaaaattcttttcggaacttccaaaaattttcagaacgctccaaaagagaaatgcttcgaagaaaaattgattttgagcacacgcgtcactccttatatgtctatgcatcatcctccttaatagtacagctttcctacgacacaatgcgaggaaaaagatacaatatactatttgatcattgccgcattgcatcgcgatgtcgcattcacgggatatgcattgtattacaacacgttgaggacttaacaaacttcacatttgcttgaataaaaatgttagtcctctctaattgtattgtaatcaatcatcaaaatcattaggggcctagatgcactttcagcgtagcaacaatgtttctctttctcctatctctctctttcatgttaccaaatttacttagatggcaacaaagagagcccgctaataaagatcgttgtatatgatgaaagtgaatgacttacaacaataggatgctcctgtcatcaagttcatcaagcgccgcccttgagcctatctggcggttgcctatgcaccgtcacaataccataacttcgcctatgaaacttgacgaaaaatgttgttccaatacatatcttgctggctagctaaccaatcttgattttatgtataaaaatgtgcacatgcaaattcaaaatgacaattaagtgttttaagaaaaacgaggtgattttaacgtatgattaattgaattttaattattacaaacttgaaaaatagattaatatgatattttagagtaacttttatattaaaagttttcgcacgaaacacaccgtttagcagtttaaaaagcgtgccacgagtatccaaa

SEQ ID NO: 23916 - DNA, 661 bp, Oryza sativa
tgacctctggctgctcctgagtgtgcgcctctggagctcctccaagctgagaggagcctagtacgtcgtggtggtgtgcaccgtgcaagtcgtcgtcgtagaactggctagtaggaccagtcctaccggcgtgagacgaagaggccccagtaccgaagatcccggctgcaaatcctgctggacaaggaccatcagtttcatacaggtatgtaatagtattaataaaaagtaaagtaccgtgtgggcgagggatcgacgctccgtgagaggaagagctggcgaacgcgcccgaagaggtggcgaacgcccctgcggagctcgcggaagcgccggtcgtgcctgcgaacgcgctcgaaggcagacgaggtcctgcgatgaggaaacgtgcagttaaaacatggtgacatattcgtgcaaaagctgaaacaaaaatgaactaatctctgggctaaactgtaccgtgcgaaaccggtgctgtaggtcgcactgctccgaagctaggggcgctcgaaggcaaacgaggtcctgcgaggatggaacatcaagttacgacggggtgatgttttcgcacaaaaacagaaacaaaacttaagaaacctctgggctgagcagtaccgtgcgaaacaggtgccgtaggtcgaggtcctgctccgacggtagg

SEQ ID NO: 23917 - DNA, 693 bp, Oryza sativa
ctgttgatcgcaaataagcatgtatgataataacaacttatttacttacagtgaactggagcaaccaagccttgctaggcccgactgtagagtacggaggaagggtgttggccggtcctaggtgtggaaggcgcatcacctgctcgaagcgcgcagtgatatcctccttccacccaaaaacaccgtccacgggaccaactggtgctcccgccagcggtagcccgagcaggtacgacacgtcctgcagtgtcggagccatctccccacagggaaggtggaacgtgtgcgtctcaggtctccagcggtctaccagagcggcaaggagtgaccggtctgcatcccaccgcttcgctgggtcacggtcgtccgccgccccctcaacaagcctacaaagtggtagaaggcctgccgcacgcaaccagtatagagcaaacttcaaacataagtacaacacaaagcaaagttgagttgaaatgtgaacatacgcgtaccaaggaacgtgacgggggtcgacacgcaaccactcgcgcgacgtgcgtggatggaaggtgccgagctgtgcaccctcgactgctgacaggaacgagcggtggttcctgtcaatcccacggttcaacagcgccggtgtgtcgtacgccatacctgcatcaaatagattgatcagaaacatataaataattgggctgcaggaat

SEQ ID NO: 23918 - DNA, 8675 bp, Oryza sativa
ttgctagccctagaaattcctcccagaaacatataattaattataacaaatcgctcactaattcgtttcagtgatagacaggcttgagtatttcgccaaatgatatgattgccctatcaatcacaaccccacaagtagtcgtaaagttcaacagaaagttgtttttgatttcttgatttcgacgccttagggtgacaacatagaaaacacaatatatatatttttgtttccataataaaaaaaagtcttacagttacatgtacagcatagtttatatagacagggtcacataacataacataataggcaataatctaccaatacaatttacatcatgaacgtagcaaagacggaattaattagtatttaagcacaaatgattccgagcaagatgcaacgagttaagctaggctattggtacaccatacacaggtagaaaaaagtgtacaacgatcaacaacataaaaaaaaaagaaagaaattatatcgcccaatgatgaagtacgagagggacatttcaaccaaaagtatgatgttgcatgtaacaaccaatagaaatggacctaggtttttcggtattgcacaaggcaggcaggcagcagggggcgtgtgcccacaccaaaggtaccaacctgaacttgcagacaagcgaaagattccaatacgcataaaaaagttgctttcaaacaaatctgtaaaatcattcaccccttgaaacttttgcaatgcagaaagcaaagaattattgatggggagttcacattattcaatctccatctttacatttttcctttgacaccatcgtacaaaagtcgggcatacttggttgttctgagacgacatgatagctgctaactatttttagcatgttgttgagatgtatcactatgcctttgaatctaaaacagaaggaagttggctgacatctagaacatatatactgtacataccatatggaattggcaacatagaactgtatcaagaaatgattaatctatctgtattgctgtctattattagggttccattttattacgatgtggtactgattaggagggaaaagactttatttagatttagggacacaagaatgagagcacaagctacactgagcttgccaaataacaaaaggttatttgagacactgacaatgaaacaagctgcaaaccacagaacagaacacaaggcaaacatggaaatctcagtttataagcatatgccactggcaaaattgacttgttgctccaactccatatcgtactataattcgctcgcaccttgttttcctcttctggaaaggagagcatctgtagcccctggttagaaaaactcaacaaagcgttcatagggcatactccctccgtttcacaatgtaagtcattctagcatttcccacattcatattgatgttaatgaatctagatagatatatatgtctagattcattacatcaatatgaatgtgggaaatgctagaatgacttatattgtgaaacggaggaagtatgcactaaatgctctaggatacgtgagtcgtgctgggaaattctgctgctcgctcaaccttacgagcaagactaagtgcgagcgatttgctatactatgcttactctgggctcactgtcaaagacacagttacattgttcgcccttttaacaagaactttaaatggcactccaaccttgtcccccatgatatcaatgatctggaataaatattttatttataaatatggtttaacatgctcttggctcttggattgaagacaggacaatataattactaggttcctaaaggaatactgtaagtgatacactagttagcttagttacctctttgatgcttcaaccagtttaccatcaaattcaacgaccacatccccaggacgaaatcctgcatgttcagctggtgatcctggtgtaacctggttgacactcatatggtgtcagcagtgccaactactattatgatcataataaaaatagacgcatgctaaacatgtgacaccagatttgcagttgagttaaacagtcatagactccagccaatatccaaaggccattgcactgtgatgattaaaactgaacagtaaaattcaattcaaacaaggtgattagatccactctacccagctgcaagaagattcatcagacatgatgaattaagcatcacttaccattggaacaagcacaccattttttacatctggaaaagaacttgatctttctttaagttgtgcaatgatcattgggttaaggtcaagcatctttaaaccaagccatggtcttacaactctcctgcattgcatgttggagaagtataagtagcagctaagcatattacaagctaaaccagaacaactaagctaagtgttcattacaaaagcaaagccatgtctgatttcaagtaattgttcactattgaatgaggtttcattacttctcttcgcacaagagaaaccaacaggaactagaagatttaatcatgataaaataaatgtgacgataatacatatattacagaactttactgttgtaagcatgttgaaactattttgaaagaacacacccattttaccccatttgactcttatgagcccccaaactacaaaagcataggcctcaccagtgttttcctctctctctctctgtttctcttatatgcaactgccagcagctgagcgccgctcccttcccaataccctcactgtcaaagttactacacgagcaaccttgtcactgtcttattttcaaatatgcatcttctcgtaattttatctccccaactatcctcaataatcctgctgggtctaagcagtgctctcattcctcacatcttaagccatggaggcaaggtggagcagtggccaagatcaaacgaattgataagatgcaaagttggctggttggaaaagtcttgctgtcttgaagaatggtacaaaagttcacatactcatcaagagtgaattcatatcattttaaacacagcgaaggaaaacaggtgaaatggaaaaccacatgtatgctaccaaaaaattgaaatgggtgagaatcgccttcctattcacagtcacctactcctagtcctcatctacccactgatacggattgtttggggaattcgaactaaatataccagcccatcccggaaaattggtcatgatttaacccgtgctaaacaagacttgagtgggatcaatgactgctatggtgaggaactcaataacatggtagctaattcaacagctttatggctgtgtaaggcaccgaaataaggtcagtgaccacaactgcttgaagcggcggtgatcagcatgaaactattagtgagggcttccatgtgtgcattagtatgccaactgtgaccatgtgcacactaatatgcacatgaaaaggacaagtagggtttgtttttgccaagatatagttactacattaggacgtgacgactcgaaatttcgaatgccatgtcaatcaaaaccacactagtcttgagagtaaagggtttactgattttgataatcaagagggtgaaacttagacggtcatgtagttgaagggttgaagttggattcttctggtaattgagggtgtatactagatatatacctatttcaaaattgacagaaatattacaagctgatttgaaagtatgatactatgatgctagatgtcctcataattcattcttgtacaagagtgcaatgcatgtggaatttatgtcacaaaaaaaagaaaactattcataaaagtcaatgcataaagacagactaaccaccaaacggtttcttgtattttatttctcccacagaacaagttggaaacaatgagggcattccatttaattctcacatttatagaagtacctaagtgggtaaactacaggctttaatcactaaaaaaacctcaacctgaactgaacaaatatatttcaaaagaaaagacgaaatacacaggaatggtatctaggaataaatagtacaatgcaactggcatcatacaacttagaaggaaggcatacccatttttcttgaagttctccactattttcacaatagagtcaatcggtactgcaaagctcaaaccatcagctgcccaaactttcatcacattaactccgacaatttcaccgtcaagattcacaagtggaccaccagagtttccctgtgtccaataaatgcgtgaactatttgacatagagaaattgagaaactagaacaggaactagggaaaaaaatatatcctagaagtcggtacatgtgagcccaatcatccataggacagagtacagaaccaacaaaaaataactccaacagacacaaaggagtttatgttcctccaaacaagtataacaagaaagcaagaaaattaaaaggaaaatgggatggttgacagcacaatgtactatatttttagttgggtaagccctgataagaaggggaaaagtaattcacaattttccgattacccccttctgcaattactagaattgcgatcctgaatcaaattgtatatgcttcagtagaattgaactctaggatcaaagcgtagaatcttagacctattccaaagtggcatgagagtccgtttgatcaccgtggcacctaatttgattcatttatcgtttatcttagcaccataatactgtattcctcttaataacataataccgtggaatacatgcattattgactgattttttttcagcaatgtgcagtacattccatgggttaatggtaagcatgtttattagatcatttacacataatttggttggtaaatatactccctccgtcccaaaataagttcatctttgcctccacttgtttgtcccagaataggttcatttttaagcaatcattacattgtagtttgtgaaagtagggggacaaatgcgttggaagtaagtgggggacaattccatcgggatttagttggagggtattctagtcctcttgcttttgtattggtatgtatgtgatgggtgaaaaatgaactaattttgggacggaggtagtattatttagcaactaggtcacattctgatatcatttgaacaattctacgcctagaatagcaattttaatgatcttgacattttatgtgacaaactaaactaaatatatgtaatccatttttactttttcatccttcaggattccaaatttaaagagaaaatctaattcatcaaataataacttcaaagtaatcaacgtagaagttctaattctttccaaacctgagaaagaccacacaagccaactcccagaatggtacaatcttatacgatcctacacgactagtgatcctatgactgggattacaagcattcgtggatgagctgtagctcagtggtagatcacccagtagaggtctcggtgggcttcgtacccacttccctgcacaaggtttcgggggccccttctttaaagccaactcaagggggacatacttgccccttcattgagtttttttaggattgcgagacttccagatatgattcttgatatgattttagttgtttggttgggtggaatcgtagaaatcaccctataactagaatcgtgattttaacaaccaattgttaccacccagtgagatgatataccaatggtaaccactcactgaacaaacagagtacataaaggagataacacctatgagtaccactcactgaacaacagaacagagtagctgagaactgtgtggtgttacgttaattgttttatcagtgggtttgaaccacaaaactactttgacatatgcttattagatatattaaaatttttctgcatttattgtgatggtttggtgacagggagtagtacaatggcataaacattagtataaaacaatctagtgtactcataaaagcaatgacttaggggtataatgtaaagggtcttgccttattgatagcacaatctgtttgcaaatactcccttcttattcctccaagacctaggtcactgcttttccggtcaacacaactacaagagaatggggtggaagtgaaacattgaagccataaaaacaagtagaaagcttgcaatcagaaggtagctaataatcttagtgatggacaacaaatgagagtacaacaaactaaagagattaggtctgcacttagggaggtgttaaccttacaataccagctgtaactgtgttttgaagagaaagtgggcagcccaaagcaacaacccaatcacctggtcgaagtttagatgatgatccaagatttgcagatggtaaaggggtcttcgatttaatcttcacaacagcaatgtcagagtgacgatcagcattgagaacagtgccttcaaactcacgaccatcttgcaaagtcacactaacctattacaatttcaacctttgtaagaaaagaatcaggatttatacaaacacattgcaaaaataacctatatcaaccaaaatcatgcaagaattatcaaatagtactaagtaagaaacagtataaaagtatttatcataattcataagcacaactattgtataataatttttaagaaaacaagtacttagatgatccggaccattaggcactgaattatccattctaacatggacaataatttggccccacacttcatagctatcataagcacagctataataatttgaccatactaaaatttaggattttaccactagtacagagaaaaaaattattctacgtcattctctttcttcaaaagaacattaaaggcctataacactcagtttgtccaagcgcaaagtggtatttgaaatacaaaaccaaacagtaaattccaatacaagccaattgtaatttgttgcatctgtactaatataaggaaataagttagtacataaaagcctgaattctaaagcttggagtatatcagataagtgtatttctgatgtccaagattattttcccatattagggaaaaaaacactaaccccggaaaagaagaagaagaagaaaagaacaatatgatataaggggttatccatatcatggcattgagtttcatcaaatgcctatgtgtgccactaatgtctcaccaacgtaagacaactgcatgttaccctcacattttctttggcatatttcagatattgatgaaaactattggcacagcatggatttatcctataaaatactggtatacttcccccgtgagtaaattatattcaggactgagcaaaaatcacagatttatatgaataagtgcaggaaacataatgaagaagtgtacagcttgagatgaacagaaaactacgaaagttagtgacatgttaacaacctttcccctcaagattggttttgtgctttgaaaatctagaacaacatgggcacatgtcaatattgtcccatctgggtctattatggttccagatccaatgctcttctctagaacccatccatgagtttctacaaaaagacaaacaaaagtttattatgtatagctaatgtgctgactgtaagttttcacaccctcctttagacagtttttaccttgtgtagaagaaatgttgacaacagcaggaccaactgcagctgcagccttggcgattgtatttcggttaatacatcctgggcaacattttgaatcatctgagtttccatcagagctctggttgctcaaattagtgggtggaactgacgcagatgcgaaggaattttgggtgggaaaccctgcactccaatttgatgcagatgtgaagaaatttaggaaggaaaaccctgcacgtaaactgtacacattaagatcttcaaggaaaaaaatacgagagattaatcaagaagatatggtggctactattgttttcagcaaaaataaataaataaataaattctcttgagtgcttctcttatatagtgaatatgttgttaagttacacatcgtgaatattctcataacattttattgacaatcacagaagctgttcagctcaaatactcataaaaggcatttatacagtgtagaggcaatttcataccttctacagaacaagcgaaagtcaaagctaactgttaacagctgaaatctagcacatacttacatggtcagatatacgcagattctgcaatgtaatgggataacatactatgttctcatctccacacacaacatgccatcagattggtcctcaaccagtccttttggtacacagcacaatagagtacatataatataacatagtgggggcacacgctcaatttaacttttttattttaggaatgactgaatttaaattaactacccatcaagaaagcaactgcacagataaacaaagaaaaactcccacgcacaggatctctcacccacctactaaaaattcagaagcattgttcatttccacatcgaaccaccatttccggaaatcacaatggtggttaaactagaataactccagcacattgatgcacaacaccgtagctacacaccacacgctagaatgtatgcatatgacaaggcggccacaaatttatagctcaatatcacactatgttcatacatagttggcaaaatacattgaactcgcccaggaaagcagatcacgcatctacgtcgagcaatcacagtaggaaaaaaaaacaatgaatcaatccaccgttgcgagaaccgtacacgtcaccccgacgaacgacgacgccgaaaaatggcaggagctagtctgaaagaga

SEQ ID NO: 23919 - DNA, 10725 bp, Oryza sativa
tcatgatgcacttagaagttagaatgcagttcagacgatgacaaacggaccattgcaaacaaaaaaataagtagaattaatctcgtaaaatagtttagagatgatgctgatgaactgtgatggagacctgtatgttgacatgttgtgtctctccttaattatgtagagcatgacaatttagtgtgataaaataatagtaacatttcatgctagctagaatgactcaacactgtcgtttggattgatccaatgggcatctgattcgacaaccacagccacttgcattaacaagttaacatcagctgcaagcagacatggatactttggcatgcagctctgatgaacatcagtagactcactgtactccagtccactagacttgtctgctctgcatatgccatggaattctctgaactttgttgcattttgcatcatgctgcctgcagaagcctgaattttacaaggcagagaacgaccagtccacatgtcacaatgactttgcacggtgctgtactgtagtactatgtacttttctctatgtccaaacactttctctgaatagtggtgatcttggacagttcagaagctcagtacgtatacttttctgtggtccaggagaaagagttttttcatttctttcttgttctgttctgcaaataactgaacattaatttgatcgatttgtatgaggtggtggctccatctgttgccttgtctggctgcagtgttctcgaagacagggactgaattttactttcggtagtttactcctcaaaccaaaaaatgtttctagaagcaaaggtttggatgtggacatattttgtagctaaactgatgtggattgatgggggttaaagaaatgcatggaagtggaagctgcaggaaggttttcttttctgaaaccatgttcagcatcggtattgtataatactaatagtttcattgtcttgtatgtttctttctcatttaaaaactttttagaggcgcatactttcgtggtatttgttaatgcagataatgcaaataacccgctacttgccactgcttttgtaaaacaaaattctggcataatgttaacataagcaccttctgtgtaaaaaaataatttctagctataaatctaagcaccgtctatacccagatttaaagttagaagttgattttttttcctgtaacaggggagcagcggggaagtgtgtatacctatctgtaatgaactgacatttctaaatagctatccttaatggtggatctaaacaaaataacgggaaagcatagtgcttccttcgtttcaaaatataaggattttcatgttgtttagccaatcccaaggttaggtcaaaagattcatttttagtcacttaagttgttaattttgatattctaaattacttagatcctctttctaggcatgtgatcgacttaaaatcactaaaataacgagaatcatatgaatcaatatagaaatcactatatagtggtataaagttcgagttccagaaattcattgtagaatgaagggaggaccaaagaacacgtgatgagtagaaaaatgttgtgaaaacacctgcacagcacctctactgtactccgtcaaaccggcaaacccatggcggctgcctagcggtcgtcggttcctttggtcggccactgcttctgctggatctgcatctgtggagacaacaaatcgtgtcttgaggaaatcattcaagctcatactcgtattaatcaacatcaaaattctctctctagatctctctcccaattcatcatcatgtctaagactaagatcgagaaggtggaataagggcaatcccaaccccctacctcagttagtgtccatagtattaaatacactgtcacatatgtaaaattttgaagcgctaaacaggggcgaagctagcatcaaaacaaggggaatgcactaccattgagaatctagaaaatttcagtacaacactgtacattctagtgtttttaagtgagaaattaggaatttgggggttcatgtgcacctccaatataacatagcttcgccactagcgctaaaagagttaacaagaagataggtaaaaagatgaatacactattttttatgtaagaaatcatctctatacaaggagatatgtggctaaaagagaagagaagagaggtgattggatgataatttaatttgaagataccaatggtataatgtttatatggcagagcaagtacgtggttgggattgtcctattgcatcgatcaatctctcattcaatcgtatcatgaacccaggatgggccagattcatcacttaccggcatggcagggagatccaaattaaatacagacacttgcctcgttgctttacatgtcatcgattgcctctacatatcaccttgattttctttttcttcttttgtcctttggattgttctgggggcagcctaatctagttttgtgtgattggttcacggtggtataactttagttctggtttgtgcctttgaggattatttgttgattaattaactttagtttgcgtttgtacctttcaggttatattgattttgggtctgttcactttgatgtcatttttaaccatactaatttttctgttaaagttgtcaaaaaaatatctacgtttagtttattgccaaatttggtcaatacataagaaatcctgtcaaaattttagcaatattgccatcttgctaaaattctaaaaattttgatattactaaaacttgttaaggtttattttgactacaatctgaacagaacaggctctttaggcaagctgttagaaaagcaaaagcttctagaaggaaactatacatcggtgtgcatggattctttttaccagcctggatgttgatgggtgagtcaacactcgagacaccacaagcgtgagtgcgtgacatgtactgcatattccaaatggagggatttttacacacaaggacaatagagtttagtacttttggggaagaaatgaccggacatttggagttaacatatgcattttttactattgttaccacaaggacaattttcatgaagtcattatctttgactgagtacacccttttctgggtgtagaggttttaatctattgttttttaagaaaataaagtatttatcttattagtacaagttatgattttattgtaccgtttcatgcaaatagatgatggtgaaattttgtcaaataaatatgacattgtgctatattgtagtactatagtatttatagaaaatttcataatcatcagggcgcgcacgtttttcctgaagcttggatattgtataatatctaattaggctgagttctaaatagatattcagaacgtctattttctttcgtgaaaccagctttctcaaaccacgtgtttcttgtaaaagttatatatacacatgtttttctttaaaaatatttttaaatttatagtagttaacactaatttatctcgtttgcatgccaaaaaatcctaaacagttatagagttgtgtatatagatcaagaaaacaaaaccggccttattgtcaagtaccagtaattaagcactgaaaatgatacttcctccatccattaaagttagacatattttatatttaagtttttcaaataagttgttcctacttataggctctacacatttaaatagagaggaaaattaaatgattgatcagaatccgagaaaccatttttatactaaatggttgtacgcgtgcatatatctttgttttgttatataccagatgagttaattttttttggtcttggtgataaaaataatgtgtaatatttggaaaggatatgaagtaccacatattttatcgacgagagtggtactcccaagatccacagcaaaattaattttggatcgagtctcttcatcgcttttgtcattcggctccagctcttctcagggcactcccaaccctccacctcagctagtgtctatagaatttattaggctgccacataagcaaaaatatgatgtggcaaagaatttaatgaagggagagaagaaaaaaagagagaaaccgtgtctcatgcacgaaacggggtcgggcgcaggcaccaagactacgaaacaagagaaactagcgttgggggcaactcatcgtttcttccgcccggattttcctcgagctctcgatctgctgcgcccgcctccatcccgccgccatgcctaccaccgtcccgcgccaaatcctcacgatttttcggcgcgcccctaatcctcttcgcgccaacaccagctcgtgcttctctctatccatctcgttgcctccttttttccctaatcacttgtcttctccaatctctctcgtgacagctagaatcagccaaaaccatccccaatcgctcatccctgagaaagtagttctccctagccatgcgcaagcatgaatctgacggaatcgaagatgcgtcgatccaaatccaatcaggctgccggtgaatcgactgcccttgatccagatgccgctagtgttgtgggagccgacggtgctccagattctactgttgttgcttgtggtgctctacgagctagtgctctaggcgctggctttcctaccgtaggtgctcatgccgccagtgcatggtggcaggaatcatctcccggtagctcggaatggtaaggtgcaaatttttgtatgcaaagatttaggttaatcaatgttattagtaaattaatgggttatattaggctgacaactttttgcttcagagaattgctaatctagtgttgtatagctggcacttttttactttaaagaattttttgctagcctcggtggcaagatgtatagctggtactgctaattacttgtattcacctgattaatttaagtcaaactcatatatgctagtttatggggactgatttttttctgaaatatattgtgcttgtatttcaccacttctgttcttgacacagatattaattttttttgttgttttctttttcaagatgtatccaccaggtggtttcctaaattatttacagagtaataagatctctccatttacccagacacatccatttgtgaactatcataatgcaagtcagctgccagaaaatttccactttgttggtgcaccaatgagttattctacaatgtcacctacaactccatgttctaaagcgataccgtcaccaactgggaggtgtgctgcagcacaaataggttcacaagataaagaaacaattgatattgaggacgatgacaccatcgagcctgctagatccgatgctaggtccgagaagcgattgaattggtcaaatgaagaagacattagattggtaagttaattttctttgtttctttttgaagatttcagtctgtatgcatttaaaattatttgcacttcattaaaggtacggtttattcttctcctaattgtaggctagtgcttggctgcacaattcaattgacccgatcaatggaaatgataagaagtcatatcaatattggttagatgttactgctacatacaacagtaccactaagagtaaccgtatgagaaatcgtaaccagttgaagcaacgttgggagcgcattaagaaaccagtctccgaattcaatggttgctatgcaagaatcactaaaatacatcaaagtggtatgagtgaagaccaaaagatggaccaagcattccagctatatgcctctgaacataatgacaagcctttcacaatggtgcatgtatggaggatattacggcatgagaaaaagtggtctacatatttgaagaaaattaacaaggaaaagtacaagagtataacttctaacccaactcatgttgtgaatgtcgaagatgctccaaaactgcgtcctattaggcataagaaggccaaagatgaacgcagcggaaaacgtctggcatcagaggctatttctgttattgaccagaaactagataaattcattgaagcaagcagcaaggctgagaagataggagaggtacaacaaagtttggcaaataagaagctagaagtagccaaccttaatcataaagcagctcaggaacaaacaaagagtaaaatgattgacctttacaaagacttactgctagctcccacaagtgatcttagagaaagttcaatactatagcccactactagctccaattcatctatagccaatctaatagctaatttatacaatgttgcttcctataatattaatatatggtcccacctgccatacacatattgcatcttggagcctgtgctacagctggctacaaatctgtagtctgctgctcttctctcttattatttatctcattaaaatatatttatagctggctaatagcctgctattgtacctgctcttagtgaagaagctttggctgagagatccaaaacattggagtgtatgagattggctttgtttgctaaagataattgaggtatgtttttaatatattgttggcaaacaaattgtgttgtgatagtaccattcaaatctgaacaagtgttaattttgtcaattgtgtgaactcattttatttttctagtgcttgtttgaacacaattaattatgttaactcattttttatactgcatgttgaacacaattaattttgtgaacctattttctttttatactacaactgaatactatcaattgtgtgaatgcatcctctttttgtactgcatttgaccactatctattgtgtggacccattttatttttctagttcttgtttgaacacaactaattatgtgaactcatttttttatactgcatgttgaacacaattaattttgtgaacccattttccttttatactacaactgaatactatcaattgtgtgaatgcatcttctttttatactgcatctgaccactatctattgtgtgaacccattttttctactgcaactgaacaccattaattgtgtgaacccatttgactaccctgacatatttatgtgtgtgtatatatatcctctagctcacacattctccccctcctctgccttccacattctttcttccctctttactcttccatcttctctcatccttaacaccatgtcgaaccaatctgatggtgattcccctacacatgatgattctcttgatgaggtgagcagcatagatccaatggatctgtacccattggatgagatcagcaacatattgggtgatcttgctgatcatgtggtagccgaattgaagtccgaagttgaagctctacaagatatgagacctactaggcagagtggtccgaggaggtatgttgataggccttatgaagaatctaaacatgggctattgaaagattactttgtacagaatccagtctataatgatacaaccttccggagaagattcaggatgaaaaagcacctcttcttacgcattgttgaagccctaggccagtgggataaatatttcacactgagaatggatgctcttaaccgcccagggttatctccacttaagaaatgcacatcggctatttgccaattgggaaatggtagccctgcagatcagcttgatgagtatctaaatattggagatagtactacagtggagtgcttgaagatgtttgtgaagggtgtgattgaggtattcggtgcagagtatttgcgacgccccatggtgcaagatgttgaacgcttagtgcagattggtgagcgtcgtggtttcccgggcatgttagggagcattgactgcatgcactggcattgggagaaatgccctgttgcatggaaggaaatgtatacccgtggtaatcaaggtgttcctacggtcattctagaagcagtagcttcacatgatcgttggatatggcatgccttttttggtgttgctggatccaacaatgatattaacgtccttaatcaatcaccattgttcgtccagcaactaagaggggaaggtcctcaggtgcagtaccatgtcaatggaaggcaatacaacacaggttattaccttgcagatggcatatacccagaatgggctgtctttgttaagtcaatacgtcatccacaatctgaaaagcacaagttgtttgcaaaacatcaagaagggaaatggaaggatgttgaatgtgcttttggtattttacaatctcgctttagtattttgaaacgacctgcacgtctatatgatcaaggggatcttgagaatatcatgctagcttgtattatccttcacaacatggtaatcgaagatgagaaagacatcgagcagcttcctcttgatttgaatgagacaccaagcacattaactgtataagaagctacaatctcacaaggacctaacccagagatggaagaagtgatacaaagaaatgctattattcgtgatcgtattactcataagcaacttcaatcagacttgattgagcatatctagcaaaactttaggaattcaaactaattaggtgattgttaatcatttaaagtctaatttacaatttgcgtgttgctaataactagtatgtttcattttaagttgcaatctctgttacattttagcctagcagtaccagtttagctaattatgttctcacttatttttcttgatgtaaagcttctgcattattttgatattgacttgccaactattttctttttatagatcaagtcctgctattttggtgctgttgtgctgctggtggaaatgctatggatcaagttcggtatgctgtcgaagcgtgtggcagacttatggttacatatgtttttttggtttggtgttgcagtgcatctagaagaactgctcatgtcataagagactaatttgagtccaactattttggctgccagtttgggtcctaccatttggctacctatatgttttttttcctttttattgtactgagatggatgaacttgaaaattcgctactactttatgctcatatatgcactgatatctgctagtttctactcatataatgtgatttgcactaatatatgttcatgttttgatatttggcactacagtactatgtagattggcgttcatatttggacgtatgcattgatgtgtgtcacagttgatccttctccatttacaggacatgcaaatagctattaaattttcttctcttagaaactgctatagacactgtgcattggggaggtagtgtctacaaatgcatttattattgtttctctcttctagacactacctatagacaccatggattgggagtgcactcagaccgtacgtcaagagcaataaatatagaaaagccgtgctataaaaccgtttcgtactttctcattgcttcggtcaaggagccgtttctcacggcatttaacgcataaaatccgtattagtgaagatgtgcacatttcgatcgtgcagctagctagctagcacgcaaattttgtggcacgaccgtgtgccacgccacgacggctactcgcgtcgaccattattcgtaaaatctcagttggttcgttttccacgcgaggattgtaattaactttggatgacgcccatggatatatcgagcgatagacccacacaacacgcgtcgatgatgagcaaccaagcggtggccgatggatcgatatatccaccgccggaattgaccgaaattccgtgggcgcgccggcaattttccagccagcgagaccacggatcacgtggccggcaagtttaagcttgatcatcccctaagattatttttaggatcttctaaaaaataattattctccctaactagtcgtgtctctctgtttatttgtatgaagaataaatagacataatttaatacgctgcatgtaaccacggccaagattaatttatattagtgtaacctcgtgcaatatttaaagcttgatgcaattcacggggcacgagcgacgtagcatcttaaccgatgaggattaatttcagaattataaaggttttattgtctttggcctttacattctttgcttaggtgatgatcaaatcaggataaagggagtagtaggctatgttcggatgtatggttcctaactttaattccttgttttccacgcgcacatttttatactcggtgcatttttataagaaaaaaatataggaaagttaattttaaaaaaatcatatgaatccatctttcaagttatctttagctctgcgccatgaacacaatagatccaacctagtgctcgctgcatttggcctcggaggcaatggtagctcaagcgtcggatctggcttcctctacttcctcggctagttggatcctattgaagctcaatggtggtggcaacagatgctttgcgtcgtgatcacaacctccctaacgcggtttcgacctttgctcatgtgcatcattgtccttcgtcctaacaatccgtgacaagattcgtgtattctcgtgagggcttgcgcaccctagcaagggcataacccacgcttatgtggacgggaatcttcgagctgacgaggtgaggccaaccactatctcaccacactgtaaatggcctaagtatagattttaacaatgtgtagccatggaattagaaaatgaactacactatataaagctgacaaaagcaattctttcagagtctcatatgttagctactccctccatctcaaaatataagcatttttagtttagtgacaagtcaaacattatcaactttgactattaatagaaaaaaataaaaaagattaatcatataaaattgatgttactagatttatcattaaacaaactatcataatatgtaatttttttattttaaacatcttactt

SEQ ID NO: 23920 - DNA, 11435 bp, Oryza sativa
catcacaaaaatgattttacatggttttcatttttattttttttagaaacacagtacaaacatcgtctcactatcaacaggtacgtcgcttaccactaaaataatagttagccgtaaatacgagcacacgtgtcaagtctaggacttgagctcgggtgggttggtttcaccacaaggaatctaaccagttaagttacactcaatttactttttgttttatttttataaacattgaattaggaaatataagaactgaaatgcatattgaaaactacgtagattggtatataaatgtgaacaaacattgagtattgcccactactttctccttgcgtcttaggtcctactaatatttaggaagctgtaaattaattctgataagtagtaagtgagaatttaaaatgttagattaatttttttgagtttattttttaactaaatctgtacccaacgttcttaaatatgagtgaaagtgatctaaattatttaggggttgttcagattgatgttgtttcaaatcatatcttttttaaagtaaagttatcaaatatgtgcatacatttttttccaaacttgcctaaacacatataaggaatcctgttaaaattcaataatattgtcaacttaacaaaattttgataatgccaaaattcggtaaatttcattttgattacaatctgatcagctccttagatagctaaaaattatggaagctctctaaacatgagctataatcatattcctacatgtttggaacacgggagacatgaggaatatctctatggaataagtgaaagctaacatgagaattgagattaatttgcatgagatgagtgcctgacacatccacacgtgcataagcttcatcagttccctggtcatcaggaatctgcacagtacgtatatatcctacttaattatgtgctccaccatgttatgagatctaaagattctctgagaaccgagcgttgctcggttggctagcttcgctggtgagcgagcagcccgcgcgggttcgatccctgggatcgtcacccgcgtgtctcaccgggatttattcccaaataaatttccagctctcccgtgccagcgccacaatagtagagtgacgtcctcgtcacacacaaggttcttaggtggctttgtgtatctcattagtacgtgtgtgtatagttgataggtctagcatgcgtgtaggggtgtgggtgtgtgtgcgtggtggagtgcgtttgcacgtatgttcagatactacagcttgtactcaaagtggagagctctcaaaaaaaaaaaatctaaagattctcttagagagagtataatagcagactaatagctagctataaatatattttagtaagataaaagatgagagagaagaacagcgggctacaaattcgtagtcagctatagcacggactacaagacgtaatgtgcatataataggtgggatcatatattaatagtatagtaagcaactattatataaattaactattagattggttataaatgaattagagttagtagtgggctatactattaaacttgctcttggagataactatgaaaattagcagatggattgccatggcagaggggatcgatcagtacgatcgatttgaaataataatgctcttgtcttcgctttacatgtcatatcggagcctcttcatcactttatagtactccgtacatattttttttgtaaggtgctagtatatgtgtaagcgattggtgcgtggtggggccatcgtgtttgtgcgattgtgggatcgatcgatctcacgatggatgggtacgggtgctcatgcaggctgtgatcggtcgcaatgattgaaatgatttgattgaaatgatttgctacgcttcggtgcagaaattattaagtaatttttatttattttttttgacaatcggctataagtaaaaggaaaaaataataaaatgtgagggtttattagtatttatcatcagacaagcaaatcattactcgcgatttaatgtggaacagattgataatatattgataagtgcatgttaaatactataaaaaatgatatatagatttgttaaaatattgtaaaaatgatgtgagggatgatgattagatatacttgcagattgatttgtagaattaaataagttatagatgatgttgtatgtttgtatgatattaaatatgcaattattgagtgtgtgatgatgtgccatggttgcaagttgagttttagaggttagtggacattaactttattaactttatagtaatataggattaaagcaaaactctcgtcgtccacagatcgcttttttttttcatcaaatccaaattacaatttgctcgttattcggtagcacatcttttaaactgttaaatagtatgcttttaaaaatcctatttacatagaagtttctttaaaaatttagattaactcacttttaaagtttgtaataattaaccactccatcctaaattataagacctatattttttatacgatccttgatgccatattttagttattaatttatttcatattatacttccaacgaatatgaaaaatacttgatataacacgtgtaatgcttagcatagatatggttagtatgattatcagttaaaaaataccgagtttaatttcctttaaaaagaggtgccatataatttgaaacgaagggagtaatacttgattatccatgtgcgaatgacttatcttactttatgtgccgttgaaaagctaaagtaagctaaattcaaatagccatatcaaaaaattaattctaaagttgattttttttttgaagtagtctatttttaaccttcttttaaattgatataatatacatatgtcaaagtttatactgtaaatcagctttagttgcttcgtttatttttttaacactttagtcgtcatagctctcaacataatcctatttatttttaaagtttatattcaattaagtgttgctaatattatttctctattatctattaagctacattagcttaattgttcctaacacttgataattaatctatggtccaaattaccctatcattttttctcttatgaagtcatatcatcttagctttgtatttagatgattaatttatattatctttcttcttttctttctcttattgagccaatcattttagttctaattttggacgatcaatctatatataatttaaattattataaactacattatcttaattatttataggccatgttcttttctctaacaaaagttggattaaattttggatactcgtggcatgcttttcaaactgctaaatggtgcgttccgtgcgaaaactttctatataaaagttattctaaaatatcagattaatctattttttaaatttgaaataattagaactcaattaatcacatgttattacaacctcgttttacgtgaaacacttaatcttcatattaatctttattttcatgacattcaaacaccaccatagtttttttaatagtcgatcaaagatgaaaattacataaagttatgttgtctagctctcttaaatattatttgtactattatatacaatttttttagcaacatgcgaggtttcatctgattaacctggaattagagcgataacgtattgtacctatctaggttaaagccatagtactgcagctggaacatcttctagaagcagagatcgatggagctagctagctgagcaacaagaggatctggatatgaatgtacgatgcaaccttgtcaccagctcagatgttgacccttgcatgggaaaggcgccaagaaaaaggacattgtagagtagtgattcagatgttgggagtgaataattaagtgcagcttaattagatcagataggacagtgatgagtggttgtgtgtcctcaaattaggcacttttgattagttagtatcactcaaatgtacatatgtaaagtctatgttagcttttagggcaccatgtgcaaatgcttggtcgtccttggccgatagatgtgaataataagtggtgaaaattacgtatatttttcgtttagtagggtatcaataagagattgttaaaccagtgcgatgttttaatattaacttactcatactattagattagactccgtcttatatatagatttactggaaaaatatccgtacgttgcaacgggtgaagaatattttaatcttattattgttatatggtttagttgagatgaaattcactgtgttaaactcacttggataaatagtttgttagaaaatcatgagctgtaattaggagtccaattgtctcaagttaatatgcgaggtttttgaaaagatttcttatacgattccttctatatttttaaaagcgaaagaacttaaaacccgtctcaaatatagattttgtatttctaaaagcgaacggatttaaaacccgactcatatacagataacgtagcaaaaacatcttcaatttttataatagtagagattattagcggctttgacatgtcactctgccttatcaacatgacttggtgactaactagctaggtggagtactatggtactatgccttgatacttcaattgtgtaataaagtttgctcgtctcacacatccatcagtccaaccagttaattcttatcgtcttgctatctctatcagttggtctttttttcctcacattcattttccattttctttgtacaagatgaaaaggaaactcgttgaaagaccccccacaagtagaatgtacaggaagatattaccttttccgtcttagaaaaaataacttttacctacgaatctaagttaaaagtgattttttttacagatacgcaaagaggccgagctatcctaataaccaggatttatcttttcgtttttgaagtaaatcgctcttcaccggttcacccaaaaccgataaacaccaacgactcacggtcaacaccttacgaaaatcggctaatatccaacggttcaataaagcattgtccaggtcaagtgatgccgtcctacgtggaaggattggaacgggtgagctggaaaagtgactaccaggtgggccccaccgatcctaaatccgtttctcatttttttactgcaagtaataactatccctcttttctttgtcccgtactggacggttgaaagtacatgaatgagaggcggtggtggggcccgcggctggtaaggtgggcccaccgacgacttgtccacccagcgggagagccgggcccaccggccggccgccgaacacccgcctgcctgcctgccccatgtgggctcgggcccaccaggtttttttcccttttctttttaagttttccccgtagtaatctatacaagctgttgtcattttcttccttaaaaatgtgatcctaatccaacgaatactcctaaaattatggagaaacttattggtttattatagcactatagttgaattcacttctccagtgttctaggtcaactgctaatctccaccgcggttcacaccctgcccaagttcacaattaccatggcaataataatataatatttttcaccatgagaaaatcaaagaataatgttttccccattttcaacctggtgtaattgattacgtacatggaaattttaggacaaaataagggcggtgcaacataagtagatacgcaaacgaacattaataatttaattagtcggcggtttttgttttccacttgtttagtgataaaggatgcgctgaaccgggagcgctaacgggaatcgagcgcccacctttttctccctttttcttctcttcatcatccaaaagccaagttgccaagttgcatatatccatgtcatttatagttttcaattctagctttggtgatagattagggtcaagtggtcgatttagttatcaaggaggaaagctagtgcccaatatccagagtaatggtaattaataataaattgtaagcacatgaattacatatataacataaatcttaggactcttcaacatgacaaaagaatcggtgaagtgaacacctccaccgatttttctccaaatctgggcaagtcgcatgatgcatgcagacatgagcatcagtggacaaatcattttgtattttatatcgtttttctaaatacttttccgagttggattcctttccatgatggcagcgggcggcttctactatagttgtcggtttgtcatggcaagacaaatattgccgcactaggttaaagttgggatatagctatacaaactatgttattaaatagcgtcggtttgtacgtcatgcaggttgccttgtctatttatttagaaatataattttaagttgcatagattattttaaaaatatatatgtaattactgttaaactcagtattgaaattgggttcaatgtcgtcatacacacggcgactgatggttaaacccattaatcataacaattgagattaattatgcatgttagctagtgtatcattgtctctctccatgaaactctacaatctagtactatagtatatcttgcagtatatcccatgtcctccaattaggccgctgtttatatctactgtatgccctaaccgctggattcgatatgattgaggagtactggattgaaactatcatcgaacgagaacataattaattaattaattaattaacatgttgtaaaggacactacctttttccccggcccatctccatctcaagaggatgacagcatgaatatgtttttcttcagacaagatgcaacacaacacactgaaaatatctacatatatctgtgtgctataattaaaccacccaatgcaaggccccctgttctagaagctggatcttacggttgccctcttgcaaagaaatagttttctcgagggtatcatctttagtggagtatgtggagatagcattaattaagctggtaatctcaattaactaattagatgatcaaagccttgggactatggtactgtttcaataaagaaaataaaaaaacatggaagatgtttagccccattggttgtcctaataagtcaaaaccaaagaaaaaaatttaaattttcaaacttaattttaaagttgattttaaactatttgcaacgtaatttttttcagcattaacttaagtcgctaaaaacacatatataaaagttttatctacaaattaatttttattttttaatagtaagttgttttggtttattagggaatatgagcaaccaataaagcgggttaaaatcacacggaccttttacttcacctctgtcctatgtccattgtccatattcatctttaagattggatttatttttggacagagaaagtacgtgcgtatatcaaatttgacaaactattcatatccgcaagcaaatgcagccaaaatggtgagatttgagagctagagatcgcacgagacacagttgccgacttggcgttctcttctctccaacaatatcgccacaactatttatttccaacgaagaaaacgtaccttttctatcacacaggaaccgggagaatctttccacatgactgacgactactaatattctcttggaacataatctaattaatctagttttttagctcgatttttcaactcgaaaaaggaaaattggaaaaggaaatcagagtggcagatctctgccacttttctcgaggcaatcttgcatatcacacctctacaaaactaatatcccagttgtcagtggtataacccatattattcagttaaaagcattctagagtagctaaatgtttacgtggtttccacacaacttttgtggtttttcaccataatttactccacttcccccgagacaatcttaaaaaatcacatcctccacaaaattaatactccttccgtcacataatatagcaatctaataccggatgggacatctcataatacaataaatctgaatatccggttatatattatgggacggaggaagtactagcttcgatttgtttgtccctataacccaaatgattccgttggaaaagcataccctaccaacatatccagtttttttttaaaaaaaaaaccaacatatccagaattacaaaagaaacaaacctctgcagagcatgcacgcttgcttctggagacactcatgacatgcagtctcctttgatctgatcttcactccatcactgaacctgaaaacgaagtggcaacagctcaaaaggtagacggacaactcacactcctatctcctacttgagcttctagaagcttgtgcttttgctttgcttgataaccagcttagcttggctgatcatttcatgcccttggtgtgatccactgatcactgctgagtgatgactcaacaccaagcggccctcctcctctctagctaagctccttttagatctgcattgtggggcccactgtgacttttaggtggcccacatgtgccaaaaggtacaaataaaaagaattgtggtttgatttgcttcgtactagtccatactaaacctcggaatattgtggtattgatttaattagtagaaaaatatttcgtattacatgaaacaattatcacacaaagctatatgcgttatgcaaggaataagtttaagaaaaaggagaagtggtggtaatacaatttatagctaatccggttggcaatggatgaattaaataaatggctgataaggagttaaaaaaaatagaacttatagctatgaacctaaacatggttttgttttgtgagcttaaaattcggagaagctactggtttatagttaacatctgtaaatctaaaaagaagttaggtttttccacattctggcttgtaattcattttttatctacactatttatgagagttagagaatatggggcttttaactatttgccacacctatctcaatgacatgtgggtccacatgtatctatgacatgtgggtccacatgtatctatgacatgtgggtctagtggcaaatagttaattgccacatctaaaagtggcatatatagttcaatatctcagagaatatgggaaaagctataactgctaaaagtcccctctgataggttctaggagtctatcaagggagtttctgacggttgcagcttatctaagaatctccagctgccagaagctcccctaaacagtccaggatttcactcagaattttagaatgtgtagccgtagaatttagatactattagttagaaactaggtttttcagcccagattattaagagctgactaccaattaattactcttaaaatcataagtttccaacagggcccaagtttgtggtagaaattggtgtccccatcatttggcttatttcgtaataagccaaaacggtttattaggaaataaaaatgaatttgtagataaaacttttgtaaatgtattcttggtgacttaaaagtcaatgttgaaaaagaaactacgttgaaaatatctcaaaatcaatctcaaaattaagcttgaaaatttaaaatttagttttttctttgaccgattaggccatcagataggaccctggatttttcgaccaagggtaagcagcgtaggccctgaccctcttaacagctgaacaaacctgaacactgaagcaagtgatggagaccattctccttccacctcacatgagctgtccttgttgcccagcctcctctcctctcctctcctctccaccctcatccttatcctaatccaaatccacctccatctccatgttcatctcaagcttctcagtccccacacaccccagaagcctcatcacattcactgattgcaaaaaaaaaaaaaaacaaatcactcaaggataattttaagatcactgtcactgattgatcctttgcatcaggaggttcttttattgtttccatggaccaagtttggatggcatcttttgggggtggaaaatttgggtccataatatgttttttccattgtctggattttattctgggggtgttcaagaagagcaccaagttggacaaagaataagtctacaatgccatctagtcaaatttgggataagaatttagaaacagtgtgctttgctggtctatatggtgacagcatgtgattaatttatttagttttctttgtgggggagattcggatgctgttctggactctcgttttaagcgcgctggagatttatattagtgggacatcaaaatggaatttttcaggtaagagaatgcaagctaaataattgaaatagaattattgttatttttattattactcatgccaagatggaccggctagtatctccttaactactactgtggataaattctaagcgctataattaacaccactacggtgaataattatttttaaacttaacgataagtgagctgctaattaattaaatcaaataatattaagaggaaaatgttgtcataaaaagtcaggcaaaatgaaatggagtaaaaaaaacactctcattataggcactgcaataattcaacaaaagaatacaaaggccttgtcaggttgtcatggactgttctactattatagaagtagcaaggaaaaatgaagcctttcttttggccataaaaataattagacagcaactaatttttcaggcaaaaaggcacttactagtcattatcaccttttccatagttccatcatcaaaaaccacaagatcaagttttccagctcgctctttcttttcttttcatttccctgtgtacttgttctgatctacttctactcaattacacctcatccttgcatacaaacaaacaaaaaaagtaaaaaaatgaatttccactaatgatcattacctgtaattcaagcccctctttaagcaacaaaataaacttttttttttatgaagagttgcatgttgaaccggcagaaaaacaggctttccaaacaggttgctttcatttttaaaatttaattttcattaaatttcgttagcggtggagatccaccaatcagaaggcgccacgtagccttgagtgagctctatttaaaccactcctctccccccagagagaggcgacccacagatccagaagcagcaaaaaaaagagaaaaaaatcagagaaaaaaaaatgaggagcccgaggagccgtgcgctagagcgcgacgccggcggcgtcgccgtcgagcacgtcgagctcatcccggggatgcccgacgacgtcgccgtcgactgcctggcgcgcgtcccgcacggggctcaccgggcgatgcggcgcgtgtgccgcgggtggaggagcgcggcggcgacgcccgcgttcgccatggcgcgcgccgaggcgggcgccaacgaggatttggtttacctgctccagttcgcgaaccccgcggcggccgcggcggccgcggaggaggcgaaggaggacggcgacgcgccggcgaactccccggcgtacggggtggcggtgtacaacgtgacgacgggggagtggaggcgggagaaggcggcgccgccggtgcccagggctgcaggaatt

SEQ ID NO: 23921 - DNA, 34676 bp, Oryza sativa
gccgccgatgcggtcggcgaggtctttcttcgcgtgcgcggaggccggcgggaggatctacgtggcgggcgggcacgacaagcacaagaacgcgctcaagacggcggaggcgtacgacgccgtggcggacgcgtgggacccgctcccggacatgtcggaggagcgggacgagtgcgacgggatggcgaccgtcgccggcgacaggttcctcgccgtgagcgggtaccgcacggcgaggcagggcgggttcgagcgcgacgccgagtggttcgacccggcggcgcgcgcgtggcgccgcctcgaccgcgtccgcgcccctccctccgccgcccacgtcgtggtccgcggccgcgtctggtgcatcgagggcgccgccgtgatggagtggctcggctcgcgcggcgggtggcgcgaggtcggcccctcccccccgggcctcaaggccggcaccgcccgcgccgtctgcgtcggcggcggcgagcgcgtcgtcgtcaccggcgccatcgaggactccgacggcgggtccggccgccacgccctctgggtgttcgacgtaaagaccaagaactggaccgtggttcgcccacctccagagttcgccggattcgccttctccgtcgccgccgtccgcatctgatccgatccgatccgccattgacgacgaaccccgccaagatccaagatctcgatctggatccagctgctccgcctcaaggagatctctactacacacaaccaaatactactctactctactagaacagtagtatgtgcacaagaaaagaatcacaaggagaagagaaggagaggaagctagtggtgagtttgtgaagctcctctcctctctctatctctccccaatctgttgttgttgtgaggatgatgatgatgatgagtgtggtgtttttgtccaagaaaaccatggaggaatcaaggggatgatcttggatctcctcctcatcctccatcgttcaaccatggttatggttatgagtagcaataatccaatccattgtacatattatgaccagccgtttgaggtgcagattgcagagtccatcttttgtctcaaaatgaaaccatctcgtcttatgatttcttgagaaatttgaatcagttcttgctgcaagagaaacacaagctgtggccggatttgcgccgggatcttggccggtgtagagtggttgacattggcgtttggatctggaggttgtagttaattggtcgattattggtaattaattagctgtggagcgttgcgtgaggcgatggaagcacgtcgccatcggcgaggaaggaaggaagggagataaggtcggcaccgagtaaacctcacatttgctttgcttgattgcttctcttttcgcccttcttttccttttcgtttttgtttttggttctcacatgggagatgacgagatcctctcgtttatggacttctccctctgtttttagctcccctatgtttcatcgtattgtatgacccgttttgattctttataccatgttgaaacttttaaagtttaaccaagtttcttgaaaattttagtagcattagtttcattaaatctaacacatatgttttgataatacatttgttttgggttagaaatggtattatattttttataaacttaataaaactggtctaggaaaaaaaattcaaaataactataatatgaaacggatatagtatctaagttaaggtttgtgatctcgttttgcaccgtgtttagatcccaattttttcttcaaacttctaactttttccatctcattaaactttcctactcacataaactttcaactttttcgtcacatcgtttcaatttcaaccaaatttctaattttgacgtgaactaaacagccttggggtcgaaaatgctaagctagtcaatgaatttttacatagagggggcctgttttatagggcttctaactttagcccatctacccctctcccgctcactcatattaggagtccttttagtttaggtgataaaatctggataaaattacattcagttgcggtggaaatcaaaatgttttcattgacggacagttttacaactttgacacaatctcatgttttctgcatttccttgtgaaggagtacttaaaaatactacctctgtccaaaaataagtgcagtcatggatatccgtgcccaacgtttgatcgtccgtcttatttgaaaaatttgtgaaaaatttaaaaatatttagtcacacataaagtactattcatgatttatcatctaatagcaataaaaatactaatcataaaatttttctaaataagacgaacggtcaaacgttgaacgtgaatggtataaaactgcatttattttgggatggagggagtaataacatacagtttttgacctaagttacttttttttctatccttgaagcccgtagaacagattttcccttctgatccaaccagatgtccacagatagtgctaatgtgatggagctatgcatttactaacatgaagtaatccatacttctgacggttagggggtcgagaggcagccaacggcccaaccccctctctctctcgttgcttggaaacgcaaggaattgatgaatccaagccattgaaacttgtaaatagccaagtgtcacactccattgccacatcagtgatttccttcattgacaagttcatagagtatcgacgatgatatcgtctgcaccgcgcgatctctttgaactattcaggactatcgcgttcgtagttgacttcctttccaaaggttttgttaagattttcggtggcatgaaaatagttacagtattgtactagtcgggctgtgtttagatccaaattttggatccaaacttcagtcatttttcatcacatcaacatgtcatacacacacaacttttcagtcacatcatctccaatttcaatcaaaatccaaactttgcgctgaactaaacacagcctcggttttgtgagaatttatatcatgagctatgccgccgtggagttcaaattcagtgttttggaatgttctatttcaagaatttagttagtcccaaaacgctcgtctcggatcgagactaaactcaggttgaaacgaaagactaaaactggagtatttgtcaccatcaccccccgttggcttttctttgtataaccatgatccaagcaattttaatttccccttccatgcttggtcccaaagaaaaacaaacctccctaaaatcaaagaaaaaaactaaaaaaaaaggtaaaccttcttgccaagaaaattgggggagaaaaaaaaagaaaaacaaaggataagatcgagagaggcagccatgacggcgtccatactccgctggcggttgatgctgacaagctgaggcacgcagttttgatttgtagcgtccggagaagaagagaagagaagcgacgacttggttgtgaggaatcatgctgagtttgctgacggctgtacgttccagcttaggaagaggagatcgacttgatttgttgaaagctccagcaaacgaacttgtctggatcactttgatcaagaggtgacatggtggatgaacaagctgtgttcgattaatacaaaggttcggaaaatcggaacctttctacagcgcacgaaaaacatgttaacttattattgcaaaactaactaattattagcttaaaaaaatttaaaaacaaattaatattatttctaaagcaactttttatttttttaaaaaaacgtacttgctccgttccaaaatataagagattttaaatagatatgacacatcctagtacaatgaatttgaatagatggtccgcctatttagattcattgtgctaggatgtattatatccatgcaaaacccgagggagtattctttagtaattggggaagtgtgcttgtggaaagcgagagaacaaaagttggaaaaatgcaggtgagaacacaccaagccttgcaaggtagcttagctacttctagttattttatacattttttaaaatgctaaacaatttggttttttcaaaagctttctatatacaagttttaaataaatcaatctatttttaaaattataatagttaatacttaattaactatgtgctaatgatcttactcgttttgcatgcatctgcagtttagccttggcaatatgctcaaacgatcgcagcttaagtttcaccccttgtgtttgtcagctagttagcgttctaaaaaatttggattgctaggttcatgcgtgtggggaggcccaacggcatgttggtttgccacaccgaaaaaaacacgagaaaccagagtcttacttttgaagttaccgaattctggggaagctaaaagttggttaaaacttaaatttcagttggagttgggaaagaagaacatttccatccatcactccatgagaacagcactgaaactgaaaggagttcgtgcccatcaatccgtgcattctcatggtttaatttccattttctgttttctcctcgacagataggcatgggagatgcaaccaacatttaatgaaaactggaaacagcaagcaatcctcatgtatatatatatatatatatatattttaaaaaattctcctttgaataactaaacaatgttatcgatactaactaacggtagctatcaaattatttcagttatttcagcattttcgcagcaggtagcattaatcagattctctgtatgcatttgtgtattatctcggaagtactacatgttgttgcgaaacctaatagaggaagctaggcagatgtgtgtatcaatcattccaattagcttaaaataaaatttattgtacaacctttcaggttcgaaaattgagcttatctcatccgaacttttattatactgcaagttttgtgtacttgtaccattcaaagcagaattattgtgcctgatagacctggacctataggttccaattaaactaaacaagcaatgaaccctcgctcagccccagggcgacatgggcagcaactcgaggctgccccgccgccggcctcctctccctcgcctcctccgcctcactgctacctgagcagccgccggcagagccgggtggcggcaaggacggcggcggcggggcctttctaccccctccaacacccggcgactggggttaatggaatttggtggttcctgtacagcagtacaactagcatgcagtggtgacatatatacaccctgtttagattccaacatttttctacaaactttcaacttttctgtcacatcgaacttacctacacacacaaacttctaacttttccgtcacatcgtttcaattccttcaaacttccaattttaacgtggaactaaacacagccatagtccacatttcctaacaagagtgttgttccaagggcctttgcagaaagctccacataacaaacttcaattgggtaacttggtggatgataggaaaggatgaacatcgatcaccccataaaaatgccacctgatgcatttgtcatattgcttcatgcatttggaaaggctcaacaactttgtcaagtgaaagccttggctgcttggcacctgtttggctcagccatacgaagcacgtgaagccttaacctgaattctagcattactttaaactgggggtggttaatcaaaattcggctaaaagctagagacgtcaagaagcagaagattcctaaatttgtagcatcattaaaaatttagttcccgttaatttgtagcatcattaaaaatttagttcccgttggtctgttgctgccaatatacgtgcagtcaacacacccggcagcgtagatagctcccgggtaggtcaggcgaccgcccggcctccacaagtccacagttgtctatcggcgtataaaagaatcggtagatcatatagaaatatcattagccgctcaggctcgatagcgtcactggctccgcctaggccctagccagtggaggttcccatcggttgcccatttggcccaaaatggcttatttggtttattagaaaattaaaattaatttataagtaaaacttttgtagatttgtttgtagcgacttaaaagccaacattaacaaaaactacgttaaaagcattcaaaatcaacttcaaaatcaagttcaaaaattcaaattttggcttattatttggctgtttaggccaaacgatagggcaaggagtctagtggagttctattgaactccagtggtagaaatcagatacccaaatgcaactctacggtggtgtttgaatcttttgaaaatggatatgaagatgaagataaagattaagtatttcacgcaaaataagatggtaataacatgatattaattgaggtttaattattacaaacttgaaggtccttgttaacatggataacatgatattaacatggtaataacgccccttgttaccctagttgatagaaccggcccatcttgaaggtccaaaccgatgataagtaattgaaatcaacttctggccttgttactgtattacaattaagggagagatttcatttcttacactccacaaattgggcttacatcctggacaaaataatcaatgtggcaacgaaaaagtgtcaaattgttgagcttttgagtacaagctttgtgtatttgtaccattaaaatcagaaatattgtgcctaacatggttaataagatatgatagacgtggattaattacctataggttccaaattaagttaaacaagcagccaaccacccaatctagacttgaattccatgtctataccaggtaaataatcagttggcagctgcccagtgtaatcggttgttaggcaggtaggcttgctacaaagttacaattaagctcattaatttcatatagtagttaatggaatttggtggttcctgcatactagcatgtatagtgacatagtgaacatttcctagcaagagagttgttccaggacctttccagaaagctccacataacaaactttaagtgcataactcgatggatgacaggaaaggatggacaacatcaccccataaaaatgtcacctgatgcatttgtcatatagtaataaaaacaatttggattgcttcatgcatttggaaaggctcaacaacttttgccaagtgaaagcattgatgctatatgtttggctcattagccatacgaagcatatgaagcctaaccttaattctagcattaccaaaattggaatggttaaaagttgggtactaccaaagttcagctaaaagttaagagagtacagaagcaggagattcccaaaattttagcaccattaaaatttttagttccccttggtttgttgatgcattgtgcatgctgtgaacgcttcatgctgccactggggttctagtgaacgattcttccttgtagcagaaatcagatgctggatgcaactctagatgtgcatgggctgggccaagctgttgttggtctctggatgggcccccttgtctcctagttgatagaaccggcccatctcgaaggtccaaaccaacgataagtagttgaaatagacttttggcattgttggttaattaccttactatacccccttcagcttgtaatgtttgacgttgatgatttttggacatatgtttgatcattcatgccttctgttccaaccgatgttatatacgtgcctattttcacttgtcttccattccgaccggttgattcctcaacacgtatgttgcctctccatcactgaaaataattaaggaaatatagttaggtaaccttgctaaacatttaaattacgcactagtttaccattctagtgcgggatgcgaaacagcagccctttgtgttggatggacatcttaaaagaaaatgtaaagtatcgccaagctatttcttgaatggaactgccaggaatttgcgaagcatactagtatccatctgtttcaccattcaagaatgacttagactgaacttggacagcatcggtgtgtaatcactttaatcgtgccatgcagtgtagcgtcgcgcgaactactttatagtacatgtaaacatcaatggaaggttgaatatagaatcaaaattaggaaatgcagaggaagtgaaaacgaagcaagaaaactgccaaaaacccttgtttgctcaaatttaacagaacacgaaaatagttgtcgaagcaacaagacatcacatgagaagtaaggacgctaagctagcaagattaaaacaatcacaatcgagctgctgcataaatatccatgacttcaacttgcattagcattatcagcaatcagatcatttgtagttctaccattgactgatgtcgagatttgagaaaaatagatgttgccatgactaaaaaatcaacagacaacttcagaggatgaagtgttgcattagctataaagccagagagacaactgacctccgatatctgtctgtcttaagatgttgagttagactttgtgcaggcgatttgccagcatgaacagcggcataggcatccgtgagaccaggaagagcatcctcgtggcgatcaatgtacctcgctacgaaatgttcattgccaaaacaaacacaactgtagtaatcaacatcattttttatcaaccccttctccacaagggcttgtagaacataatgccgcggcgccaaccgcttgtccaggctgagcgtgagcatcacaggcctctgcaagatgtattcagtctccaattggaccttagtgagcaagaactctattttgccgcgaagcgtcttctccgagaatcctagaatgctcggcttcctgctgatcgcagagcgtagcttgtccatggagcaaccaagagtgccgcgcaagaactccatcctcgcggcgatggtgccctcgttgttacgggcgacggtgcacacggcgtccttgaacgcccacgatgaagtgggcacgccgagctcctcggcgcgccgcacgacaatcttcagtcgctctgggttgaacgtgagcagccacgcggcggtctgggtcatctggacaatatcacaaacacctagcccgcactccccgagcagcgcgacgttgggcctgaccaccctgtcgacgtcggtggcgaggatcgcgttgcacctcctgaggatcttgaggagcatgtcgaaggagccgaggaaggggacccagaacgcgagcttcggggagacgtcggacgaggcgaggtgcgccgcgccgccggacatgaggaagctgcggatctggggcgcagacaggttggcgcggccgcggagggaggcgatgcggcgggcgatggtgccgggcctcgcgcggagcagccgcggctcggcggcgacgacggcggcgaggtccgcgcgggagagggagagggagtcgaggccggcggcggaggaggagaggagggcgagcacggcgtcggggttggaggaggagttgagacgggagagcttcggggacgccctgcgcgcctgagcggcggtgaggccgcaggtggcgatgaggtagtgctcgacggagaagggggatcttgcggcggtggagagaaggcggtgggtgaggtgcagaggggaggaggaggcggtggaggtggcggcgtggagcagcgggaggaggtggttgcggaggtggagcatgtcgccgcgccggcgacgccgccgccgccgtcgccgcgtgacagcgtcggctaggcacaaggcttttggtggctgtggggtcctgatcctcgacggattgagatcttctacattgcaccgtgtcactgacatgtagatccgatgatttccggtctcatatgtttagtgataaaggcgtggtgcagtcgaccgtagaggatcttaaagtatcgatgccttaacactaccaaggtttaatgaaaatattgaaaaccgcaaaatttcaaggttttgaagcgggacaaaagtagattacaagtgaaatttcgaaaggatttggtgaactaaaatttagagtagtaaaaatcaatcaaaataactcaatttttttgaaaattcggcaaaaattatggtacaatcgaaatccgatactcaatggaaaaagtgaaccaagcacactagtactctgaatcactacaatactattaaattaataattttactagcaaaaatacctgtgcgttgcaacgggaagcatacagaccagaaaattgagaaaaagttaagaaaaaaattacattatgtaattaattaaaatataaatttgctaaaatatttggtatttttaagtaggtaggtgtataattaaatcaatttaaaagtaaagcaagtgtgagaaataaaatgacatggttaaatttttattaaattctccttgattagttacgctctttgaaattttattgaaattatcagagcttaattgctaatttttaataatacaaacatcatttaacaattatttaattggaaaatgaatcaaaatcctcgtttttagtttgggccgaatatagaaaagtttatataacctcccttttttctattcaatctgtctggcctatttcctttctccgttgaagtccattttgtgtcctccattcggtgactcaataggccggtggcccgacgtggcagcaactagagctgtccgatcgaatggacggtccagattaatcctaacctaaataaatacacccaaaccgtaaccctaaccctaggattcattctccccctccccctgcccccaatctcccccgagcgacggcggcggtgacgccaccccctccccccttcccccaagcggctacggcggcgcggagcagcgaccggcgagcggcgccctcccttccggcgggaggggaggcggtgaacaggtgcgccggcgcccttcccttcgccggatccagcgggatggaaggcggcagcggcgccccccctctcccggatccagcgggaggggagctggcggcagcctggcgtccatgcgacggcagcggcggcagcggttcgacgacgacctccgattttatttgtgtgattgaattctgattgggaatttttgttggtaggggtgattgaattccgattgggaatttttttttgggtgggggtgattgaattctgattgggattttatgggggagacgacggacgaaaaattggcgtacggacgaggtgacgaacggaaaaatacaaatgtttatattaatttattgtatcgatggtttaaggtacgtctgaaaagtcatgaaaattttatttatgattaaacttttattatatctaagtaattggatgttgaaaagaaatgctaaagagtaaactatgataaaagcacccaacataatcttgattctacaataaaaaaagaacaaaaaaacagaagtagaatttaactattcatacgtaaaaaaagaaccaaactttaacaattccatcgcaatgcttcagcaaaaagatgacaaatatccaacgtatgtaaaaaaagaacttgttcagtaaattcataatggcatgatccaattaatccattttctaatggaaaattattaaagacatagagacactatctcctcaggattattcctgataacaacatagcttttttttaacaactcgcacgagacggtgcgaagttctattgatatggctggaaaaaaattacaagattacaacctaggaaggtcgtaaccaggaaaaaggaaaaaatataccaccacacccacacaccgacagtgtcaacacacaggttggggagaaggctagcaccagaccagccgccgctaagcatgaccgatcgccgctaggccaacaacggaacacatacaagatcgcccaaaaaacgctcttacaaccaatacaaagcccaactctatccacgtctttcggatttagggagagggtgagagagaagatggaacacctctgccccctaggtcctccgaggtggccaacttgtagaaactacgacgccgccacaagaggatgagaatctagagcgtgattgcaccaattgctcgagtggtttcggcaaggggatgcctaaacgacgtctccaagaagagaagcgacggaaaaccgccaccgctgtccgtcaaggtctcaaaagagcccagactgggctttcgcccggcaaccacccttgaggggtgagacggcatgacaaagccctcaggagggggaatgacactcgggtgccatcgttgtcggtccggccaaggccgggctaggttttcacctgccactcaccacctgcgagtccacgactaacgcaccgatgctccaccaccatctaacctctgctgacatgtgggaccactgcaccggcaccccccgtcagtcagccttcatgcgccgtagaccgtgccacacccaccgacagctcctcctcgcaccatggtcgcctcctccaccgccgaccgtgcctctcgcgccaagccagccttcaccgctgctggccgcgcttcctcgcgccgtgctggcctccgctgccatcagctacgcctctctgcgccgagctggcctccgccccctcctccaaccactgccgtgccagccagatgcgaccgtctaccatgcccccggctagccgtccgagaccatcgtgcttcctcccagcgcaaccacggccacggtcgccacagcaaccatagccacagccgtcaccgccccagtcctccacccccagcgccactagcccaccaccaacagcgccacggccggatctggcgctgggggggggggggggggggaggggaggggggcagatccgggagccccgccatcagatccgtggtcatcgccaccaccaaccctgccgacattgccaccattgccaccccgccgccatgaagaaggccatagcgagcatagcgtcctccaccttcgtagcttcctctggatctggcagccaccgccgcccgccgcctacatccacgcgccagctcgctcgcacgggcgacccacctcgatgccatcttcccaccgccctgccacagcccgctgtcgaccatagcagccgcgcctccatgcctgccgcaaccgccgacgccgcgcccgcaccgccacagcccagatccagcggcggggacatcggatccagctacgggggtgccagatctggcgatggcggcgccggatcagccgccatgcgccggcgtcgcgtggccttcccggctctccgcgccaccccttcacgccgggacggccacgcgcaccggggtttgtagcctcgctgctgccatcccggcaggtcgcacggtttccggcgacacgctctagcggcggcgaggcgggggagaggaagggagggtggctgcggccgggggctagggttcaaccccggtcggccactaacaacattacttggagccgaaaagaacttgtgaatagcacccttttacgattcaataaattgaacttctcgttattgttttcctttttttttcttagcacctaacaaatgcttcttatagtatgcaacattaattctaaaatctaacatttgaagctatgaaagataaggaatatacaaacaaaactaaaagaatcctaatctgctaactaaagaagtaatggagtaatgtaccacgagatcttaaatcagaatcaacggaagaggagtgagtcaacccgcccctgcttgcctgtgcagtgacggtgggagcgtggagagatgctgcaaggtggccacgagtccgctacaccgtcggtggcagtaccatagtgttacgagtaagacctctgttcgccgctagtctgaagataaggagtagtcttcgccgctagacggagaagagtgctacggcgaacagcaacagtagatacaacttattattacctatgttataaaatataacgatataacgactacgaatcttatcctaatcgctcaatactaccacaacactctctgtataacactctgctatgatgacgagaataatggcgatagtaaaggactaccatgcctcttctctccttattgaactaagatcgtctattttcgaagtcacctaacttcaaacctagagtatcctgatccccacttaaatatgacgcttgttgtattatgtttttacggacgtcagatcaacttttgtcaatgtttaaattatttcctttattttttgttttggattaatgttgcagcaccttataataatataataaatgttccagactgatttggttgttgcagtatgtgtttctagctgttgttgtactgttcttatcaagaaatattgcttcctcgctttcttcttttcttttgagttaattggacttataactacgagtttatccttgaacaagatccatattcctattttcttacggtaaaaatttctttaaaacaaatttgatcatcgaaaatgatatgcagacgtactattgaactctaatgataagctggattgttgtacaaaatgcgttacacaacacacatgataaattgataattgataattgtttaattatcatcagatatatgttggcaacgtcaatgtgataactgtatgtgttcacttttctgaagccaagtggagtaatgcatgcaccttcaacagttcaaccaaatataagcccgggacattaaaaaaatgtgtagtaagaagatgtaagacctttgctaaggatttaaatcacacaacttcacatttctaatgcagtttgttgtttgcgaaataccagctctctactgttggacggacatctgaaaaaaaaagaaaagatagtcaagtacatcagcgttacagtatcacccagctatttctgcaatggaattgccaagcatagagtgatctcatggtggactgatgctaacactaacacatgggaatttcataatttggatcgtacttcattattgtggagacagtgcagatttgaaattgaaatgtactgcctctattttttaaatagatgataccgttgactttaaatatgacgtttgactatttatcttattttaaaataaataaataaatttaatttattttgttgtgatatgctttattatcaaagaaatttaattcaagtatgagttatactttagcatatttacactaaatttttaaataagataaatgatcaaatattgattaaaaatcaatggtgtcatctatttaaaaaatggagatagtatgtaccctgaaatagaaaatgtcggcaaattccaacccaacggaaggagtgaagatactaaacaggcccttagaaataaaattttgtaaggtctattaataaactattgatttaaaaaggtctaaaaaattaaaaaagtgatgcatatttgtttggtttgtgctttattcgatcagacaatagtatagtgtaaatagtttatgtatgttctaatttgtatcgtttcagcaccacaactagacaatatacctgccagtacatcctaatattatgataaaggaatatgtttacctacacttcacatgctttctatgtgaccgcgtcatcgcgtatcacaaagttaggctatctcattgcaagaaaaatcaagagcgccaaatgaacttaccacgcgatggttgtccgggctgtagtgcagtttgtgaaacagcaccctgcagccccatgatgatagatgcctggacagagatctgaacaaatgccaattatccccgagttatttcaagaatggaattgccaaagtattgccagcaaatagtgatctctgagaactgacatgcacagtaccggaacccatgggaatttgccaaattccaattagtactggcaaggataacacatgggaatttggatcgtacgtcatggcttcactcttcatttattgttgtggagagaatgcagatttgaattcgaactcatgcaccctgcctgaattaggaagtgtcagaaaattcaaaaccaatggaaggggttatttatctcactatctgtagatccgaaacttttcattcaggattaagtttataaaaatagtgatatcttctaccccctccattccaaaaagaatccaatcctagcaacgaacctggacacgcaggttcgctgctaggattggattctttctagaacggagtagtaaatccttatgcatgaacattccctgcattttggttgggttacgccaccttttaataagagctgttccatcaaatacaactatacaagtgggtagtggggtgcttatagtcgtagatatgaatagacaattagcagtgcattgcctgaactcagaagaaaggaagagtccctttttgagtttaacatgagcgcctcgtaccaggagttctccgttccccgcgacccagttctccaacatcgccgcttcatcttctcctgaagacgttgttgctgccacgacaccatccctcacctggcagaggagagagggtgtggcgagccctcggtgagtgggcgatggcgcactggtgccctgacattcacaaacattcataggattagagaacttaaaactctatttaattatttgactgaaccatttatgagaatatgagctttgcatcccctggggaaaaaaatgattttgttccccaatgaaatttcatccagaggaaaaagatgattcatatgctgccaactgcaacggtagcagcagtctgccgtcctggagacatggacgaacaagagatgtgattctgtttacgggttttaaacagcgggtcagcggcagttcagttgtgatgagttgttaattactcagtgattcttgtcgtgcctgtaaaaagtaaaggagtcattcctagcgtttgcttattcattgaaaatacacagttacttgatttgtgccttatacggacagtagtaatttgcatcacagcacctcaactacacaatgtactggttagtgcatccttatattatggtaaaagaacctactccctccatcccaaaatataagcatttttagcatagtgacaagtcaaacattttcaattttgaccattaatagcaaaaaaatacaaaaaagatcaatcatgtataattgatgttactagatttattattaaaacaatcataatatgcaactctttttatttaaagcatcttacttttatagatattgttggtcaaagtagcatatcggagaccgtgtcaggataaaaaatgcttatattttgggacgggagtatatttcatatgctttgtatgtaaccgcacacaacaaaattaggctttcatctactcaaataggcccagaaaatctaatggctcatttgttcagtaacaggaacaagagtccgtaacaccataatgatgcacctctagtgttagcatgccaagttgtactccctccgttttttaatatataacgccgttgatattttaagatatatttgactattcgtctttttcaaaaaaattatataactattatttattttgttgtgactcgatttatcatcaaatgttctttaagcatgacttaaaactttttatatttacacaaaaattttaaataagacaaatgatcaaaacatttgtcaaaaagtggacggcgtcatacattgaaaaacagaggtaataatatttatggagtactaaattagcaaccgaacaactcatcgtgcccttgcaggagcatttcgatcattagacacccccaagaaaaataaagagtgtcaaatgacaaacttaccagaccacaggttgtccaggctgtagcttcttagggtaggcagctattccaactttatcatacctgtgtctgacaggaccagaacaataaaatcttaatggaataagtagagattttcaaaacaaaattaattgtactagtagttgttagacctggatcattaatattgtaacacatgcataattataaatcaatgtttattatttcaggaatttatatttttaaacttaataagtccattaaacattcgttagagtctctatgtaagcattaatgcagaaattagcaattaatgatttctttgtcataattgaacccatccaaaaaaacgatgaatcttcggtgaatatgttcagcgataccctcaaagttttttatccaacacacacacatactagtaaggcctaactttttgtatgactgatccaaaatataactattgcagatgtaaatctatcgtaacttacatgaaccacgctatactttcatcaggtttggaaacttcgataagcttccaacggatgcactcaatcttttgccagttttctccattaggtgcctggcagcttcttttcaagcactcgcagtcttgtatttcaatttgctggatagaattagggaaatctggtagagatgataagttggggatcctgacaaatttgatcctctccagactggacaggttcttcaaactgcttggcaggtacatgactttagaatccctgaactctagaaacttgatagatgtgaaatttgcagagctttgaaatgtaatggatggctcgtcgtattgttcaaaacagagtttctctgggagcatgaaatcctttatagagagcatgagactgagcatagcagagctactaatagcgagtgatttccatgcatgatgccgggaaaaagactctgcggtaagatttggaacatttatcagatgtatgtcctggagatgtggacatgataagccttcaagaaagcacaagtctggcatgttattcagtgagagtgattccagggaacgcagatgaccaatagcaaatgatgaagagcttcggcagcatgtgatggaaatgctacgcagacgtgggaagtcagtactgaggaaattggcccctagtatgcagccaaatagagagagctttccaatagaggatggcataacagctattccattttcatccaccaactctaatgagatgcatgaatctatcttaacttctgaaagggaggttgcctctcgtaagccacccaatgatctgaggcaccagcaagaacggatatataatcttttaagcatcgtcaagcgctgcagcacctgcggtgatgggaacgaagttaagttcataattcgctctatagacaaccatttcagcgaggtgagtccttgaaggcaaacagctaaagctccatctgtgaggttgcatgaagaaagagagagattctcaatcgatgatgggagaagcaacagattctcagtgggtcttgaatagataagtttcgtcctcttctcttggcagtacaaccatgcttttatgatattttcttccaacaatacttcctctctttcactttctatagcactttttatggtttggagttgtgcggatatatcatcatccatcaatgccatcaactgcttcagagatgaatgttcgaacaccaacgtgtccctgacctttttactaatctttgatcctctctttgcctccaggatccttgcaagggtggatgacaaattgcccactttcatcaaatctgtatgttgtacatcctgtccaagttcttccctagaaataaatctaagcaacgggcaacccatcatatttaaggatacaaggcctcctggaaagcatggtaatgtcttcagattcaggatgttgcggagggctatatgacggaaatgcttgatgagctgtacactggatggtaaacattccagggaagtgcaattactaagcacaagggtctttaaattaacaaaataagaatcttcgagcaaccagcttggatatactggagatctgtagcctgtaactataaggtcattaagttcacgaggtggcttgagaccctctagaacctccaaatgcaaattgtcatttatatgcaagtcatctatgtaactccaggaaagttccaaacgatcaagccgacttttattatgcagcatcgcctccaaagcctcatccttcgttctgacattttcgagatagttaatttgtaaaatgtttctaagctctctcatgtcccttaactgctgtagttcataacctatctgttttgccacagagaattccaaaacatgttggagtttcgtcaacttacctatataaggaatttgaggcacaggtagttgtgcaattggtccaaatgaaagactaggagagcatctttcaagatgccgcaatttacttaagttgcagatcttcgcaggcagattgttaacatcacgatgtacccgaaggaactgtaaatggtaaagagtacacaatgatccaggtaattcagaaattgaagttttgaggatgttcaaatacctcaggtgcttgaactcatcaatagactgaggcaacttcctgctattgtaaaagcacaaaagcaatactcgcaatttcttcatgttacagaatacctcatgaaatagtttatttgcatcatccattactggttccatgaagataacagtacgcaaatgaatcaacttgcagatgctttgtttatgctgtcccattctatcaacgtaaacagacaaatgttgaacagtgtgcggaatttctgtcaccatacagtcttctaatctgaaacagtctcctctggaaagtgtttccgcaaagtcatgaataatatcatgcatactatatgatgtatcaaagcttttaggaactggctgaaagaaacatgcagataccatctcacggaagtacgccctggcaatatcttctactgtcctactctgatcggatgaattgacatcagatgaatcaacaacaaacccctctgctacccagaggtgaaccaactcattaattacaaacacatgaccttttggaaataagctgcaatacataaagcacctctgtatgttaggatctagattctgataactccacagtagagatcccctggtctcacctaagttatcactcttcagagcatctttccatgcagtgatagtcatgttcctgctcaactgagaaccaacaacttttgctgccagaggagattgtccaagcttttgagctattctccctgcaatatctaatagctcctcgcttctgtgctgctctctcattcctgctccagaaaatgcatggtatttgaagagtgccaggaactcagtgtccttcatgttctgcaaaggaaaaacttgtttacaacaaaggggagctgggagtctccctgatctagaagtaaccaaaacttggcttccccgttgctgagaaactagaggagctagcagttttgcccattcctcctcgtcctggaaaccataaaaccaaacatcatccaacacaagtaggaacctctgtgactcttgtaagacgcctctcagcgcgcactggagattgttaaggttagtaaaatgcacaactcgattattgtttgtggcagactccatgatctcggctgtatggcgatgcacgtcgagtttacgagaaatacagatccacatccttacatcaaaatgattcaccacacgctcatcattgtagatatactgtgccagcgtggttttccctgcacctccatgtccaacgatggccgaagtacagtagtttctctcaccactagtgttagtgtcatctgggttgcagagaaaacttataatatggtcacgatctgcgtcacgaccaaatacttttgaagtgggaagcgatgtggtgatggtactgctgctgctgttgacatgaggccctgtgatggctgctgcagtagtccctgctgaaaggaactcccgatggaagttcttggcttccaccaggatgttcttcagttctgtcaacttacggagtagtcttctgttggcagggagcaaattggacgcggtagacaccaaagcaaggcgagagttggaggttgagggcatagaaatgtttccagttgctttgcgctggaggagtttgtactcatgcatgtcgagcaggtcctcggcatcatagaaggctgctttgagcttccaaagccagcgctctaactccatccggcgggggctcctctctgccgctttgatcacgaacctgaactgtggtatgacggtggtctcaagatcgtccagctcctgtgccatgtccttgccaaggtatgttttagcatcgttgatgatcttccgcatgattggcgacacgacccaccctgagcccgccaacaccaccacttctgccattgtactgcaagtctgcaacttcacaactcagtcaactctcccttgccctgtgtctgccagcttgtgacccatctgtgtttcagtgatttgttttgtcacaggtttaactagacaaatatgatggcatgagaagttgagtactgattgagtggttcgttccaacttccaaatccggtgtgctgatactggtttcaaaaaaaatctagtggcagcacccagcaattgagcgaaactgcaaaacctagcgatcaagttagattccaaagccaaatttctgatgtgtgcacataaagataagttatcattgcagtcagactagcctgatgtattgttttctaaagaattggtacatgtctgcaaattaatactccctccgtccaaatgtaagtgcagttgtgggtttctgtgtccaacgtttgaccgtccgtcttatttgaaattttttaatgattagtatttatattgttattagatgataaaacatgaatagtactttatgcataactttttttttatttttttcataaatttttcaaataagacggatggtcaaagtaacgttggacacagaaacccacaactgcacttaaatggggcagagggagtagagtatatcattggagaccgatgaccaaatgtacatggttatagtacagttgcagcctaccgtgaatgcaacttcaattaaaacacatcaacatgagggtataaaagtgttatcagcagttttagtaaaatgcagcctcaattaaaaaatatcaatatgggagtacaaaaaagtgcttcatatgctaactgttgctttcctgtaaatgcaattatacagcagttttagtacacttacagcttacctgtaaatgcaacctcaattaaaaacatcagcatggtgatataaaactgccagatgtgactataagtgatatcaggagcccggttgatacccttttaacaaaataaaagaaacacacagataatatttttgctatttatctattgcctagtttattttccttgtttatcagtcacctaaacttgcacaatcgatggacctacaagcaactcttcttcaacttgtattttaatatgtggagatttatatctacacaagggcatataggtgtgttcttttaaacttctctacactaaagaaattgtttgtattgtatatgtggggatttactgaggtacaattcctttattgtgagaacagtgtttattcatcccaagaaaaagaaacatacgagttgtgggatgttgatataatagttggtaaaagagctggtagataaaaaaaacagaaagtcagttgatgaaatataaatgcaattccaagagaaataaagtgagcctccctgcgggcatgacgcacccgggtagctgagcggcaaggagaagcattgtccaatggaggatgcaccaaataaatacttgtacacttcaagtacaatacgaaatttcttcaaatggctggaaaagaaaatatctgtatcaacacaaagcaagaatatgccaatttcaaattctcaaatgggtgacgaagttgtaaacttcgccttttaactctctctggtaaaattcaatgtacggagagtcaagagagacacagataaatcatactcaatcaataatattgtaagaacacattgtagaagctatatagaagctgagcttctgcaactacataagaacagacatggaaagcgaactacggcatttcgtcgaacacgtcacacgcagaacccaatccatcagcaaagacgctgagcaagacgtacctgtaccaatgaatcccaagggagatcctccccgttgagtgcggaaccgacatcccgagtcgccgtggggattcagcgacgtgatgtgacctcatcccgataagagaccctctgccccagcgccggcgaccgaccatggcggcctcggtcggcggggctcgtggtggtgtgcgacccgcgccaagaaggagggcacttcggcaatcgtcaccaccgccgccgccgcctgcactcccatcccggaagcgatggtcgtcggcggcggcggcggcacttgccgtcgagtttgctccgcccagccttggaggcttcgacacgttgacatggagaatgggccgggcccttgttggatagggcctggcccatcttgaaggcccacaggaaggcgatttttcatcaaatttaaatgttgttcgtgctgtccaagctcaagctgttgagctcttcgctggaaacaaacgtaagcaatgggaaaccctctatttcatcaaattcacaatcaccagttcaatcacgctaactgtaagacataattcttatcagaataataacttgtgaattagtggtcttaatactccctccgtccatattataagggattttgggtggatataacacagagtctgtccagattcgtgctactagaatgtgccacatccactcaaaatcccttataatataggacagagagattactttaagagcaaatatagaagaataaaatacgatgggaaaatcacgaaatgaatttttgaaatttaaattttggctgcgcctttacaagttgaagggtaaactgtggtagtatgagattgttaacgtctcggtgtacagctacaggtaacatgtacagcttcaggtaatacactcattcataggaactgtaaatggatccaacagcaccaggtaattcagaaaatttgaagctttgaggatgctcaaataccgtatgcacttcaactcagtaatagttttgacgcaactcagtacagttgtaatagcacaaaaatcaaaactcgcagtttcttcagattaccgagtagcacctcatgaattgaaacatatgacggtgcgcaaaagaatcagcttgcagatgcagagatgctttgttatagaacagcataaacaaacactgaacagtaagttcggtaaaaaaaaaaaaactaaacagtaagatgaagccctaaaggacaaaaccaaatctttaggtatgattttttttagttttcaacgcttagctcgttttcaccttgtttaagaaactaggaagaaagcccgcgcagttgcgcgggcaatttatttattgtttaaaaaaacctaaaaaaacattatatcaccatattcactataagaaataaaccataaattttgacatactaaattataataatgtccatcatatccaaacaaaaatctttttgccctcatctatcatcactacttattatcgttgtcttgaaatatagatattttttaatagttagaactgcatctctatccacaaataaacccaatacataattaataccatataaaattcatatgtacttcatatgcaagtactcataccttacaggtatccgaatctatatgtaaatatttaaaaataccacatctactaattaattaatatgataaaaacattaacttatatatgaatgtccctttaataaccggtgaagccgactatagccgctaagccttttttctccaatgccttgattcatgtgtgccttattgatatagttgtgctcctcacgacaaccttggagcacaattttataaaggattgcatcggtaactaggctagttgagctctattatcaatggtgacctcttactcggaccacttctgctcaataatgcgtacttttgccgtagttactacaatgtagccagttgaggtccatgcttggcgccctttagggtatgagtaagagaaaatgcaggtgatgaaaatattttttaaatgttttgaatcgatttattttatagagtatacataatttatttatggtgttaatcgatactactaaattttagtggtacatatataattttctcttttaaagattagcagagttgatcattggactctactttgaaaaatccaataggttcagtggtgaggaccactaaaaaaatatttggtcaaattgtgatcttttgctaacatacaagttaatataggttttgattttttttcttctattatacatctaatttacctatgcatattcatgggactaacatttgatgaaatttgttaaaattatttgtgctaattgttaacactatttggtagagaacgacataaaaagagatataatgtagttacatctatgtttttttttctagtgaacagtagtctctcgtgtggatgtttattttttcttttttttttctttttggatgattatttgtcaatcataagaataggatgtacatttttctattcatagtgtgcatctgcatggatttatatgagcttatgtgatcgccttttaaattgttagtaaataatactttaaaaaatttgacaggaagagggtggagcaacgggtggcatgaggtggtgtcatggtgtggcttattttaccaccttgctaggagtggtcactacatctatgctcaatttagaaaataaaccttatagtcagaacaaatgagaaaactaccatataggacagtcatatacgcactcttcttttttttattatttttatatatctagcgtatgtatgtacataggagttgtgtatgtacgtaaggagagattagacggtttttagatagagagattattgtcatagatctaatttaatggttgaaaataatggaatcgctaattttgaggtgtaaatcgatgaatagttgtttttcttttattttatagtttttcctagatactctctaattagagcgtcacataacatcttagaagcgtttgtaggagtatagaaatgctattacccatagtcacaatctacttgtagtcaactattgtttgtggtggattatgcaacctctacttgcctatcatttgttgatcgttgcacacttagtattgtcctttatcttcggtgcttgacgacatacatgctcattagatatcagttaaccgttagccgttaggtgcattgtgtatgaatatcttgtaagtgatatgacttagcgattagtaaagagtgacctgtatataaaacttacatatatggggatcagtgatgacatgcaattgatattttaggctaggatattgaccaattatattgcgtactacatattaagtttttaatacctaagtaataaatttaaggcagtgttgtaaagtgcttataggattaactactccctatttatagcgagtacgtttgtcaaactactatacggtgtattacacagtacgtgttttacaaactttttatataaaagttttttaataaatcgaatagattcatttgtattttttaatatttaatacccaattaatcctatgctaatgacatgtatcatcttgcacgtcctggataagcacagctaatgagctaaatcgatttaaacctaagtaggagataaaagacatcgacacgatttgaaaagaatatatttgatccttaatttctaatgatatataaataaagataactcacaatacgtgaaaatacattcatgataattttagtaatattattttgatatatcaattatttttatagtagggagtgagtaattttgggaaagagtaattttgggaaatgttactcacaactgaagttgttttatttttaaaaatgtaagtctaatttcactatacaacatacaattatataatgcatattattcatttatttagatttttatggatgttttgatgatgtgcgtattgtagaatttaactcaaaatagcatatattttgacaactattagttgaaattattaatttggtttttatctcatgagagagaaaaagaaaaaaaaataagggaagggggtggccacgtatgaggtatgtacgtacgtgcacgtacaggttcgggagggattgttatggacgtgcagctttttaaagataaatctatttggtattttagatttaacggttaaaaatatggacctaccagattaaatgaaaatcaatggctagatgttttttcaaaactttctaatttattaaagtgccacttggcggcttaagagcgtttgtagagatgccatgtggcggtttaggagtgtttgtaggaagtttaatagacttttagtatataaagatagatagatagataataaataatagatagatagatagatagaagatagatagatagatagatagatatctcagaccataccatccacatctatctgcagcttatcaaaactggacagcctgcattctactgtagcttatgaaccactcacacatcctcaacttctcttacaaaattgctcgtgtacagagtgaactgttatatatatgcttcttcgtggattcggttcacatataccagacatcagctgcaagattaggcctcaatttccgatcactgtttgtacatgataaccccaacagcagtaacttcatggcatcgcctggtgtccagctctcaggggggcatccttggatcaacgattttcagctttcttctatactgcacttggttatctttactccggtgagccctcttatgtgaacccaagtgccattttagtttatttataatgaaaaattagcaagtgctaaaagagtgtgtattttgactaacatgaagatgagaaaacgattgaatctgcttgctttaaataggcttataaatactgactgaattgctaacaaattgataaccgaaagatctaacaaatcctatcttcctatatagttggtacccactaaaaagcatttactcctataaagcaagacatgcaagaagccacatcatcgataattttaagcctttggatcgcattagtatgagaggtatcagccatgcattggatcaagaagctggctactcatccattcacttccctttagctcataatcactcgtgacattgttatccattatgtacatccaaatcctcaaagataatactaatctttttttcaatacaacttccattattacataagatgtgagctttcttttgttataaacaattggataacatacaataattaggtatcatgaatccaaaccaatttttgaaacatacttgagatgaagcagagaagtgctacactacctaattgtgacagtatccagattgtacatgaaaataactttcatatatcataacaatacataatgacgtttcaaaaaataaaacataaattgtatcgtaataacagaagctatatatgaagccgcattatcatctattttatatatacaaagaagtgcatctaatcatttaaaacatttattttattctgtgattaaactagcaaatcccgcgggcaggcgcggggtgccaactagtcctatctaaatcgcaagccggtaagtactgtagctgtccgacacgccgtcttacgctccctcccgcacaactcctgccattgtaaccgcgtcctaagcactcggcgtgctgtgtctggacctgtgcgcccctgcgacgatacgtaattccgatcatgacattgttggtatgcagtacctaggatcaaccttgttgacggcgggctgagaccaaactcaaggatagttggagtctagcacgatcaacaatgtcgagtgataaggttggaatgcgagtgtacccggtggacggacatggttcggagagaacattgtaatttggcggcatgtcaaaacgcaaggaggaaatgaaggaaagatagccccatgtattagtaacgtgctgatgcattttgccgtctcgcctgtgtcgagtaccacctctataacatgttggccctgtttacacccaaatttagcacctaggattagaataggaaagattgccaaaatttggaaatctaccggtttcctccgagtgggccggtctgaccgccatgtgttgggaggtcagaccgccggttgtaggccggtcagaccggtggtgtgtggccggtctgaccggcgggtccgagtccaaccctgtttcgtcgggtctcgaagtttccttgctcgggaatgcatgtttcgggtttcctttggattctaccccgagttggatgtggaggagggcctgtataaggcaagaccaacccctatataagggacaggccggttcattgtaagaaaaaaaatctactatcaatcaatcgaatcgttcttttcatattgcttttagttttctcttagtttgtccatctttgtcggtttgcgctgtaaaccgtccgccgccgctgcgagagtgcgacacctctttgtaggtttgtcctgaaaaccttccgtttgcccacgagacgggtagttatctagaaatcagctccgctagccggtttagttatcaaaacccatctagatttagctttttgctagatcgaggtggttggcgactctaggatcaccgcaaggcttaaggtgctacgatcgtgcttgtcaacttgtcaaaaaagttgccaacacaatttttggcgactccgctggggaagagatccgttcatcgtcaactcgacttcgacttcgccatgacgaagccatcatccaagacggaggtggagccatctcatgtgataccggtcacattggatgactttgaaggagaggatcgcaaagccatggaggagtacatcaacgagctcacacgggaggcgttgatgagagcaactactaggactcgtcaaggcgtgatcatcaagcccgggccacgtcccaagctcgctcccgacgtggtaagtaatgacgaggtatcgcaatctatcaaccaacaaattgcatctacaatagattcatctatggctaattttaaagatagattagatgtgatgtttaaggaaaaagttgatgggtttttaaggagtaggctaggttcttttatggatgattacactttaaaagataaagcctataccactgctgatcaacctcctatagatctgatggggtctaaaaccgacggagcggcgttcgtgaccagtccgaccgggcctaacggccggtcagaccgtgacacagccgtcggtcagaccggccagatggccggtcagaccgggtattatcccgtcggaccgactggccagatggccggtcagaccgggtattaatccaccggtcagattggctctcaggccggtccgaccgcgcagcttgacgccggtcagaccgggccctgggccggtcagaccggtgcaattgtgccgatacagggaatcgatccaatgactaatgctagttatttgtatcactttagaacatttgattcccctgtatctactgccaccactagtcctcaaattcccccacatattcctaatatttacaatgatgtctctaggggatatcctcccgatactaggccaggccaatataatcatattgcgccacaaaaccaacctattaggccaccaaacccaccaccaaatccgcaagggcctaataacatggagaacatgattagtgatattatgaggactaaattcgggatcgagactaggaatcgtgctagagcttataaaaaaccatatccggattattatgataatgtgccgtttcctagaaattatagagttcccgaatttaccaagtttagtggtgaggatggtaagaccacatgggagcatgtaggtcaatttttagcgcaatgtggtgaggctaatagtgatacttttaaattgcgcttattttctttatctttatccggtaatgcttttacatggtttacttctttaccggcaaattctattcatacttgggctcaattagaagaacaatttcatgattatttctatactggagagactgaacttaggttatgtgatttaacatcggttaagcaaaagtataatgaatctgttgttgattatattaagaggttcagagatgttagaaaccgatgttatactttggatataactgatagagatttggccgggcttgcttttaatggtttagttgctcctcttagagagaaactagatggccaacaatttcttgatgttagtcaacttatgcaaagggctctggctcaggaaagccgggttaaggataataaaaaaattgctagaccattcgataaaaagcctaatgttaatgtagttgattactctgatgctagtgatagtgaagaggagggtgatcatgatatttatgttgccgaatggtcatggactaacaagaataaaccttttgtttgttctaatttaatgccgactcatcgtaaagatcggcaaagtgaggttaagtatagttttgatgtggccaagtgtgataagatttttgattatcttttacaagagaaataaattagattacctaaaggccatgtcataccatcacaagaggagttaaaacatcgagcatattgtaagtggcatgattctcattctcactctaccaatgattgcaatgtgtttcgacgacaggttcaatcggccatagatgaaggacgattgaaattcaccgatggctccaagatgaagcttgatcatgatccttttccggtgaatacaattaatttcaatgataagaaggtgttgattcggccggagcaagccgaatctactaagggaaaggaagtggtcattggtgagccaaggcttaagatgatggtgccaaagaagccggaggttggtgtttggaaggagaacaagggtgaagcttcaacttctaaggctcataggaagaccaaagtaaccttcgatatgctcttggagaagtatgagaagcaaggtggtgagagggatcacaacaaagggaaaagaccaagatcaccccctagggagcggtttggtcactcaccaagacgatcgcgttcacctccatattttcatccacaagacatgtcatggggttcttatccaatgccgccaccgagttatccttatccttacttcatgccatggggggcaatgccgccaatgtacaatcatatgcctccaatgcaattcaacaaagggtggggaggaccacggaggccaattcatgagcgcttatcttcaccaaacaaaagccgattttatggtaaaaatcgggttaatgaagaaaagagggaatgaacgcgcaccaaggtggaggaaaggacttcggaagtgattaccatcaagatagggtcccatgatgtgcctataccttctggagatggagttggaaagttcccaagcgagaaatccgaagccggtaccagctcctcgcagtcggccggtctgaccaggccttccggccagtctgaccgcggtcatgtagccggtctgactgggccatcaggccggtctgaccgccgatctgacgacggtctgaccgacgcctcaggccggtctgaccgcacgccacacgtcggtctgaccggcgcgtctggccggtctgaccggtggtctacagccggtctgactgggctccagcgtcggtttgatgagagggctgcaaagggcgatgtgagggcttcatcgtctccaaacaaggttaatagagggcattatttgcctcctggaacagagccgaatcctaggtggatgcctaaggatttgacggctacgcaaaagagaaggttgcaacgtcttcgggcccaagaattaagagagaaaaaggccgaagaacagagggataagaggttcaatgagttgcgaccaccaccggtatggaggcctaagtccatagagaaggcaaaaccgattgatgtagaggagaaggaaggacaatcggttgatgaaggtaaatcgtctccaaaggaggacatggatatcaacatggtgtgtatgttgcctatggagttttgtgctatggatgaagccgaggttgcccaattctcattaggtcctaaagacgcggtttttgaggaacccgatgaatcaaaccgtcacatgaagcctctctatctcaaaggccatgttgatgggaagccggtctctaggatgctagtggatggaggtgccgccgtgaacttgatgctgtattcgctattcaagaagttggagcgtgaggatgatgagttgaagaagaccaacatgattctcaatggcttcaacagtgaaccaacggaggcgaggggtatctttttggcggagctcaccgtgggaaacatgacgctaccaaccgctttcttcatcgtcgatgtgcaaggtaactacaatgttattttgggtcgttgttagattcatgcaaattgttgtgtgccttctaccttgcatcaatgtttaatctaatgggacggcgatgatgttgaaattgttgaagcggatatatcagccgaggttgcaatggccgatgctacttttgagtggcgtcatgggaatatccaatgcttatcggggagggatctttctagctatgattttattagtatctccgatggcaaatttgtacctatttctgtaaagccggctagtgtagcacggctaagccatgtaaatttatataatgagtaaagaggctagtttagagtggttacaaaagagggtgcaagaatatcggtctacaaagaacgatattggtgaaaccgttgaagattttgatgaagtggagaagcttggacaagggtttacatcggctgatccattggaggaagtagacataggtgatggaactaaaccaaggccgacttttataaacaaaaacatgaaagccgattataaggttaagataatcgagctacttaaggagtatgttgattgctttgcatgggagtaccatgagatgccgggtcttagccgtgagcttgttgagcatcggcttccaattaaaccgggttttaggccttataagcaaccaccttgtcgttttaatcctttattatatgaccgagtcaaagaggagattgatcggtctattgaaggcggggtttattaggccatgtcgttatgcggagtgggtttctagcatagtcccggtggag

SEQ ID NO: 23922 - DNA, 2222 bp, Oryza sativa
ccttggaagatttattttgatggttcttcttgcaaagagggtcaaggcataggggtagttttgatttcacctaatggcatgtgttatgaggcatcggttcgtttggaatattattgcacaaataatcaagccgaatacaatgctttattgttcggcttacaagtgatggagatggttggagctaaatatgtggaggcctttggtgattcggaattggtggtgcaacaagttgccgggatctacaagtgcttggatggatcactaaataggtacctcgattcatgtttagatattattgccaattttgataattttgctattagacatattgctaggtgtgataattctagagcaaatgacttggcacaacaagcatctggctataatgtgaaaaatggattatttctaatattagaagaaccggtgcttgattttaaatttttgtgcgaaattggcaaaactggagaccagaggcggtctgaccggcgttgcacggccggtctgaccggtgaccaagggcggtctgaccggccgaatgccgccggtctgaccggcgaccacgagcggtctgaccggccctgtgtggccggtctgactggttctgggcagaatgctggggggtacacttcaatcgatttagaggccgagttaattgaaaattcggacatttgtgcccaggatacagaagaggattggagaattcctttgattcaatatctaaaagatcccacacttaaggttgatcaaaaaattcggcggcaagcattcaaatatacattgcttgatggagatttgtatcgccgaaacatagatggtgtcttgttgaagtgcttagatgaagatcaatctaaagtggctatgggggaggtgcatgaaggaatttgtgaaactcatcaatcggcccacaagatgaattggttacttagaagagcggggttctattggccgaagatgattgatgattgcttcaaatattatagaggatgcgaggcttgtcaacggttcggcaatgttcaattggcgcccgccgccgtgttgaaccctataatcaaaccatggccgttccgaggatgggctttggatttcattggtcaaatttatccttcatcatcaaaggggcatagattcgtgctagttgctatggataacttcaccaagtgggccgaagccgtgcctttgaagaatatgactcatacggaggtaattgactttattttgaagcatattattcatagattcggtattccgcaaacattgactacagaccaaggtgcttcttttatgtctaaggaagtgaagagttttaccgaatcttatggtattaaattgttgagttcttctccttactacgctcaggctaatggtcaagccgagtcgagtaataagacattgctaaagctagtgaagaagaagattgaggaacacccgaagaggtggcatgaggtgctttccgaagcattgtgggcgcatagaatatctaaacatggtgccactaaagtcactccttgtgagttggtttatggtcaagaagccgttttaccggtggaggtaaatcttggttctcttcgttatatcaagcaagatgatttgtcaactgaagattacaagacgttgatgggagacaatcttgatgaagtcatcgacaagcgcttaaaggcattggaagagatagagaaagagaataagagggtggccaaggcgtacaacaagagggtgaaagcaaaattgtttcaagttggagacttggtttggaagacaattttacctttgggtactcgatccaaggagttcggtaagtgatctcctagttgggaaggtccttatcgaatatgcggcattgttcgagggaacgcatattttttggagacacttcaaggggagcgttttcagcgagcaatcaacgggaaataattgaagaaatacttcccgagcgtttggcaagatgcttaggaggtactatggccggtaattggattatcgtcctaagatcaaaaacatgctctatgcttttagattcacgttgttcatcaaaaaggcaggggggcatgtgtttgcacccaaatttggtatctaggattagaataggaaagattgccaaaatttggaaatctaccggtttcctccgagtgggccggtctgaccgccatgtgtggggaggtcagacccgccgttgtaagccggtcagacccgtggtgtgtggccggtctgaacggcgggtccga

SEQ ID NO: 23923 - DNA, 19118 bp, Oryza sativa
tctactatcaatcaatcgaatcgttcttttcatattgcttttagttttctcttagtttgtccatctttgtcggtttgcaccgtaaaccgtccgccgctgctgcgagagtgcgacacctctttgtaggtttgtcctgaaaaccttccgtttgcccacgagacgggtagttatctagaaattggctccgctagccggtttagttatcaaaacccatctagatttagcttttttgctagatcgaggtggttggcgactctaggatcaccgcaaggcttaaggtgctacgatcgtgcttgtcaacttgtcaaaaaagttgccaacaggccctatgtataagtaactttaggttttcaaggaattgcatttttatgataattttctctgctattgttgtggtgagttgataatttagtcactaaatatgtaactttctgaaatttactcaaaataaaatatccaaatatttcagaatttctaacacatattcagtcattttaagtatctcaaataaaaaggtcgtcaatgacaaagttgtatatctcgttgacctacacaattttgattttacctttgtgttcactcggatttatataaaaaagtttattattcttttttttaaatgttcttgtaaatatcactaccggttaattactcaatgaacataacagtccagaccatggtccaaaatatctgctccatagtatcagtgctggcttgtaataccaacttaacggtggtactttttcttagagagaatccctttatatgccactaaaaattagtctgatcccttgtatgccactgaaaattggctttttccttatatgtcatatatctatctatctatctatctatctatctatctatctattatctatctatctattatctatctatctatctatctatctatctatctatttctatctatctattatatactaaaagtccattaaacttcctacaagcgctcctaaaccgccatgtggcgctcctataaacgctcctagattgccatgtggcgctttagtaaatcctagaaattctaagaaaaaagcaaaacatctagccatcgattttcatttaatctggtggacccgctattttaaaccattagttagatctttgttaagaaaaaacccaaatcaatctataaaaaaaaaatcccacgttacccccgcggtgtccccgtggacctgtacgtatgtacgtacatacgtacgtacgtatccctgtaagtctttttctttttttttcttcttatattcttatattagatgaaaaaccatgttaaattaaagttgtaaaaatacatgctatttcaagttttattctaaatagcgcatcgcatcaaaacatccattaaaattattaataaattaaaattgtagattatatgattgtatatctcttaagaacatagttaaattggacttatattttcaaaaaataaaaagaatttaaattatgagcagcgttctaaaatttactcactccctactgtataatattgatatgcccaaatgacattattaaattatcatgaatatattttcatatattatatatgttcctttattcatatatttttggaaaattaacgatcatatatttttttacaccatgtggatgtattttttatctcttaggtttcattcggtctacctcattagatgagcttatctaggacacgcgaaaaaaaagcatgccatcagcgtaagattaattaagtattaaatattacaaacttgaatatggatttatttgatcttttaaaaaaactttgcatagaaagtatttgaaaacatgcatcatttcaggaaacatctcaccatagagggagtagccaatccgataagattttagaactcaaccttaaatttactataaaatatatagtatataatatattttgtcaattaggaatagagccaaatatatcaatcatatatccctactaattcctatgtgtataagtttcatatacaaaccactgtccaccaattatcaagtcatattaattacttatgaagcatccgtgcttaatgcacctaataattagatgacatctaatatgcagtgtgttatcaagtactgataatggacaatactaaatgagaaaccatcaacaaatgataggtaagtattgataccaccaagccacaacaaataatagttgactacaaatatattgaaactattgggtaatagtgttcccacacacctacatacattcctaggttgccacgtgacgctctaataaattagggtaaatctaataaaatttataagaaaaagtaaaacatctagccattgatttacacttaaactggtggataaattatttttaaccataagattagacctcttcaagtaatccattacgactatgactaatagcattcctgcacttccaagatgccgcatgacgctctaataaattagagaacatataagaaaaatatattaagaaaagaaaaatataactgtttatttacacataaaccagtggatatattattttcaatcattatattatatctattcaaataatccctcactatgtacgtacacaagaaatgccataaaggaaaaaaagaagagtgtgtatactatcagccccatcaagtagttttctctatctttctttgcagctctgagattttccacaaattgtgcatatgagtagcgaccactcctggcgaggctgtcgaagaagccacgctacacagcaccgcttcacgccatctcgccaattttcttgaaagcattttttttactattaatgttaaaggcaatctcgagcgcatatataaacgtgtgcacacccatcatagaaataggcatacgcacacctaccctaagagaaaaaatatttgtcaaaaaaagaggaaaaaatatgtacttagtatttgccaagaaaaacatatatataaatatatatatatatatagcataaaaatgtcgcatgtaaccacattatatctttttaattatatcattcccatctatataataatatgctaattattaacattatagattattccatcgtatataaccgaaacaattcgcactgtcattatagtttaagggtgtaattcagactatttcctttaaaaaaagtcatttcaacacaataaggattcataatacaaatttaatcaatactaatttagtaaagtacccgcgcatatgcgcgggccaccttcctagttggtctaaatttacgcatcctctcatgtcactcccgtcagttgactgtgggttgaccgttaactctaaagtaaaaaagatgtatttactcttctgaatataagattctttctactttttattcctctgtcactgttagctcataacaagaaccagcagtggtatatcaccgcaaatgaactgggtagtgatatttagtaacattgtcagtttacttcagtttgggcaaagaaaccaaagtgaactgacagtgataaattctcaccgccggttcataccgaaccagcagtgatgaccacttctgtggtagtgattgctgcaatttatctatccatatgatttaacgcgcgcagcttccgcaccgcacacaaacactaacgccgtgccataaacccaaccaatttgatcgaccaccccggcagtcattaattgttttgatttgttacactaaagtattgagatcaactgtaaaaacttgtaagcgtccaaaagtcttgtgttttatgcgaagtgaattccccacaacacgcatggcaattgtttaataactccctccatttcaaaatgtttgacaccgttaactttttagtacgtggttgaccattcgtcttattcaaaaaatttaagtaattatttattcttttcatatcatttgattcattgttaaatatactttcatgtaaacatatagttttacatatttcacaactttttttaataagacgaacggtcaaacatatgctaaaaagtcaacggtgtcaaacactttgaaacggagggagtatatgttggcaacgtcaatgtgatacaactgtctgtgtgttcacttgtctgaaaccaagtggatcagtcaagtaattaattgtataacagatacggtacaattataatgacatccaaagaaacggagccggcaatgcgcatgtcatcttccattccagccggctgattccccaacacctacgcacctctctatcattgaaaacaattagcaaaatataccaggtaacctttcttaacatttaaaactgtgcacttattacaattctaatgcagtttgcggaatattgccttcactattaaattattgatgccgttggctttttagacatggtatttgaccatttgtcttattagaaaagctatataactattatttattttgttgtgacttgttttatcatttaatatattttaacattagtactaaatttttaaataagacgaatggttatcgtcatttccaaaagtaaatttccaaaagtaaacaacgtcgtacatttaaaaatgcaggagtagcagttctttgaaagttcaacggacatctgaaaattattctgaatttgttgttcatgacgattctgtacttctatttgtaatttacatattgcatacttatcctaaactacaaatattctctctgctctccaatctttatttttcatggatagactgcatattaaaggaactaaggttctgacacttggaaacatagcccaagaagtcagtgcaagcaaacatggacagtgacaattatcctagaaaaaaaacatgtacttaaccactggacggcaagccaacattactgcaaaaacataataaatctacgtaacaacaaattaactatcaaaagaagacatctttgacagcaagaggggaaattcttatgatcagatacagatcagatactatatagatgtgacaggctccaattttcgttgatactaatatccatttccatgtcctgacatagctctggatcatggagaaggggcaggagataggagcgtcagccggcgagaaaggttcagagcagcacgccattgacgtccgccccggcgagcatggcgccatcggagtcgtcgccggcgccgctgcagaagcaccggagaaggagagattggctgttgttgaagaggagcccaggaagaaaagcaagagggttgcagctcttgatgcctttagagggctaaccattgtggtatacatatatctactgcatatgcagtgaaaaatatgaatagttttgtttccatctagttacactttggtagtacttatcagtgttttgatgatcagtgtaatttagtattcatgaagtgtagaaagtagcacccctttttatttacccccttcaataaaaaaaggaagttgttttggatgtttcaagtaaaaccttagaatgtttggtcattaattaatgctctttaattatttagatttgaactatgaaaaattgaaaatcatctatatatatttgtctcaaaagttacttccataaaattataattttatcggatctttttgtaaaaaaaattataatagaaactaactgacaaatgtgccgatgtttttatgaccaaagggagtagtaaaaacagaagttgaaattctttgaatgagcatgaatgtgacagtgtaaactgttgagttgcattgtgcagctaatgatactggtggatgatgccggtggggcttacgagcggatggaccattcaccatggaacggatgcaccttggcagatttcgtcatgcccttcttcctcttcatcgtcggcgtcgcaatcgccttcgcgttgaaggttactacagacacttgcacaagagcacctcttgctatgaatctatgaataatgctgttgttaaattctggcaattgatcgtctggcttatacatggttgcagagagttccaaagttgggtgcagctgtgaagaagatcaccatcagaacactgaaaatgctcttctggggcctgctactgcaaggtaagtaaaaccttcaatgaacatgcccactatcaaatgcaatgtgcatatcaacaaattttcagtttgcaacttgaatgttatgacaatcattggcactgccgaatttgatgtttcgcatgtatgaaggtggatattcacatgcaccggatgacctgtcttatggggtggatatgaagaagataagatggtgtggcatcctccaggtccagtaccttaatttgctgaaagaaaacaaaaaattgttcagagtttatgttctgtttatttcttcagaatttattagttctgttttgacaatgcagaggatagctttggtgtacttcgtggttgctctgatagaggcattcaccacaaaagttcggcctacgacagtgcggtccggtccatatgcaatcttccacgcataccgatggcaatggtacacaaatattaccttgatatttggctaacaatgtcactgcaattcagcgaacatctgttcaatttctgaaaatggtgagcatttctggtcttttctgttatctgacaggctaggcggttttgtcgcgttattcatttacatggtcaccacattctctctatatgtcccggattggagctatgtctaccacaacgatggcgatgttaatgacgggaagcaatttacggtactacttgcagttttccctgatcatgtgagcagagctgcaaatcctgtatttgctacagtactgtcttatccctgcaggtacaatgtggtgtgagaggtcatctggaccctgcctgcaacgcagttggttatgttgatagggtggtttggggaatcaatcatctctacacgcagccagtttggatccgatcaaaggtagaaactgtaatcttgcaatgatcagatgtacaatatttgtccttctgtaatcaagtgcaaaattttgttttgttaacctgtaccctgcaaactctgaaactttttgtgaactgcaattatctttgattaggattgtacatttagctcaccaagggcaggtcctctccgagctgatgctccagcatggtgtcttgggccttttgaaccagaaggcttattaaggttggaaatctgacaacatgagctaactgaagctgaagttaatttgtcttagaagcttctttgcactacgtattaagtaattcagctgtctaacaatttattcttttgcagttcaatatcatcgattctgtcagggacaattgggatccattatggacatgttctcgttcatttcaaggttattttgtgttaatttatactattttaagttaatatttaacaagcacaagtttgaaacaaaagtgtctgaattttagacccacagagagagactgagacactggcttctgctgggattttctctccttgcactcggcattcttctccacttcacaaatggtactactactccccaaaatctatttcccacaactgataaaaaaggtcaaaatatttattcaggacttttacatccattttatctttcttgcagccattccaatcaacaagcaactctacagcttaagctatgtctgcttcacggctggtgcagctggagtagttctttcagctttctacatattggtatgatttttcattagtacattgaggcctcgtttggtttggtgtggaccgagattttagttcaaagtcccagcctataaacacggatgggctgggttcgattacttgaggcccatctaaacgaggcctgatatggaatttcagtactcattttcatgaccgattttaattttatttatttactggattattatttttttattaatagattgatgtctggggactaagaacaccattcttgttcctggagtggattggcatgaatgccatgcttgtgtttgttctagcagcacaggcaatatttccagcatttgtcaatggatggtactatgattcaccaggcaatactcttgtaagtaactttgttgcaagtttatttttaatccatcatgacagcatggtgacatctacaggcaaagttttgacatgagtttgatttggtttaatccattacctaaaaaaaaatctgcaggttagctggatccagaagcatgtgtttatcaatgtatggcactcacaaaggttgggaacactgctgtatgtcatatttggggagattgtcttctggggtgttgtgtcaggcatcttgcacaagctgggaatttattggaaactatgaggattttggatttaagtgtaaacagcgctaaggagaaccaattactgttgcttttacagataaagtctggtttctgatttgcatgtgatattattttgtatgatgctattatttgtataatcgaagcaaaaatgagatacatatattttaatctttgaagcattctttaggatattgatgttgatgtagtaagtggccatatatatgcttgttcagtgtgacaatatgctatttaccaaaaatcagtatgtatatcccctcatgatttttgtagataatggaagttttaattaaactgagttgattacatcaaggtgatactacttcactgagaacactcctggcctctgcataatctcctcatgattctggtagaatgatctcaaacgtctctgaagagattctatcacaccgattgatttggccatgttacaacgggatcacattcttgaaaccaaccgtccaagccagtgtaagttcagagttagaatctctgatgatcttcaaagccttcaaactgaaaagaatcagatcagtcacagtctcacagagagactgactgcagtatcagaagaacatggacaagttgcaactgtggtcagggatcccgagacaagcctgcctgtcctatctactcattgttcagacatcttcttgcaatcaaccaaaaggcccatactacatactacatggataacagccaaattggctggcaaaaatgcctaattggctgcagaatctagtcactctatgctcaatgttatgcgttcttgcccttatctgcatatatcattgggcttgggatccattgcatcagacatgttcagcaagcatggcaatgccaaattgccaatgctactggctttgtttccttctgcttgaatcagcaaataaacagtgtgaaatggcggcatccatggtttgctccgttttgtatttatgctggtttcttatcctgcaataaagtacatgtttgtatttattttgtttttaaaattttagttctgttttttggtgccttgatgtgctgtaatgttgtcttgtaagaacaaaagagaagtcttctccccatacttgtcaatcatgcaaatattgtcattttcccctgttaattgtcatgttgttattcttcaagaacatgaaaggccctgtttagtaggacaaatattggtcttatcttccatggggctaaaaatttttgtcagtattgttgagattttgattccaccagaagaaaaacaagattctaagttgaaggaaaaataaactggttgctccatgaagttgcaaaaattaattaaccatactgcaagtctgcaacctgtcttaattggtattaatctgccatgctaccagctaacaccattatattttcagagagtcacagatctaatcctaaaaaaaaaaggggaaaataatcacagatctctatagctttggtgcatgcagcatgtatgtatcttatgatctgtcagacttggtatgcttatccctgaacataatgcattgctcccatgcatgaacgttgtgagatcagagagcagatgatcagttaatcaattgtgcatacatgatcataaatttatattataatacattaatgtataccgttgtgaataaaagaataaaattatctgcccaatgttcttcgatgaggaaacaaacagtaaactgaaccaacggctaagtagatgaatgtacagctatagtattaaaaatatatactactagtaagcatgtaaaaacaataaaattataggtgaactaatgcattaaaagaacttatccacttctgcatcttattaacttaattaatcaatcaggtattgcatgcttgctatattaacgcatggtgtgctcctcttcacttgccaatctgagcatatgcatgggaatctatcacaacagttgacattataataagcaaaaaaaaaaaaaaaaacagatgaataactacatttttaggtcaaaatattgactcctagccggtgactgcatgaaggatttagatgtgtatatatactgtatttgcataaactactaacgtttgatgctctgcacccatccatatgcgcatcgatctgtgtattacatataataaattgttggtactgcaaaataagccgacatcgatctctatcttattacatattttccccaactttatcgtaaccccaaagagaactattatatatgcttccctattaatgaaaaatatcgaaaaagatagagccacaaattaaaatagtattaataaatgtatataatttagcttacaattaccaattgtttccttctagacagcggcggagctagcactccggctgccatgagcagctgccggggctcgccgatgcataccaagaggtgaaaatgctatgtggctaatattgggcgctgccggtagactatcatagtgggttttatacgggtagtatatctatcaccgttttttaaggatatgtttggaccaaaggatttaaagatgatattttttgtgtaggatttttttccttggagttatctggattaattacgggaacggtttccgaattccatcttgcttttctactatgttaaggtgtttttcctatttttatgtttcatatatattcttacatgttgtggaagaacacaataaggatcctctcctcttagccggcttttagcaaaatacattttagaggaggaaaaaaatgcaagataaaccccgaagggtggaacttaattatatatctatatgaatcatatatattcttggattttaagatgatcatgcattgtgagtcaactactcgcaatgtcagcgaccacatggagaaggttgatggtcagttacatgtccactcccgaaaaggtcaacctggttatcaccaaattaaaaagcgattattgcaaacagctagctgcaacacacataattcaccagtcaaccacttagcttttgccgccaactaatttgtgtttagtcaacgccccattaacgcaaatttgagctggattctccacagtagaggctgcatgatagtattattcatctggtcagtgccttgggcatgccgtgtccattcatttcagttgtagttaactctgttttcaatcccattgaaatgatactaacaaaattttcaagaaacatatatttttgcatggttatattcagtgcttctatatgaaaaatgaaaaaaaaaatatactccttacattttttaaatatatgatacggatgatatttggacatacgttttgagcattcaccttatttggaaaaaaaatagtaaaactatgagttatgctcattatacatttagtaataaaacaagtcatagaaaagtaaataatatagaaaagtaaataatgtttgaacaagatgagacgaacgataaaagtacatatcaaggaatcaacggtatcatatatttaaaattatagtagttaattagtacataatgtatctcttaggatgcatagcattagcaatcttaggatgaatacacatggccatgtaagtgaagctaatttttaatgagagttttacacttttactcttagtatacatcatttatttggttttagattaagcattcaagaaaatactgatggaccaaattttaaaaatttaacaaatctcatcctaatgtcaaatatttttgaccgtatggaagaaaaaagaggagtatggaagaaaagaggagagagagagagatgcatagcatcagcaatcaacaaaggccagtaacggaaacccaaaaaaattaataaactaattctgaaatgtagtcctgaaattcaacaataatattatgtgcgacttatctcaaatcgcacggcagagaggaacatggaaatgcatcagttgttgccacgtggtatatagtgcttgcgtgcggaccagcctaattggtagctgttgagacgcgtccgatccattaactaaccgtggttgtttgtagttgaataatggagttgccggtctggatatcagacactcaatttaagtggacactactaaatgtgtagtgccaatcataatcaagcaagagcatatattttattttggaataaattcaccggaggtccctcagcttaacagcgagattttttaagatctcttaaccacaaaataaaaaatatatacccctaaactcacacaaaccatgcactcaagatcctatggcggtatatatggatggtttcgctaacgtggcatcctagtcagcaaaaaaaaattaaaaaagtacgtggagcccacatgtcagctgcacatttctttcttctccttctcttctcttcttttcttaagtgagggaggctggcgacgggcagagcagcggatggaggaatggcggccagaatgcggcgtcgcctcgagcaccgtgataggaggagggaaaggggaggcgggcggcgggcgatgggggaggggagaggcgcgacaataaggacggcgcggtgacgggggacggggggcgcgacgcggcgacggggatggcgaggtgatgggggacgggacacccggtgcggggtcggcggcgggaggagcagagtcagccgcgtagggtggcagaggcaccgcagctggtggaggagatcgagggcgggagctcaagaagtgtgacggcggcggctacagctcgagaagcgtggtggcagccgccgctccgcccactttgccacgtcgcctgccgccgtcccccctctgcggcctactccggccgctccgctccgcccactgccatgctcgcccgccgtcggtcccccctctgacgtgcttgcccaccaccgctctcccctctgcagcgctcgcccctctccgcagccgcgcttgcccgtcgacgccgccgttccacctacctctggccgcgcgccgctgccgccaccacgatcccacgccaggtcggcgcggcggttgccggcggcgcggaaccgcctcgtcccgcgccgccgccagaggagccaagggcagacgcggaaggccagggtctcctcatcagtgtccttgtcgaagtatatccccacccccgccacttaggaggacgccggggtggctggggacgagagctggagcacgacgcggagcaagaggccgagggaggtgcacgtccaggacagcgcagcgagaccgaggtgggtctcatagatggaggtcgctaggctaggccccgcggggctagacgccgcggccgcgcgcagcacaagcgtgccatcgctgctctgcccgctgcagaagagaagagagaaaagagaataggagaagaaatgagaagaaaaaaatgtgcagctgacattgggccacacttacttttttttttttgctgactaggataccacgtcagtgaaaccacccatatatactgccataataccttgagtgcatggtttgtgtgagtttaagagtacacatttctagttttatggttaaaggacctaaaaaaatctcgatgttaagttgagggacctccggtgaacttattccttttatttttcatattaaagagtatatatattttattttcatattttagtataacctcgttatagtttgtagtatgaattattatttagttcatatttcgatcactctaatttcaaatacttgtcaccggatactatttacattttaactttgaccgatcatattattccttttaaaaaaatatactccatctgttttatattacaagtcattggaaaaaatttgtacaaagatatagtaatattttcaatacaaaacaaacttattatcaaaatatatttaatattaaatttaataaaagcaatttggtggtgtagatgttactaatttttttataaacttgatcaaacctaaaaaactttgattatgaaaaaaattaaacgacttataataggaaacgaaggagtattagtcatactgatagtctaaagttaataatggtcaaagttaaaatataaatggttgtgacaagtaaaagagagaatatatgttcatatacatgtgtagcatctcaatatctcgtatacacaaagtcacaaaccgctcacacaaaacagaggcgggtagctactggctttgcttggtaattgaccaagtaacaaacatttcattaaaacaaaatacagtgaacaaacatgtcctggttgcttttgtttctgaactgctcaacagcacatccacgttgccctgttctgcagcattgcattcaaagcagacatctcaagtccaaaggtgaacaggttcagagtaattccaaaccaagtcatcacctgacctaccaaggtaccaaggactaactccagcagcagcagcatgcaactgcaacaatatcttaaatttctccctttattatagccacttgaaaagcaagatctccttaattaattaccttgcatcattccaaaaatttcaacctttttgcacagcaacacagcatgtatatattgtgatatattggtccagtagatatagtatgtccaactaaaagtattgtatggtatgggtggcattcatgatggtcatattaccaatggccttgcctacatgctgcttgaatgatgccatttaatctttctgagatctacctggctaggtgtcgaattgtgtgacagccagcatggataagggtaatttgtgtgggaaactcatgaggttttttttaggtttgattttcatagccaattacttgtgttcccctgattttcaaaaataagtctgataatcaacatttgattaataaataaaatatcggttttagcctttgcaccaattgataatttacagaacggcacaactagttattgggctagttgggtgggcgcacgtctcaatgtcaatatatgcagcacacggctagtttctgaaatgcgctatgaaaacccaccggtagctaataaaagctctttgctgctcaagcttcgtaccatccttggctctccaactagatatccacacatgaaaatcattaggaccggctatattatcgaattatgccgtattattttagaaatttaacataagcatgttttctgatttgctaggcagcatccaaaagtcacattatattgctacatggattatggctaggtttagaggacatgcatcatttataagaccttatctgccaaagcatatcccagttcaccttttctcctctaaagcaactaatgtgtcacctactgccctaagtaccttgaatttaaatagtacaatcaactctagatcaaaaaggtcttaatggtcctattccttctgacgtggcatgattatttcctttggagcttggttggcacatgtatgtgcaatgagagcatattatgccataaaccccacaaaaagaaggacaagctagtgcccccaaaagacatcattttaacccctttataattaattcatcacttttatctcacttaactataattaagtttggtcccttaaaagcccaattctttcctttggagagtagccctgcagccaagtgcatgcatgcctgctcaaacatgccatgtgcacaaaccttcccccagcatcttcctttgcttcatctctttatgatctccaaaggaaaagaatcatttcctttttcaattgctctagagttacagcatacaaccactaaaacaacatacaaataacaactttaaattgtgcagatgttttcttctctaatgaattaaaggataagttgtgtgcaaattaagattgctctcctacaccagttgatgaatctagctatctcgacagattaaaagatgcaacatggagtaaatatgggaaagtaaatcaattaacatatatactcgtttaaaatagaagtacatctcccataacaacatattctagtggtcatttataattgttgttcaccaacccctcacttgtgttgcgctctaattaagcagggttgtggttgtcttttatgatttatgtgtttttccttaagagaaactacgaacaaaccatcggataattttctatgttgctacaaccacacaatactattaagcaaagaaccaggccattatgtattcgtacgctcgcatcgaaatatataccttttatcattgaccggcaccgatccagcatatagctccaaatacactctactctaaacctatatatctgtaagaaccacatgatgacccggattattttacggcatttggtcggtgcgcgcacaacatcccctccccgttgggtaagtgtagcaatacacacattaccccccatctttgataccattggtgtatatccacgagggcaagcaagcaagcaagctccacctctctgtcactggcatctccatgtgccccaatgactgcatgtggtgtggctccacaccccaatttccctctcctctcctcttaaaaacctccctctcctctccaccattgtccacacacataaaaaaaggcaaaccaaaatacctactccacatctaactaattctacaccagcttatatatttatacacacacacatctccatctccacatctccatttccatttcagagagagagagagagagaaggccaatcttactaccccaattccatccccctttgcatattctcactcactctcaagtctcaactcaactcatcaagatatcatcatcatcagagaggttgtagaagctacctagctagctagctagccaaaagagatatctttcagaagaaaggaaggaagaagaagaagaagcaatgagcagtggtggtggctcctctccaacatcatccccttctgtctgctccagatcatggtaggcatgcatacatgcaaactctctcatcacacaaaactatcaacatctattcatatgttcaccattttttgtttctttaatataatcaccctatatgtccataggtccgtctagtcttatcatgagttgcctatcaacatatcaacattattttggacagaaaattcacgtgttaatccgtgaaatgcatgagcaagaaaatcagtgaagattaatgaattgcctgatgacgatcatgtgttaattattttgatttgtgtgtgcaaataaattaattaattgaatcaggtctataagtgaggattcgttgaagaggtacgtgagctacgcgagcgagagctgcatccaggagctcctcgccgcgtcggactccggcggcggcggcggcggcggcgacgatgggtggaaggtgctcgcgtactgcaacggcgtggagatatcgaagcggcgggccggggcggcgcacgtcttccggagccggtggctgctgcacgccgtctcgccggggaagttcatggccgtcgccaacgccgtcgacgccgccaaggtacctgccactttaattagcagtattcctggcactgctaaaccaagcggacgaattaacgcatgattaattaaatattagttaataaaattttaaaaagattaatatgatttgtttaacatattttctatatgagacattttaaaagaacatattgtttagcggtttgttgaaatcgtgtgtgtacatgaaaagcgagagactacaagttaggaaagcgtggaaaagaacacaatctcaattacttttactgcttttatttaatggatcattaactaaagcctgggaaactaaaacgttttttggttaagtaatcatcaataaaggaagaaaacttaattcaagaggtttcactaaagagagattaataaaaggtatttttttgcaaaggattttttttgctttagattaaagtgaacaactaattaagaccttttaataaggtttgaaatatatccttccttttcaacgaattaatttgtactgaaaactaaaacactttctctcgagcagtagctctcaatacccaagttatccgtcctttctcatcaatctccaacgacaaataattgctagtacctacaactgatcaaattgtcgaattaatattgatgcaatttcactaactaattaattgattaaaaagcaaccaacaacaacgtactacccctataccgtactaccgtgactgtgagagtacacacattacgtacatatggtgtgaaaatgcacagcatttttttataatactatggcattgtttagtttggaaaaatttttacgtttggttgtcatatcggatatacggatacacatttgaagtattaaatgtaatataataacaaaataaattacagattccgccagggaactgctagacaaatttattaagcctaattaatctatcattagcaaatatttactgtagcgccacattgtcaaatcatgacgtaattaggcttaaaagattcatctcataatttacacgcaatctgtgtaattagttttattttttgcctacatttaatattctatacatgtgtccaaacattctatgtgatagtgtgaaagtttttattttaggaactacacaggacctacgtaataaatgggtataattgggtaacggtgacagtagattagtaaaacgtgttaccattgatgagtaaagttaatgcgttgttgtctcgtgatccgaccgccagcccaacccaccgtacctgtcgtcgtagctagtatctttgttacgcccgtgattcttaaaggccttcaaattaaacgtacccttttttgtgcatggtacaaatctaccaatttgtaccattttgaacgacctattgtacgataccatgaatgcaaaggaatttaccaattgtacgagcatgcagtaattaacagtccaggtatcagtgataggtaaagtgtgtctatttttttggtacttaattagaaacctagcccttgtacatttgtttttccagctttattcgatataacatgatgcaataagtattagcatacctataactaaaatgcctaaccctaatcgtacagtaaaatttaaattttaaaacctattttaagagttgatttgattttgatgttttttcatcgtatagttgaaata

SEQ ID NO: 23924 - DNA, 3941 bp, Oryza sativa
taaaccaaaataactaatatgactactttttttagctctctagatcagagtctacaaaacatgtggcttggaaaattttaggcttaccaactacaaaagctcaaagaccacattattgattaacaaaagccaaagctaacaaaattaattaatggaggggtattgtgctgcagagaagtctctgttttctactgtacacagactgtatagaaatactaatgtaacagtaaccaaagttcctactactacctagctagccccactacacctctcctcatgcacgctgcaacaaaattctgatgccaacttgtcgccatgctgctcccccggccatgcatgtcgcatcgtcagattgacacgtacctgacacatccagaaaattgttcccaagaaattattattactgccattggaaaaaaataaggaaaacgacagcctttactaaaatattgcattatagagccagcgatgtcgtgaagcctgaggacgaagaacattttttagactttcggttaatttttatgagtatttttcgtgtcgttaataataacaacggctagctcaggagctggctccgtctctagctatttctgtgaacaaagctaattaattgagaaaatactctcttttactttgaatatgagttgtttctttacttgtgctctagagttaaaagtaaaataatcttattgcccttgaactacacttgatattaattgggagagagtagcattttggtagagcaaatatggagaagaaaaactttaaaagaaattgtaatatttaaaagacaaatttaaaaatgtaaaacaacgaagcaacctacattaatctactaaagacagaaaaaaaaagaaactactgcagtaacatgtgtgagacgaggcaggcatatgcatgaatctacgagcccacaagtacaggccaaatcatttggcacttcgagatcagcaaaaaaaaggggaaaattagacagatcgagagagaaagagatgggtatatgaggatgattaattagagccatgtgtgtatcataatcagagagatgtggtaattaatcaattactccaattaattagatgatgcatgcacgcatgtatgctgatttaattacgctctaaactcgtgggctggcagtagtgtcaggcaggggcacacggtgccatgtgagggcacgtgtacccacatgccaaaaccttaattaacgtgaacatgattgtcttaacggctaattaaaggcacgcagcctgtcagattgttgtcagcaatttcctgttttaattcaaaacgaaaaagacgatgtgcatgtgtgaaattaccaattttgttttcttttagtagtcatctccgtcgagctggacaccaattaaatttctaaaaattagatagtgcaaaacagtggtaaaaactacgcaagtgcaagtgaaaaataagataaggtttaaaacaggggaatagtaggaaaaaatagaagatcgaaaacttctttgtacgtaaccagctatctggagtattgatcggcaagcttaatttgaattaagcaggaaattaattaataccattctgaattaaatcggtcccgatcagacaatttgtgaccttaattaattagaatggctctcgcctggtcggcagctaattaattgtacttggcgaattaattagtgaaatgggccatttatgggcccaaaattactaggccagatagtccaatggctaaaattaagatctttgcatgcagcaatggtcctcttccaaacatctttatcttttgactagcacatccctcatataaccactttattaggtgtgaattgaccgctttaatctgaacattgaccgtaataattttcaagtataatttcactagttaattagtaaataaagaaattatagttgtactttctacgtttcaaattacaagacacttaaaaaatttttctaactcaaacttttttaactttaattaagggtatagaaaaatataataaaattttaaatataaaacaaatatagtataaaaatatattaacactatatttaataaaatatagtaattttcaagtataatttcactagttaataagtaaataaagaaattatagttttactttctacgtttcaaattacaagacacttaaaattttttttctaaatcaaacttttttaactttaattaggggtatagaaaaatataataaaattttaaatataaaacaaatatagtataaaaatatattaattttatatttaataaaactaatttaatgttatagatgtggtacaattttggataaacacggtaaaactcatgaaagtttaacttagaaaaattaaaatgtctcataatataaaaaaggtagaaataaattgatattcggtgcatagttatactcttgaagagggtccaataatccaattgaattacactgcaattactccttccgtatagtataagtcgttttgactttttaagtcaacatttctttaaaattcataaaagaaaacctttagcaacatctaaaacagtaagctagttttattaaatatatgttgaatatattttaataatatgtttatttcgtgttgaaaatgttactatatatattttaataaacttaattaaacttaaataaatttaactaacaaaacagtcaaaacagcttataatataaaacagatgtactggtatctatttaattaattaatttttacatatccatatatatttattaatactgcttaattaaataaacaaataaaacaataatattgcagcagtgggagtcggacctggtggacgcccggtacatcagggagctgggcgacgacctgagcatcgtccacctcaagctcggcgccgacgcctccaagcgcaccgccggcctcttccgccgccgcgacgtcgtcgtctacgagcgccgccagaccatggacgacggcacgctggtggtcgccgtggcgtcgctgcccaaggagatcgccgcgggcctcctgccccccggctcctcctccggcgcccgcggcgccggcctgctgctccagtccggctgggtcgtcgagaagctcgacgccggcgacggcggcgacggcccgccctgctgcgtcgtcacctacgtcgtgcagctcgaccccgccgccgggtggctgccccggtgcttcgtcagccggctcaacagcaagctcgtcatcatgatcgtcgccaagctcaagaagatggccctcgccaccatgcactccgccgccgccgacgacggcgaggtgatgccatgagtttagttaggaaggagagagatcatctggattaattaattccggcgatcgatcgatgtggcactgtggctacaagctcgccgtcgtcgtcgtcttcgtacgtgagtaaatacgattttgtagaagagtgtggtgttgcgtgtgtggaggtgttatttgtgacatgcgtcgcttgcatgacatgcgtttcagcatctctctatatataaatatgaactttgagagtgagaattgttaccgtgtgtatataaattaattaatgtgcttttgaattttcttgaagaaaggctgcatcctactccctccattacataaaaaacaaataagataggataaaaaagcatactcatatccatattcattgtactatgaaacgtcacatcactcactctagctagatccattgtactaggaatgaaaggagtatgtatgtggctaaatccccagctagacatctatgatggatcatctatcatatatataaaagacacgtgttagatgacttatctccgacagataaaaaagaaaccgttggatctataacagatgaacttatcgaaatttcaatatggctgcaggggattagatgatccgtaacagatgtaatgtcgcccccttgtttaaacttctgtgattggagtgaccaccgtcgtcagggctgcaggaat

SEQ ID NO: 23925 - DNA, 2414 bp, Oryza sativa
cttacaacaacttgagcggtccacttccaccgaacattggatccttgagtaaccttgaaagcctgtaagcacaaaattaaatgtttatgttagctcattgttggttgattaattcataacaaagtctgaagctggattattcaaaagtcataaactgatcatttgattagaacaaagattccatatcatgattttaatataatatcaattttaatttcattaatgaatcgcttctctcactttctcttgtgcatgacaggagcgttgttggctgccaattttctggtgacataccaaaagaactcagccaactcccaaagctgcggttcctgtaaagatctcaatgacttggaaaatattgttaatgatctcatatacctgcgtcattttttttatgttaataagaagttgtgacggtaaaaagttgtgacggtaaatgaagacagtagtttagacttagttgaaatttcaatttgaaaacccttcttttttcacattgacttatttgttagctcgaaaccatttccatttcattccaggtaaaacagaaaatagtttttatctgttttgggggatataacaaacaaaaggaaatgctaactgagtatcaactttgtattatttcttatagtatcatggtataagagttgatggattgtattgctgcaggtccttgaacaacaacaggtttactggaagtatacctccatcaattggcaacctttcaaatatgtactggcttgacttgggtgaaaatcgtctgactggatcacttccagtatctgatggaaccaatactggattggacaatttgacaaacgctctgcatttgtgagtacctttcttaaaatatctaccaggctttcagttcactggcttccattctaaggaaaatgttcggactgctctttattcagtcattttggggtcaaccagctatcaggcaccataccaagccagctattcaaatcaaatatgaagctcatacatctgtaaggcaaagataaccttagataatatttgcaaactgtttcattacttttaatctgttatgtcatgctcaagattacccattgttcttgtcattcaggttgcttgataacaacaatttcactggcggcattcctcccacattgacccttttaactaaacttgaagtcctgtaagtgcatactttttctgagcaggcttataaccagctttcttctaactgagtgaccattcagtatataatccatacaactcaatatgcacaggcgtctcgacagaaattaccaactgactggacctgttcctgccagcatcaatagcctcacaaaactacaagaattgtaattttctggttactctgaatctctgatcagtatttgaatgtgctagccttcaattctaacaaataaccaaccttattctttgtcaggcatctagaaaacaataaattgacaggccctctgccagacttgacaggaatggattcactatatgttgtgtaagtgccgaacacactgtggtacactctactgaaattttatcataggaaacccttgtatctggcatattgaacttttggttcatttggccagtaagtacaactaatctgacaacacatttgcagctccatgggcaacaacaacttcagttcatccaatgttccaacctggttcacagctttgtcagccttgacttcactgtaattcttctctgcacactttttgtagaacacaaggatgcaattttttttacactcgctttcaaatctcggtaaatgcacaggaaccttgagaacctacacatcactggggagcttccgcagcctcttttcaaactcccggctatccagacactgtgagtggaattagtgttatctttgctcataatatgtggttacaagaactatgcactcaatgaacaaaaaaaaaagagtaaaggaaattgaacatgtcagtgctaactagcaaggtaaactggtggtggcaggggtcttaagggcaataatttcaacggcacactaaccatcggatcagactacagcagcacgctctcactgattgatttgcaggacaaccagatcaccactctcgccgtgagcggggctcagtacaacaagaaactcatgtaagatccatcaaatataccaagagaaattttacggtcctttaaaaagaacttcgaggtacctaaatttacactaaagattttggaacctcgagttacctagtacctggaggtatcaagttttacaccagaaaatgtgatacctcctggtaccttctcaaggatgataaaattacccaatataccaattcttcagtatgtaggcgctcttatatatgctttcattcacactcccatgtttctcttctcatcacagacttgttgggaacccaatctgtgttcaggggggctgcaggaat

SEQ ID NO: 23926 - DNA, 4717 bp, Oryza sativa
ttcgctgagagtaagtcaactgttcgaaaatctcaactactgtagaattaatccactaccgaattccttttttttttttgttgaagaattggcactactgatttctagacttcttcatgattacacagcactatcagcacccagacagacgaaaaagaaccagtccctcatcattggtgtgtcagctggtggagcttttgttgttgtgtcactgcttgttctttttacagttctgtttttcaggaggaacaaaaggccaaagctgcagccacaacccaggagcccatcttacggtaagaagcattggataaaaaaaaaatcatgttttttgtccatttgagttgaccaacacatgagctggcaaataaaattacttaaatggctgtagcttcatgggacatcaagagcaccagcatcagcaccccgcatctccaaggcgcgcgggtgttcacattcgatgagctgaagaaaatcacaaacagcttctccgatgctaatgacattggaactggtggctatgggaaggtaatatatagtatatttgttgaaacgggtatgtgactatctttagtgcctgacatccaaagcgataatgctgatcaattgcaggtctacagaggagtactcccaaatgggcatctaattgcagtcaaaagatccgagcaagggtccttgcaaggcaacctagaattccggactgagatagagctcctatccagggttcatcacaagaaccttgtcagccttgtgggattttgctttgaccagggtgagcaaatgctggtctatgagtatgtgcccaatggcacactcaaggacagcctcacaggtgtgtccatatgttcagttatgcatgactgaatctgcaattctcctttgtgaaaataaacatattctgctcacatctttttcagggaagtctggggtgcgcctagattggaagagacggctgcgagtagtacttggtgcagcgaaaggcatcgcgtacctgcatgagcttgcagaccctccgatagtacacagggatataaagtcaagtaacattcttcttgatggaaacctccacacaaaggtttccgactttggtctctccaagcctctgaaccaggatggaaggggtcaggtcacaactcaagtgaaaggaaccatggtgagtttcacagctctcttaactgcaatactgcaacgattaagcacattggatactgtttcctggttatttttcatcaactctgtaagatgagtatacagagctgtttaaagattataaaatacttgtcatgtagggatatttggaccctgaatactacatgacccagcagttgaccgagaagagcgatgtctacagcttcggtgtgctactacttgaagtgataacggcgagaaagccattagagaggggaaggtacatcgtgcgtgaggtgaaaggtgcaatggataggaccaaggacctatacggcctccatgagctcctagacccaatgctagcacccacgtcgctggccggcttcgaactgtatgtcgacttggctttgaagtgcgtggaggaggcaggaatggaccgcccatcaatgagtgaggtggtggcggagattgagaagatcatgaagatggcaggcgtaaacccaaaggtcgactcggcatcaaactcgatgagctacaacagcaggacaccgcgtcatccatacagtggagagtctcaatttgattacagtggtggcatcccatcttcgtccagggttgaaccaaaatgatcagttcggtcggcccacaatgatctccatgtaaataacttggcgcttgtttgtttgtgtacagttcatcaaggttctgaactgcttcgtacagtgactttcttctggaatttctgtatgattaattagctaacaatctgggtgtgtaagttgttgtgctagaaatctcctgttggtaatgccttttatatacgacacttttttagtgttatctgtcatatatatgtttaacgattctatggcgcaaaggggatttggggaatttgcttctccagtattataaccaaataaccaaagaaccaaaatttttcccaaatgcaacaggctgacactgagaagatgagcaattcatcatcattttcctttccaatcgaccaacggtgtaatctagactgcgccccacaaccacaacattggttctgatttcaccgattccagaactaatcaaacctcataaaccaaaatacagtaagtagctaaactagtactgatagtggggataaaccgatcgcgcgacaaaacgggtcgagatctccgtaatctagtaataaatcgatcgcgcaagtagattcagattgggggttagtgaccatggcgggaggacgtagggggcttacttgggatctgagatggtgcggcgcgcctcctcgtcgaccgaggcggcgcgcgccggagagggaggcccgcgacggtgggggctggacggaggcagacagcgggcggcgccgcgggatggaagtggaaacgtggcttagatctaaggctgtatttttctgttcctaacgttcctgctaattttttcacgcgcgttttctaaattattaaatagtattatatttttataaaaaattatagtataaaatttgttttaaaaattcgtactaattttttaaaacttttttttctagtaagtactccctccgtcccaaaatataatacttcatccatctacttttgacagtcatatttcatcttggcacacagacaaaggataatcaattctacttatcatctatttaagcatactactagtcattcctcgtaaacaagcgattcattaatatttacatttatcgatgcccatatagccaatcttgtgtggaagaatagagagtcacgtgttaaatatgagaaagtcattaagatgatagggtgctagattgaaatatgcctatcaaaaataaattttttagattaggaaatatgcatatcaaaagtaaatgtagggagtaacttctagcctctagaatttgtataaaaatataacaacttttacaccaacatcaagatcctctattatttaattttcccacataccatcatttctcatccaatcacaaccctcttctatctaattctacataatttcttaataaccacgtccaactttaaaaatacttacattctgggacggatagagtagttaattatgcattaattcatcctatcgttttgaatatccaactaatacctcccagcacatcataaattctaagggggtgtttagatgaaggggtataaaattttggcgtgtcacatcaggtattatatagggtatcgcatggtgtgttcgggcactaataaaaaactaattacataattagtttactataccaccatattgttaagcctaattaatctatcattagtaaatgtttaatgtaccaccatattatcaaatcatggagcaaataggtttaaaagattcgtctcgcaaattagtcacaatatgtgcaattagttattttttagcctatatttaatatttcatataggtgttcaaacattcgatgtaacaagggtgaaaattttagggtgggatctgaacagagcctaagtgtagcttagagcatgatggtgacaattgtttccataaattctaataccaaaatagcaaaatctcatatcaaattctctaaagagtatttatgatttaaaatcacgttactatctaatggatggatcaaaactttgactctgtaaaataaaaatataggccaccctaaattaacaataaaataaataactttatctaatgagttagtttcaatagtttgaaggaaaaagtacacccaaggtccctcaacttgtcatcgagatacaaaatcatcctcaaaccgcaaaaccagatatcccacgtcccttaattaatcaaaaccagtcacaagaggtccctcttaatcccggtttggtcctacgtggctgccgagtccagcgtgggacccatgtggggcccacgtgtcatggtaatccacgtcatcacccttcctttttctcctcttctctctttcagggagaggcaaagcggcggccggcgggtgcagggccagaggccagcaggagagaggagggcgacggcggccggcgcccagcggcggcagctggcgggaaacacggcgacgcggcggccccgacggcgatgtcatcgactgcgtgccgacgcacctgcagccatccggttcgggatgaagcagccacgcgtcgccggcgtcgtccgccgcgactccaccaatgacgaccgcgactccacctgctcgtgcatgccgaggcggcctctgtgccgacgctcctcctgtgcgtgttcggctgcccctggcgagcgacgttagactctgcttcgcggcggccgcgccggaggccgtggacgtgccgcggctggtgctccacttcgacagcgctgggtcatggagtagcagagcttgagcacgggggcagtgccgcagaactcagggattacgtcgcagctgaacccgaacctgagatccacgcaccccttcagctcctccaggtcgtcgtcgactcgtcggtcaggctccgcgcgtgccgccgccgccgccatcgctcccgctcctcgccgtacatgcgccgccgccgaagacgacgacgccgcagggcttctccttggcgaccaccaccggcttcgtccgccgtggccacgccgcctccaactgtaccccgcacca

SEQ ID NO: 23927 - DNA, 624 bp, Oryza sativa
aggcgaaggcgaaggcccatggctgccggcgacgaggaaggaaagctcgggcttgaaggaaagaggccgatccgaatcgaactcgattccacgaacttccaaaacgaattagccgatgattccaaaggagaaaaggtagaggagatcccggagagtgtttcccctctattgatttggccggaaacggaaaggggcggccagattggaaggaaacagcggcggtggctcggcggcggcgcgctagggtttcggcccgaggaagacgacgggcctgacaggtgggacccacctgtcagcgtccaaacgcgcgcgcgcgcgggcggctgcggactgggccgacttgggccggggagagagagagaaggttttgggccgactttcggcccaaagccaaaagaagactttttaaaaactttttcaatttaaattatttcttaaatgcaattccatttattaaaaatactttcttagctcaaataaatcccagaaaaatctaggaattatagaattaagcaaagtatttaatgaaattttatctggccccattttatattggaatttattaattaaaattagattttcttttcaagacttttaaaataaattctagaaattccatttaaa

SEQ ID NO: 23928 - DNA, 5130 bp, Oryza sativa
ataaggaggaacttggattgatccatgacaagccatccgataagaccacaatgcttcggctaaacgagtatgccattgccgaggataatcagaaatcttccttttaatcaacttgatcaaacttttgttagatgcctcggcttgcccattagcttgtgcataatacggtgaagaattcaacaactttatacccatactatcggcaaactgaacaaacttatcagacacaaagattgaaccttgatcaatcgtaatagtctgaggagtaccaaatcggtagattatatgttcttggacaaactgtattgcatccccagaatcagccttcttcaaaggaatcgcctctacccatttgatgaaataatcagttgccaccaatataaacttatgtcctttactcgatggtggattaatcatgccgatcatatcaattccccatcctctgaatggccatggtttaatgatgggattcatagccgacgccggcgctcgctgaattgctccaaatttctgacaatcttgacaacctttgtaatatctgaaacaatcttctaacatcgtcggccaaaaataccccgcacgccgaagtaaccacttcatcttatgagccgattgatgagtaccacaaattccttcatgaacttcgccgattgcaactttagcctgataagcactcagacacttaagcaatactccatcaatcgttcgataataaagctcatcatccaataaagtatatttcaacgctttatatcttaacttcctataagccgactgggatggattttgtaaatattgatgcacatcatatctccaatcatcggccgtcatggcagcaacttcaatctgaacatccttgatcatcggcttatatcccgatgccccttgagctaaatcatagacctcaatattctgctctcgagatacatgcttcaaagttactagccgaaactccttcatcagtttttggcacttctcattataaactatcaacgtatcattcttacactcatattctcatgccaactgactgattactaacaaagaatcccccatgatttcaacagcatcggcttcaacctccttgagcaattgcaaccctttaagtactgcctcatactcagccttattattagtcgcataaggtttgatagtataagcaaactcaaaacatgccccccgaggcgaaattatcctttgtgtagacgttcgaatcctccacgacgccctcaaaataatagcttgggttctccatcttcaattggctgtatatcagaatcggatacttttaaaaaatctccatcccaaacttttccagataaacaatcaaggccatccatctcccaaagagctaaatcggcacaagcaacattgactgacctgtcggctggtacgatctctatcttgttgccttgccattgaatcaagcattggtgcatggtcgaaggaatacaacaattagcatgaatccaatcccttccaagcaacaagctataagaacccttcccatcgatgacaaagaatgttgtagggatggttttactgccgactgtcaactccacgttcagaacccctttggtttctgatggattgccaccaaagtctttaagcaccatgtttgtcttgatgaggttttcggcgttcctacccaatttcttgaatgtagcataaggcatcaagtttactgcagccccaccatctaccatcatcttaggcatcggcttcccattgacataaccgtttatatacaatggtttaagatgccgattctctgtcccctcaggtttctcgaacactgcttgttctggtgacaaccaacttagccgattcctcttccaccttgtctacatcggcttgatcaatcccaaattcggctggcaatgtaaaaaccatgttaattggtgccactacaacactcttcccttttgccaacctctttgcctcatcggctacaacatcatcggctataggaatctgattcttaacacgcaattcctgtcttggttttgctttcttcagccgatggttaatttcttgttcaacctcctgaaggcgctccctgttcctcaatctttgaacccttctcttctgattcttcatgaaaatactagaaggacaccattgatttgtcctgactacgtcatcctcctggccacgaccttgattcactgggcccaatctttgacgaacagacactctttcctgcctcagccgattactcctattatatgactgacttgagctctcaatgatatcattgcacccaaggtagttttcgatagacggcaacctcatcccttcattccagcagaatctaaagaactcacaaccccaatgaggatcaaaaccatcatcgtgttcttcataatgcttctcctgctgcttctcatacttcctctgatatttgttgattatcttagccgaattcacttgaaaaccctttgcacggacgctatcggctgattggccagctgtatgtaccatattaacaggaaaaggattaccatcgaccttcattggcctcttcgaatcatcaaacttgatttttcctccctcaatatccgtttggatctgctgcctgaagaccttgcagtcattagtcgtatgagacccagaattatgccacttacaatacctctttttgcccaactcttcagccgatggaattgtatgtccagcaggaagttgaatctgtttttctcgaactagcaaatcaaatatcttatcagccttagttatgtcaaagtcatacctctcctcttttcctgagtttttcacccattggtaaggtataacctttttgctcctaacccactcagctgcagctatttcagaatcatcatcctcaccatccgatccatacatataaggataaacatgattaatcttcctagagttcttcctagcttccgcgaacctttgttcatgcaaacctaccttctgtgtaaggtacgacaagctttcggaatcttcagatgagaatttttccttgatcggagcaatcatcccttaaaaagccaaatcggctaactgggcatcagtcaagctcaagctgtaacacttattcctcatttccctgaacctttgaatatactcatgtaccggctcatcatgcttttgcttgattgacatgagatcagacagtttcatctcgtgaatcctactatagaaataactatgaaactgcttttctaaatcggcccaactgttaatcgacccatgtggcagcgaagaaaaccaagtaaaagccaacccagccaatgacaaccggaataacctaaccctcaaagcatctacagccgatgcctcaccacactgagctaaaaatcggctaatgtgctcataagtcgatgtagtgtcttgtcctgaaaactttgagaaatcaggtactttgaaccagttaggtaaaggaactctttcaaaccattcaggatatggttgtcggtacaaatttccagtctcctttggtttaagcccaaattgctccctcattacatcacctatcacatcagcccatggtcgctgctgaggtgttgcttgagattgttgtggtgtgggctcatgtcacgaccggaaataacccaacgggtgttccttacgtgcgtgtattattccttgtcccaggaggcaaggtacaccaaaagttaatacaattcagagtttaacaagcggaagcgtaaatagttaatttattacatgggcagcgaaggcccagcacacacagagacaaacgagaaacagcggaagactaggacgacgaccacaggcgcttgacggcaggcacgagctagacaccaaagccttcatcttctaggggctcctcttctggggttgggaaaaattgagcaagactgagtacaaccaccgtactcaacaagacacacccacaagtgcagaataaatgcaagggagtacaaaggagttatactataaagggttagggtttgcagtaaacagcatttaaaggtacttagttgctcaaagctattttgtaaacacgattctagaactataccatattatttatcatggccgtgaacccacacgaacctgccttaacccaaggcctacgatgattcagaccgaactggcaacccgaccctgggtcccagctcgtcccaagccaacccaggccaaccattccacattttagttgttaagcaggttttaagaattaaaacactaacttgggtacattgctcggcttgcccataaccgagggcgcggctattcgaatagattatactctgatcagaggtgtacatctttacccacaagacacatcttcctcacgtgcgaccacgtgccacataccaccacggtatacagacggaagacgtgacatagtttccaacccatcctagccatagacaagagtaccgacccaatcccacctatggccggaacccccgggacaggtaggcaggattgagcccctagcagcaggacaccagccctgtgccgtgacatctcgactaccgggccgcagctcgtgtagccttcatttatccttgagatgtccatcgacccccgacttcgtccatctccatccgtgtacttttgtttattaccaggctgagccacaaactaagccttacccactagacatgtggaagtacggtagtgctttgcaacagaggcccgaagaccggtccttatatggccgaggtgctactatcaaaaccatgcaccccgagcccagcctaaaaccatcttggggattttgaatagaaggagcggtgtgaatccaattccacaataatccaacaattccaaagtgtccagatgatatgaagattcccaaagtctagagttggaaaaccacctaatgttacctaattaaatagcgaagcatctacctaaaatcatactagtgataccatgagtagggtgtccactagttggggttttgtttattctagggtgaacaaggaaataataacaataacaatattaaggtcataacaaaggtaaataggcatggctaaataaagcagtgataacgcgggaatttaaataaagtgataatgcaataatttaaatcaacataattttacaaaataggattcaatatgttcaaagatgatgtgacttgccttgctcgctttcccaaacgccggcttcaacttc

SEQ ID NO: 23929 - DNA, 9288 bp, Oryza sativa
aatgacggtgcgaactcgattccgacggggagagagagcggcgagtggcggaaacggcggagggaggcacggggagtgtttatatagggttgggagggggagagagcggccggatgtgggggaatcggccgcggaagatccggccgccaatgatgcgccggcgaggtttagggggaaagatttcgaacgaatccgagggagagagagagggaaaaacgggggggaaagagggagggaatcacggggaatatttcccccctcttgattgcgcgcgggacggacgggagcggcgggattcgcggcggcggcggcgctagggcacgggcgaggcggcgggggcggcggaaggtaggggatgacgggtgggccccacccgtcagcgagggtggcgggcgggcctgcccgtcagcggcacgcgcgcggggaggaggccgattgggccgcgggggagaggagagagagggagggaggtgggccgagccggcccaagaaggggagggggaaaaaggactttttagggtttttctttttataaaaccattttaactttgtttatttcttcttaattattatttgtgctctgaaaattccactaaaatttatttacgcattttaggcttttaggaaatatacaaaaatcctccaagccttattcgacttttaactttgcacattttaattgttggaggctttcacatggattttacttattctatgcataattttgaggatgtattttagagtcgttttgggacgcgacagctcaaactgattgtattgatgaacaaattgaggttgaaccgatcctgcctgttggtactgaacttgaggtgatggaggctgatattcataactcaaattgcccccctggtaattgtgaaggtttggctgagtaccacgcgccaaatgctcaggaataacttgaggtaccactgaaccatctggttgcacatgatgaaccaggtgttccgggacaacctgatttgtagtgtactgcacaggctgaccaccaggtgttgcaaatccaggcaacacattcattgagccttgctgctgaatcggctgaacgacctactgtctcaacggcgtctgctgaatcggctgtaaagccagtcgccttgctggcgtctgctgaactggttgcacgacctgctggattggagatgtttgttgaataggctgcacaacctgttgcctgggcggtgtttgctgaatcggctgctgctgagctgaattaacagcattctgaggaggtagaaacacctagatgcaatctggtcttgtgttagctgagtcacattcggtctaggatgctgagattgctctcttaccaataattgacgattgattaattggcctggagccgacgacggcgctgcaggtgctggagctgatgctggtgccatcggctgagctgatgatgcaacaggaggaattccctgagtaagtggatgaacatcggtgatcaaagttcaataatttggaaaagtacccccttgcaaataaactgggcctgcagcctgatgttcagctattgaaccatcggctaccgatttcattatatttgacaaggtattagtcaacactccagattgattaatcaaagcactatacacaacatagtcaactcgatcttgaaagttattgaaaaaatcttggaatgcattgtcattctgattaagatttcccccttgtggtccctgagtgccgtcaccttgaactccatgtactccatggaagtagtcaccctggttctcctgggtcgacccatctgtaacgcctttgtcactcggctgggctgatccgtctggaacttgtttcttttctccctctttagaagaaccgatcccaggatcctcaagaaccaccttcaccttgtacttctgaacaaatgtgcccttgcgagtctgcatgaatgaacttaaaaattgatcttgtgcttgttgcatcattgcattgaagtcttccttctgttcgggagtgaacttctctggatcaatgggcacaacgtttccttcatggacgtcagtcaaaccgagcttctggatcttttccttaacattactcaggctggccgacgacggtgacagtggtggtttgtcacgtcctgataaattcatcccgaaataaaaatcattttctaaaaggaataatagaattaattaaaattcgaaaagaaattggcaaacactaaaatacgtacaagaaaaattcaaatgtggcccggagaatttttgttaaattctccttggtctaaaaggagccctcaaattttagtggaattttcagagcacaaataataattaagaagaaataaaaaaagttaaaatgattttataaaaagaaaaaccctaaaaagtctttcccctcttgggctggctcggcccacctccctccctctctctcctctcccccgcggcccatccggcctcctccccgcgcgcgcgtgccgctgacggacgggcccgcccgccaccctcgctgacgggtggggcccacccgtcatccccttcctcccgccgctcccgccgcctcgcctgtgccctagcgccgccgccgctgcgaatcccgccgctcccgtccgccccgtgtgcaatcaagaggggggaaatattccccgtgattccctccctctttccccccacttttccctctctctctccctcggattcgttcgaaaacgtttccccctaaacctcgccggcgcatcaatggcggccggatcttccgcggccgattccccctcatccggccgctctctccccctcccaaccctatataaacactccccgtgcctccctctgccgtttccaccactcgccgctctctctctccgccggaatccagctcgcgccgtcgctctctctgttcgccgtcaccgccgagttccggtccgccgccgtcgtcgccccggaccttctcccgcttcggcgtcgccttcttcgggttcgccgcaacctcgccgaccccgtccacccctccgtttcgcccgccgaccgccggaacgccgccgtccccgtcgacccgagccacgccgccgccttcctccgctccgatcgctgttcccgtcgtcgccgtcgacccggggtgagccgtggaccgctgtttcgcttcccccttccctcccctctctcgggcgccgctccgccgcgccggtggtcgccggcggcgaccatcggggcgcgggtgcgccgcctcctgtcggttgtgccggcgtggccgccttcgggcgcgtcccgcggctgccatgtggggcccggccgtcagccgcccgcgccctcgggtgcggctgacgcgtgggaaccacggcgccggccggcgtacgccgcgtgcacccggtccaccgtggaccgtgaggctgccgcgtgggccccactcccgtggacccggtccgcgcgcccctcccctcggctgacgcaataaatccgattttaaattaaaaatttaaatgaagaaattcgcaaatattcatttaaagaacatataaacttcaaatggccataacttggtcatttgaactcggaattggaccgttcaagtctctaatttttccttaagaagtcaagaacccatttttgtgctttgtttctgcttgttatatggattttattagagtaaaagcctttttcttttccgttggtcgtgtagacgctgcagcttcggaagatccgctcttcgtggaagttgaagccgacgtttgggaaagcgagcaaggcaagtcacatcatctttgaacatattgaatcccagtttgtaaaattatgttgatttaaattattgcattaccgctttatttaaattcccgcgttatcactgttttatctagccatgcctatttacctttgttatgaccttattattattgttgttgttattattaccttgttcaccctagaataaacaaaaccccaactagtggacactctactcatagtaccactagtataattttaggtagatgcttcgcaatttaattaggtaacattaggcggttttacaactctagactttgggaatattcatatcacctggacactttggaatggtttggttattgtggaattggcttcacaccgctccttctattcaaaatccccaaaatggttttaggctgggctcggggtgcatggttttgatagtagcacctcggccatacaaggaccggtcttcgggcctctgttgcaaagcactaccgtacttccacatgtctagtgggtaaggcttagtttgtgagtcagtctggttataaacaaaagtacacggatggagatggaagaagtcgggggtcgatggacatctccagggcaaatgaaggctacacgagctgcggcccggtagtcgagatgtcatggcacagggccggtgtcctgctgctaggggctcagtcctacctgcctgtcccgggggttccggccataggtgggattgggtcggtactcttgtctatggctaggatgggttggaaactatgtcacgtcttccgtctgtataccgtggtggtatgtggcacgtggttgcacgtgaggaagatgtgtcttgtgggtaaagttgtacacctctgatcagagtataatctattcgaatagccgcgccctcggttatgggctagccgagcaatgtacccaagttagtgttttaattcttaaaaccttcttaacaactaaaatgtggaatggttggcctgggttggcttgggacgagctgggacccagggtcgggttgccagttcggtctgaatcatcataggccttgggttaaggcaggttcatgtgggttcacgaccttgattaataatactgtgtagctttaggatcgtgtttacaaaatagctttgggcaactaagtgacttttaaatgttgtttactgcaaaacttaacctctatattattatccccttgtaccccttgcattaattatgcatctccggtgtggcttgctgagtactgtggttgtactcattcttgctctatctttctccccccttcagtaagagaagctttggagaagaagtcttaggtggagtcttggcttataccccagttgagcgcctgtgaagatggacccgtaggcccgctagtccgctgctgtttatttttgattgtcaggccttaagtgcctttgtaataatgtaaatattatcgatataataaagatgtgtcttttatatcatgtttgtatggtgtaccccggcttttcctgggacggggattaatacactagcattcgggaaaatgaaattttctcagtcgcgacaaggtttctcagccatgagggaagctgccttctgacttctaatcggtcccactgggcgtgccaaaagcgtgttgacagaaaacacgaggcctgggagatctacttaactccagtgcaggtccaaaactcgccttcagatgtgtgagcatgccagttgatttgatcctgcaatcaacaagaaacaaagacaaagaaaccgtaattaaatccataaatgatagccgatcggctaaatgccaataacatatcatttatctttgagccgatgtcatatgtaaatcgatcggcaagtgttaagtaaacaaatcagaactaaatctactcaatcggctgtagacatcaataatatataatccttatatcgatatatacttgaatcaagtgattgggatagatcggtcaccttgccgagacagtataaatcacttaaatcgaaatatatattattaatgagattatatatatatattcatagcatagccgatcaaatagatctagcatgtattgaaattctaagcacgacttaatagatcaaactcaactgatacagcattaagtatgaaaagaagaacaatatctagacaatcaagccgctggatgtttcatagagtggtggatatctcatataatctaagccaacgtcgttatttaacctaatcggctgccttctggtaacagatgttagccgattgtaggttagatgatgatatcgtcaaggattatgcaagatatatgataactcgacgaattacgtaaacaagactagagtatcataaggatggaagcactaatctcgagaacacaaaccgccataacaagttttaccttttgttgaagatcgaaacccatgcagctcaacccgaaagcaagaacttgtcgaaataaaactaaagcaaaaagggtggtgatgcgccaaaattgtattgaacgtgtgtgttatccattacatagggctcggggcctatttatacccaagaattataagatatgtccatattggacacgactcttatccctaacaaactctaagataccataagtctttgtggcagacttttgcccacatttatctctaaggaatttacataaaatatcctaattaatagatacaattgccttcccaggactctatccatgcgtggcaatcatcttgaagcacatcaattcgaacccgttgtcgtacgcaagtcgtattattggaatcggctacatcacttaacctagtctgactcagacttagccgatcccaatcgtagccgatccggactccagccgattcttactctgtttccgcaacaacccttatcttcgattccgcttcgatccatcttcatctccgatgctgatattaccaaagttggtcgttaacagcggtgagggtggtccggttgcgatcggctgcggcctcctcatggaggcggagggaggactccgcctcagccgccgttctctcgtgggcggccaaagtggtctcacgctggtctagcatgcacgcccgcttctccagtgcctgggtacgctcctctagcacccgagcatgctcctctagctcccgggcctgctacgcctgttcccggcggtgcccatcctgttcgcgctggttgcggtcaaggacctcgatccgtggatggaaaatggcggtatcaaccccaccatggcgaaggacaggaggtgcacggatcgctctgggtaccgcggccgcggttgcgactcccccaccctcacggcggcgtcctccggcatgatcttgcgggtgaggctaaggtacctctctgccgtgatgcgtaaagccgggagcacagcgtcaccagcgtcttggcccgtggtagccggcgggaaaacggcgaggagtatggtgtatggaacagcgtggagcgagagaagcgttagggcttgaggagcgagtatgcgggtgagcagtcggcgagaggaaggagacgaactctctccctccctgcccttttatccccagctccccgcctcgcccgcgctcgcctcctcgtttcacgcccttgcggctgccccctcgattcccgcgtctgcggttgccttctcgactctcgcgtccacccatcacaccaccccactgaacccgcgccccgcatttagtgcgcctgtcatcggcacactcggcgcggggcgtgcgatgttcacgggcgcggttaggcgggcccaccatcggtcccatcacgtgcctagcaggtgagggagtcgaggcggcgtgggtgacgattctggacgtggtctagccgaccccccgattttcgcgccctaggcacccccagcatcagcgtggttaatggtggtcaaatcaccattctggctaaagcgccagcctggccgctcgccgacaaccctctgaattccccgccgggcccacaaccacagcacgggaagtcgtgaggcgccacgtcagactgtcctttgggggccaatgttcgacgcggtaccgggggctactgtcggagatatggtcccgggggtatacaaagtgaggggaagttaccttcccatctagccgcgtggctctacagcttggccttactcccgcacctcgcgagtggcagaagcggccggggggcctcggggtgccacgtcatgcccctcgggccctcgcgctgcctcgccccgaggccctcgcccaaccgccatttggtggggggagcgagcggggaggcgacccaggctgaacagccatcaatgcgtgacgccccaactgtccctcaccgcgtttaatgcggtaggggcagacgtgcggtgccgcctgactaacccacgtcaatcaggcgggaccagtctgtgaccggcctattgccggtcacgtccgattggacgggtggccgtgcccccacgtcgcctctgtatccggcggagtggaggtaggtatgtcccgtcccatcggagtgtcattcggagttccctccgtgagaggacgaccaccacaagtcttcacccatttatgagggaatgacagggctgttccccgtgtcaggtggggggtggcgctgtgtcctgctcaaggacggactgctgcttagcctccaggcgaaggcacgggtcatgacccggtcaaggtaaagtgggtcgccctcccatggaagagtagagtagaggcggtgcatgtggtatccccttgaactataaaaggaggaccttgcctaccgagaaaggggacgacactcagtagacctgaactctaggaaagcgaagagcaagaacgctctccggagttaggatcccttgtaacattcaaccactagtcccacacacaggagtagggtattacgctcgatagcggcccgaacctgtgtaatcttggcgttcgcatgcgatttaggagcattcaaggcggatacgcaatctcgagaggcgagccctttcccccggccgaactcacaaaagggggatctcacgatctcccgctagagaggatcatctcctcgacacccgacgacttggctcctgcacgctccggctccgtaggctgtggtgggtgtgttggtggtgatattcgatgaccttaggtcctgcccagggggtccctgatataccgcgggtcagttgatctcttagtaggacttggagatatcggacccctcacaatatggtaaagacccagtcttgtccgagtagaactccttccatccgtagataccatccttatcacgtgatagatttccttaatgtatacttgtcacgaccggaaatcacccaacaggcgttcctgacgtgcgtgtattgttccttgtcccaggaggcaaggtacaccaaaagttgatacaattcagagtttaacaaacggaagcgtaaatataattattacacgggcagcgaaggcccaacacacaaagacaaacgagaaacagcggaagactagggcgacgaccacaggcacttgccggcaggcacgagctagacaccaaagccttcatcttccaggaactcctcatctgggcttgggaaaaattgagcaagactgagtacaaccaccgtactcaacaagacacacccgcagatgcagggctgcaggaatt

SEQ ID NO: 23930 - DNA, 593 bp, Oryza sativa
cgggcttctgttgcaaagcactaccgtacttccacatgtctagtgggtaaggcttagtttgtggctcagcctggtaataaacaaaagtacacggatggagatggacgaagtcgggggtcgatggacatctcaaggataaatgaaggctacacgagctgcggcccggtagtcgagatgtcacggcacagggctggtgtcctgctgctaggggctcaatcctgcctacctgtcccggaggttccggccataggtgggattgggtcggtactcttgtctatggctaggatgggttggaaactatgtcacgtcttccgtctgtataccgtggtggtatgtggcacgtggttgcacgtgaggaagatgtgtcttgtgggtaaagttgtacacctctgatcagagtataatctattcgaatagccgcgccctcggttatgggctagccgagcaatgtacccaagttagtgttttaattcttaaaaccttcttaacaactaaaatgtggaatggttggcctgggttggcttgggacgagctgggacccagggtcgggttgccagttcggtctgaatcatcataggcccttgggttaaggc

SEQ ID NO: 23931 - DNA, 1683 bp, Oryza sativa
ccggtggtgacgtcaccgctgacgtcatcgtcgtcgttcaccgtggcccggtcgtggaccgatggatcttggccgtccgttttggatagatgaatctcggccgttcgttttcgtgaactatcgccattaacccggtcctccgtgaaccctagccgatgatgcaataattcccttttccttttcaaaaataattcattattgcgtcataattcaattaaaatccataaaaatgctttaatccggtttaatctttaaaaattcataactaattctttgtaactcagtttaatgtggttcaatttgcaaaagttgtataaaataaagatctacatattaaaattatccataaattgaattaaatttatttaatcctttttaaataggctttaattagatttaatcttgtaaaattcgtaataaattcatatgaagtccgaataaggccgttcaagtctcataattcatctaaaattatgatctacatgtttgtttactttttatgtattgtctatttggtttttattagtctttttcctcgttttgcgtgatagcttgtcgtttccgtcgttgcgaaggttcgtgagtgcgccggaagtattaagaagattaattgaagaccgaatattgcaaggcaagtcacacagatcccaaacaaccctttgagcatgttgatcccgtttaaagctattgtttctattcaattattgcatttattttcgaatgtcattgggtggaattaacctattgtttgttatagccctttcgttcttgattactttattccttgataccttgggttattataacttgactagttgagctttatatattggttcagctagatagtagatatgattgcttagccatgcttagaaatattagcacactattgggataacttatgattcactattatttaatgatggcttaatgatagttcacgatggtcaatcgtgattggttaattaattaaattgccaactaaaacttgataatggtgggttgtgagcacatggttttgagactcgtgctcatgacaattaaggaccggtttacgattttcggttgtgaaacattaaccgtgccaactacaagccagcgtgggcaacggctttaccttttgtatagcatggttcattgcggagcaccagactgagaagtggcggagataagcccacgggggtcgctggggagtccatgccttgttttataagggggtgattatgatccaggaacggtgcactgtggaggattgtgttgtgcgaggggtactgtcacagctcctttccgaggtaccgtggtggtattgaggcacatggtgacatgttgtggggctgtgtcttatgggtacagtggtacacctctggccagagtaaaactattcgaatagttgtgcccgcggttatgggcaggtctaacaatgtctttcgtgattagtctcacacttctcaccataataaatgatgttataactcgtaataatttgattagctcctggtttggagatagatctgtacagccgggtatggctgttcaggatggttggacctgtgcagcatgggtgtgttgttcagtgttgattaatattgatgattaattactctattgttttataattctcaaatgtttgctaaatgctgcttttacaaatgagccctatattatgccatcctttggtatcca

SEQ ID NO: 23932 - DNA, 11378 bp, Oryza sativa
tgtcaaatccgattattatttgcattattttcttagggttttctcctgatttcacctgcattttcttagggtcttttataaattacaatttggcttgggaggaaaacttcggggtgtgacaaacctaccccccttaaacggaatctcggccccgagattcggaggagctggtgaagaggtgcggatgggcggctttcaactcatcttccctttcccaggttgcttcctcttccgaatgatgactccactgaactcggcaaaaccgggtgaccttgtttctggttctcctttcgctggtatccagtatacgaaccggcttctcaacataagttaggtcttcctggatatcaatgtgttccgaatcagcctgttcttcaggtacccttaagcacttctttagttgggacacgtggaacacgtcatggatgccgatcatgttggatggaagttctagctgataagccacttctccccttcgttccaagattttgtatggtcccacgaagcgtggtgccaacttgcctttcgtctgaaaacggtgtactccccggagcggagtgacgcgaaggtacacgtgatctcctgcctcaaaagtgagctcccttcgacggttatccgcgtagctcttctgtcgagactgagcaatcctcaacctttccctgatgattctgactttctcttctgcttccgctaatacttctgttccgaatagttgacgttcgcctgtctgatcccagaagagaggtgtgcggcacttccggccgtataaagcttcaaacggtgccatctgtagactggcctggtagctgttgttgtacgagaattccgcatatggcaagcttttgtcccaagctccaccaaaatcaagagcgcaagctctcaacatatcttccaagatttgattgacccgctcggtctggccatcagtttgcgggtgataggccgtgctgaaatttaaacgggtccccaattcttcctgcagcttctgccagaattttgaggtgaactgactccctcggtcagatacaatctttttgagtactccatgtaggcacatgattctcgaaaggtaaagctccgccaaccttttgcccgtatatgtggtatgtactggtatgaagtgagcaaccttagtgagtcgatccacgactactcagatcgaatcgtgacccgacgatgtccggggcagtcccgttataaagtccattccaatttcttcccatttccattccgggatttgaagaggttggagtaaacctgtgggtctttggtgctctgccttcactcgttggcaaacatcgcagagtgcgacgaattcagctatttctctcctcatgctgacccaccaaaacttttctttgaggtcttgatacattttggtgctgcctgggtgaatggagtactgggtctgatgagcctcggtgagtatcagatccttcaattccttgtcgtcaggtacacacaatctttctcccatccagattgtgccatgctcatccttaaggaaatcccgagcctttccgactctcatgttctttttcagttctgctatttccggatcatttacttgagcggctctgacttgatccacgagcgtaggccgtgcctccagagcggctacgaacccgtgttcaacaattcctatgttgagatgttcaaactcctgccgcaattcctcacacatgctctcgatgcatagagcagtgcagtaacttttccggcttaaagcgtctgccaccacattggccttacccgggtggtagtgaatactcatgtcatagtctttgattagctccaaccatcttcgttgtcgaaagtttaggtccggttgggtgaagatgtatttcagacttttatggtccgtatatacttcgcagcggttgccgatcagatagtgcctccagatcttcaaagcatgaaccaccgctgccaactccaagtcatgagttggataatttccttcgtgtggacgcaactgccgcgaggcatatgcaaccactctgccctcttgcattaggacacatccaagtccgtgacgggatgcatcgcaataaacttggaagtctttcatctggtcgggcagaatcaaaactggtgcggatactaatttcttcttgagctcctcaaagctcttatcgcactccgctgtccatttaaatttctcatctttcttaagcaactgagtcatgggtcgggcgattctggagaagtttccgatgaatcgacggtaataacctgccagtcctagaaaacttcgaatctgcgacacagtcttcggtggggtccacttggtaactgactccacgttcgatgggtcgactgccacaccctgagctgtaatgacatgacccagaaatttgacttccgtcaaccagaaatcacacttgctgaacttggcgtatagctggtgctccttcaacttctcgagtaccagacggagatgttgttcatgttcttcttcggattttgagtagataagtatgtcgtcgatgaataccacaacaaacttgtccagaaattctatgaacactttgttcatcagattcatgaagaatgcaggcgcgttagtaagtccgaaggacataaccgtgcactcatataacccgtaccgagtggtgaaggccgtcttcgggatatcctcttcccggattctcaactggtggtagcctgagcgcaggtctatcttagaaaacactttagcccctttcagttgatcaaataaatcgtcgattcgcggcaaaggatatttattcttgattgtgacctcgttaagtgcgcgataatcgacgcacatcctcttcgtcttatcctttttctccacaaaaatgaccggagcgccccaaggtgaagtgcttggtcgtatgtaccctttctgcagctgttcatcaacttgcttcttgacctccgttaattcgttggccgccattctgtacggtctcttatagattggagcggttcccggtgccaaatcaatccggaattcaatctctctcttgggtggcatggtagtgaggtcttcggggaacacctctggatactcgcagactatgggtatatcatccaattttctcaagttcttctctacggtgtccactgggatttccgtctcaatctgattcaacgagactcctttctttggcgagactagagatttgtacaccacggtttctcccttctcgttggtcagggtgactgtgcgattcgcacaatcgatgactcccttaaacttggtcagccaatccatcccaagaatgacatctaggtctttggattcgagaaggatgaggttggctagaaccggtgacctttgaatttctattgttatagaagggctgaattgaaccgaagtggagctattccctggggtatgaacccgcatcggtgtgctaagttcctctcttattaacccatgcatcccgacaaatttctttgagatgaaagaatgcgttgcaccagaatcaaaaagtactgttgcagggattgagttaacaggaaacgtacccagtacaacctctggtgctgcttgtgcctcctccgcagatgcgtggttgacacgagcctggataaaccttggcccggcacgcctaggcttcgggcatttgtcagcgaagtggccaagctcgccacagttgaagcaagaccctggttttgcttccgtctccttcttggcttgcgcgggctggcctgactgtgccgatgccactggtgggcgtggagctgcaccgcggttgggctgacctccatggtggttctgactgtcactggtgccctggtagaagttgctagggttgaacgggcggtgctgacggacgatcatggtggtaggtccaccctgctgtccgggagtgaagcgcggcctctggtgacttccctgatgtgccctgaactgagcggccttcctcttcctgtccatcttgttgcgttggtcctcctgacggattgccttgtcaaccagcctctcaaagtcagcgtagtacccggatatcagctggttggtcagctcatcatccaggcccgccatgaacttctcctgcttctcggcgtcggtgcggacatcctctggtgcatatcgcgtgaggcgattgaactcgtggaggtactctgtcaccgtcctgttaccctgatggagtgcacgaaattccctcttcttttgtgccacgaccccatctggcacttgtgccttcctgaagctacggcagaactctgcccatgtgacttcagtacccggtgggcgggtggccatgtggttgtcccaccaagctgacgcaggaccctgaagctggtgtgtggcgaaagcgaccttctcctgatcattgcactgcaggagattcagcttcttctctattgcatggagccagtcatttgcctccatagggttggtggtgctggagaaggtgggtggcctgactcctaggaactcaggcaatttggattgagggggagggggaccaaagtgctggtgctgctgttcgacgtgctgcatcatcctctggtgcatttgctggtgttgttgctgcatctgctgcatcatggctgccatcatctgagtctgatgcgccataacttgggcaagggtcggattctcgggaagtggtggcggaccattgccggaatcactgttggggtgcacgccatcaacgcgttcttcgccgttgctgccctcgcctgtcgtgcggttgccagtcctggtgtagaccatctggagggaagagcagccggggtaaagaagaaaaacagatgctcaagaactaagctttattacaaaggaatttaaactgcaattgttctgatctgaattaaaacacttaaaagagcaagcaaccaatccttattaagacagccataccataggcacatgatatcgaccgtcgtctgacccaaacaaacaacctaaacacacaaactaacgaacaaaagctagacagtcggtaaactagtgggaaaacgagcataatgctcggaacggctcctgcggtcggtggagtcgaaagcgtcctcctgctcgtcaccaggtccctctgagcgactcctggagcctggcagatacgtctcgccgctgcctgactgcgagccactggagctgctgctgctgagatcgcggctgccactgggagtagcagacaaccaacccccggtgccactggctggacctctggcggctgacgctggagcgaaggagagagcggacgcgggagctggagctggagctggagctggagctgcaggaactgcgggcggaactggaggtgctgcgggagctgctgctggaggtgggtttctgggtgcaagctggatgcgcacgggtgccgtcgtcgtcttgcggggcgtggtgcggatccggactcctcctggcgctggaagaccctttagctgagcgttctccttcttcaggcgcgctatctcgtccttcaaagcgacgatcctcatgagcttcccatcgttcaaggccttggtcgccttgtgcaggtccgagtgcatcctgtccaatcccctcatcacagcacacatgtgaccgaaggtggtgtcgttctcgccagctgtcggacggaaggagctgacgccatcaccgttggctcgactggggtggtagcggtacgccgtgtcgtggaagatgtagttgtggcgctcccgtagtctggccatcatcaagtaggctgcctcctgacaggcgtgatctgctgtgcctccagatgcctcgaccgccatgttggcgaggcaagtctgtcacatcctgattttcgtttcaggatttataaattatttaataaattattaatagaatttatattaaatgttctttaatttacaagtgaagttaaatgtgggaaataaaatttcctaaataaaaaaaagcatagatggatttaatttttattaagtcctccatgattaattatactctctggaattttctcggatttttcggagctcaattgttaattttaatcatacaaagaaaagttcagcaattatttaaatatcaaattaatcaggtaatgatctaattataattgttaagtgattttcttgtttaaaatccttaaattataaattgttgtttaaaaggaattattagaaatgattttaaaagtttaaaagagaagatcttttcttttaatttgctaaatctcaacataaaaatgagctagataaaattttgttaaatactttgcttgttcctctattttctagatttttctgggaattatttgagcaaaggaagtatttttaataaatgaaacatcatttcacaaattatttttaattgaaaaagtttttaaaatctcctcctaggccgttgggccgaatccggcccaactcctctctctttctctctcttcccgcgcgcggcccacgccggcccagccgagccgcccgctcctcctctctccagccgctgacatgtggggcccacatgtcagggccgtcttcaacctccggccgccgcgccgccgaagcccgaaccctagccgtttttgcgccgccgtttccggccgaatccgaccccatctcttccaattgattgaggggttttgttcctctcggtctcctctttcttttcccccaagaatcaaagcaaatggttgaggattcgatccgaatcgaactcgttttgttttatctctaaaaaacgagtccgagttcttcccgattcgattcctctcgtttgcgacttgatctgttcgattcgagctcatataaaccttccccatgatctcctctttcgtttgccccctttcccgagtcctcccgtgcctcctagcgccgtcgcgacgagctccaagtccgccgccgccgccggccatcttcggcatcgtcgcgccgccgtctccgtcgtcgccgtcggtcgccgtcaccaccgttaggtgcgccgtgaggagaagaagctcggccgcccctccgttttcgccgttgaccaccggagcgccgccgtcgccgctaacccgagccgccgccgccttcttcttcgtcgccggccgccgtcgtgcatcattttgggtcggggtgagtaccaatgggttcgcctcgttgccctctacgcgtaggtggtctccgtttccgccgccgatgtccctagcgccggcgagctcgtcgtcccgagccggccgccgtcgctgacgtcatgctgacgtcaaccttagggctgacgtcattgtttccagggctgacgtcatcatccctttttccttttcctttttccttttttctaatagatcaaatctttggaaaatcataactaaataaccgtagatccgttccaggtggttcaagttgctaaattcttctaaaataaagatctacatattaaaattgtccataaattgagttaaatttatttaattctttttaaatgggctttaattagatttaatcttgtaaaattcataataaattcatttgaagtcagaatgaggccgttcaagtctcataattcatctaaaattatgatctacatgtttgtttactttttatgtactgttcatttggtttttattagtctttttcttcgttttgcgtgttagcttgtcgtttccgtcgttgcgaaggttcgtgagtgcgccggaagtgatcaagaagattaattgaagaccgattattgcaaggcaagtcacacagatcctaaacacaatcctttgagcatgttgatcctatatttaaattctctatttatttcaactgtgcatttattttcgaatgtcaccgggtggtgtgaacctattcctttgttatggccaatttgcattgaatgccctattccttgataccttgggtaataaattgattagcttgaaccttatgtattggtttggttcagctaaatgtcatatatatatatataattgcttagcaatgcttagaaacattagctcattaatgggatgaattatatacactacattattattatggttatatttaatggcagctcacgatggtcaatcgtgattggttaattaattatttgccaattaaaacttgataatggtgggttgtgagcacatggttttgatggttgtgctcatgacaattaaggaccggttcgcgagctactgttgtgaaacattaaccgtaccaaccacaagccagcgtgggcaacggctttatcttttgtatagcgtgattcattatagtgtgccagactgtgaagtggcgagaagtccatgggggtcgctggggagtccatgcctctggttgtagagggggtgattatgatccaggaatggtgcactgtggtgagttgtgttatgcaggggataatgtcacagcctctattcgggtactttccagtatcgcgacgcatggttgacatgatgttgaggttgtgtcttgtgggtacagtggtacacctctggccagagtaaaactattcgaatagccgtgcccgcggttatgggcgagttgagcaatgtttttcgtgattagtctcacacctctcacaataattatggatgtaataactggtaataatttgcttagctcctgctttggagattagatctgtatagccgggtatggttgttcaggatggttgggcctgagcagcatgggtgtgctgttcagtgttgattaaaattgatgattaattactctactgttttatttctctcaaatgttttgctaaatgctgcttttgcaaatgagcctatattatgccatcctttggaatctttgtgcacttgcatatttgctgtgtggcttgttgagtatgtcatatgctcattcttgcaataatcaatcaacctcagttgaagataaaggatccggaaggagaagacgtttggcttataccccagttgagctgcctgtgggagtggagccggagcttcgctagattttatttttccgctgcagtttccttcttggtgaggactaagtgcctcttaagtaagtatttatcggtttagttattatgatggatttgtatattaaattgtcagtttgtgtacctcggctgattcctggacgaggattttatgcacaaatcagttcggaaattattagtgaatttccgggcgtgacaagttggtatcagagccatctcgactgtaggataagccaaatggtcaaaccttaaggactaattttccgaaaacataatttgtgaaagtttctcttttcttccttatctagaattcttcgcaaatcgttttgtcgttctctcctcttttccctctttcaacgtgagtagttgttaaacttgatggagaaactcgaaggcgtcgatgttgtcaacttctgcaagtaaagtggatcgaggaagaaccgaagtgcccagatatcaagatagagtgaagttggatcctagtttagaacctatgccgccaaagtgtctttgaagaatagttagtaggatagaacgtttgttgcttgcttgtgtgtaggtatggttgcattcccgtcattggagtagtccaatgatgagtgtgtaactatactaggttgtttgcttaatcaacttgaacaatataatggtttacacacatcagatcagtgttaaactggttaaggtcttgtctttagtgtaacccctctccttctatcttctctaatctgcaacagatggtgaacactcgcactagtggaagtggaaacaataacaatgaagagaacccaacccttgctcaagtgctggctcaacagacccaattgatcaacatgttagtgcaacaaatgcagaaccagcaagggaacaacaatgtcaatcctccgccgccgcagaacaagttagctgattttcttcgtgtgaagccacctactttttctagcactaccaacccagtggaagcaggtgattggctgcacgctgttgagaagaagttggaactgctccagtgtacggatcaggagaaagttgttttcgcttcacatcagttgcaaggacgtgcttcagaatggtgggatcatttccggatgaacagagcagaaggacaaccaatcacttgggcggagttcactgaagcattcaagaagacgcacatacctacaggagttgtttctttgaagaagcgtgagttccgggcacttaagcaaaaggatcgtacagtgacggaatatcttcatgagttcaatcgtctagctcgctatgctccagaagatgtgcgtactgacgaggaaaggcaggagaagtttttggaaggcttaaaggatgagctgtcagttatgttgatctctcatgactatgaggattttcaggagttggttgataaagcaattcgactggaagacaagaagaacaggatggacaatcgtaagagaggaaggattgttttccaggaggcacaggatagtagccagaggtagtgtatcaagccactccaaattggtgaatctttttctgctggtcaaggacagtcacaacagttgggcatcagtggtgagattaactcagagactaatgcaagcaatgaaggcaatgatgagcaagctactcaatcagtgtcatttcagcaggatcagtctcaagaagataacagtaatggaagggagcagcgggtgtgtttcaattgttatgagccaggtcacttcgtaaaagagtgtccgaagccgaagcgtcaacagccacaaggccaagtcaacaacattgtcctcacaggagcaaatgcagtgccggttgtgtcttcaagtgttacaactcagccactagtatcaaagcagcagtagttttctttaaagccttagaataattatcgaagttatggaataagatagactgcagtttatctatgccctttttctttctagccgttccgaatctcgggacgagattctttgtaaggggggtagatttgtcacatcctgattttcgtttcaggatttataaattatttaataaattattaatagaatttatattaaatgttctttaatttacaagtgaagttaaatgtgggaaataaaatttcctaaataaaaaaaaagcatggatggatttaatttttattaagtcctccatgattaattatactctctcgaattttctcggatttttcggagctcaattgttaattttaatcatacaaagaaaagttcagcaattatttaaatatcaaattaatcaggtaatgatctaattataattgttaagtgattttcttgtttaaaatccttaaattataaattgttgtttaaaaggaattattagaaatgattttaaaagtttaaaagagaagatcttttcttttaatttgctaaatctcaacataaaaatgagctagataaaattttgttaaatactttgcttgttcctctattttctagatttttctgggaattatttgagcaaaggaagtatttttaataaatgaaacatcatttcacaaattatttttaattgaaaaagtttttaaaatctcctcctaggccgttgggccgaatcc

SEQ ID NO: 23933 - DNA, 2183 bp, Oryza sativa
ccgaatcgaactcgttttgttttatctctaaaaaacgagtccgagttcttcccgattcgattcctctcgtttgcgacttgatctcttcgattcgagctcatataaaccttccccgtgatctcctctttcgtttgccccctttcctgagtcctcccgtgcctcctagcgccgtcgcgacgagctccaagtccgccgccgccgccggccatcttcggcatcgtcgcgccgccgtctccgtcgtcgctgtcggtcgccgtcaccaccgttaggtgcgccgtgaggagaagaagctcggccgcccctccgtttttgccgttgaccaccggagcgccgccgtcgccgctaacccgagccgccgccgccttcttcttcgtcgccggccgccgtcgtgcatcattttgggtcggggtgagtaccaatgggttcgcctcgttgccctctacgcgtaggtggtctccgtttccgccgccgatgtccctagcgccggcgagctcgtcgtcccgaaagctcggaacagctcctgcggtcggtggagtcgaaagcgtcctcctgctcgtcaccaggtccctctgagcgactcctggagcctggcagatacgtctcgccgctgcctgactgcgagccactggagctgctgctgctgagatcgctgctgccactgggagtagcagacaaccaacccccggtgccactggctggacctctggcggctgacgctggagcgaaggagagagcggacgcgggagctggagctggagctggagctggagctgcaggaactgcgggcagaactggaggtgctgcgggagctgctgctggaggtgggtttctgggcgcaagctggatgcgcacgggtgccgtcgtcgtcttgcggggcgtggtgcggatccggactcctcctggcgctggaagaccctttagctgagcgttctccttcttcaggcgcgctatctcgtccttcaaagcgacgatcctcatgagcttcccatcgttcaaggccttggtcgccttgtgcaggtccgagtgcatcctgtccaatcccctcatcacagcacacatgtgaccgaaggtggtgtcgttctcgccagctgtcggacggaaggagctgacgccatcaccgttggctcgactggggtggtagcggtacgccgtgtcgtggaagatgtagttgtggcgctcccgtagtctggccatcatcaagtaggctgcctcctgacaggcgtgatctgctgtgcctccagatgcctcgaccgccatgttggcgaggcaagtccccacgtaaccatggacctccaagcggacacggtgaggaagctcgccactgagcggtggaatggtcgtgtactccggcgcgtcggggtagcccaccaccagtgtcatgcgtgccaactctgccacgaaatcgatcatgccttctccgcggtggttgggtgggtgaccggccatctagagaagacaaaggagtaggatcaatgcatgctcaaatccaaatttaaataaagcaataaaagactcaaataagggaatcaaataagagcagaattttatgcatagatcattttacatgagagcgaataaataagacagactcacataacgataaaataatgagaaattagatacataataataataacgaacaaagcataaataccttgcaacccatgttacagagctaggacctaatgcattgcacccatcaaaccccaactaactgacgaataaatcccaataattttactaaaaccctagactgactcgttttgaaaaatctcacttaaacgagcgaccaagatttttcccttgaaccacaagaacagatccccattttcccggaacaaaaccaattgcaaagaacatatgcaatgacaaggattcagagggctcttaggtttttccatttggcttgtcctacggtcaaggtcggctctgataccaacttgtcacgcccagaaattcccgaatagaattccaagcagaatgtgcaataaaatccccgtccaggaccagccggggtacacaaacgacaatgttgacatacagatccacgtcttacaaacatcataaagttttacataaatgcagcggaaggaaagaaagacaacaggagctaagccttgactaaactgcagcgggaacaccactccacaggcatcctcgacggcaaggacgaagcctactcc

SEQ ID NO: 23934 - DNA, 2361 bp, Oryza sativa
gatgttcatgttcatgtctccttctgtatgtactgttttttgcgatctgccgtttcgatcctcccgaattgactagtgggtaggcctggcggccgcctggccgtcgacatttaggtgacactatagaaggatccgcggaattcagtattattcgggtttaccttcaaattattctactccttctttgttaatttaagaggggtaagggttggtggatggatatacttcaagcctggatcatcaaatattctatgcatttatagccatcacattaccatcagcgatgtagtcatagatccgtgcctcttgttctactgtatctgatcctacggctatcaggtactgatagacgaagagtgttggagccaggaatatcatggtttgttcgccatcgcctctaggtcgcctcactagatgatctagcccacctatgggatctgtggctgtagtttcagtcggaatacctgttcaatgaacattggaaagtggcaattacaggcattactataccaatgaatcatgcaacatttacaccttcgtacaataggtgccgatagcctcaacaaaatgtcatacaatgaaactcctagatcctttttatttcattttaaaatggggctatatgtacataagtaaaattggtccatgccatttccaatggcaaatacatgtatcccaagtttattatgagtagttccaaaagcacacagagtgtaagagcacctcaacacacgattacacacatacatgtatacgtaaataggtacgtaattaactttccgtatacactgttctttgtggggctaattcatactacatgtacattatttcaggtcctgtaaaaagaacagaccatcccgatacatacatttatgaaaaaattaaatgttagtccttttgcgtattggaaacaaatgggaaagttgtccgccactaaatcacatagacactatcaattttgtctatataaagagcccacacctatagttatcgcaactttcacaaatagtaactttcttctttttttgtccggttttattcgaactttctgtatttgtatgcttctctgattgttctggtttattctagaaaagtttgttattaaggttggattttcattatgcagatctgcaatcgaccaacaagcgccctttacatgtacgtacacaactcacgttttctgcataaatcaggagtttcttgacaccactttttttagaggagaatgcctaaccaaataattggctaggtataggaatatatactctggcttgcgtgcccttcctaacaggggcggcgatttcttttcatgaccgcctaccggtcaaaagttgtttaaaaatgcattttggcgagatccccattggttgacgtgtttgtttgttagtttgatttaatttctgcgttcaaaaagataaaaattcaaactaaaagtacaaacattcgaacaataacaaatacaatgaataaaatgtttacaaaagtaattaaacagaaaatcatgtacaattgtatcatacaataaacatgtacgaagcatacaaataagataagaaatttatagttaatatttttcaataaattagagaggcaatttagaacgcaggagactaccatcgtgagcggttaggctggaggtggatggcggcctcataaaaaagagaaagaattggcgacataattctcttgggaaaactgagtgatcaagtgggtgcagtgcaagtgcaggtgcagaaagcagtttcttgataaagaataaaataagtaacggttttattataccaatttgaagagggggagcatatgattgtattgtttgtcgtttaagtaaagcttatagggagtagattgttaaagaagactttatgttgtcaggaaaattattccaaatgtccaggtcagaatgtttaacagatttgcgtgttattgataatttgggatttgtaagatggaagtttccagatgagcgagtagggtacgaatgaacagaactattaaacctaaacatgttatcaaaggatggtggaagttaattattgatgtacttaaacataatgacttctacttgaatagtgttcaaatcgaaaatgtttggtgttttaagtttatagaataaatgatcagtgtgagctaagaaatgcgaacctgtacaaatacgtatggctttcttttgcagtttaaaaatagaattaatttttgtcgaaccacaatttgcccatacaatattacaatatgttatataagggagaactagcgtattatatagtaggactaaggttgcatgtggtagaagaaactttagcttggagattattccaatacttttggaaatgcacattttaacgtggtgtaaatgatcat

SEQ ID NO: 23935 - DNA, 2984 bp, Oryza sativa
attttgctccctccccctttcaattactagtattactgcactattaacgatgtagtccaatttttttggcatagttggtaaatgttacagttttgtatttgttatatttctttcccggtgtacatgtatctagttggtttaataagaaaaaaaactgataatcttttttttttctatttcagaaataaaatctttacaaaactgttctggttagcattctttaaatatttattgtacaaatcacaaaaacatgtttcgctctttatgtaaggggttccatgtccctatactgtattcaaaatatgagcttcaaaatgcggcacttctacaaaatagatatcaaggtaaatatataaccagcaaatatatagtaaaatgacttgttgagtacactagtcgattaatgcttacaagcttacatagaacagggtgcaccaagcggaaccaaagtcggaattttgttccatatgcgccattttatgttatcctttgttttcttcatacaccttaaaggtactatgtcccatttgcaggccccaaaaatgaaaaggttaaattccaacgtcatttgaaagataatactaatttagaacttccctttaaaaaaaaggggggcgggcttgaacattctttaagtgggaaaataacgacgattagttgtcgaatcgacttaagtactgcaaagtcagtaagtaatagtctgattgttcagaccattgtaccgaatggtcgtacgttttgtgctgcgcaaagattcaatcagtttaattcgggccattacaagaagtgggttattgatgtagacaaatgctcatgtacccattacagatcattgtatgtatgctattagcgaagaagaaaagccagtcagtcactcaatagtgtctgacagtgaagtctagcaagtaatcggatttccttgcataacttatattaggactggtaaagtagtttaggtcgatcttatacattctagctatacccaacaaattgttgtaggtgattggtacacttttctccttcggaaaataggtccagaaacaattaatctatgagatatttatacagctaacaaaatatgttgtaagacatgatatttatttgcaaaaatgatgacttgaagcgattcaaaattaaacctgtgatttcttacaaatgtactttaccttgggcaaagctgttattaggggacggtgttgtgacatcatcactgaacatcactctcccaggattcaggatcacagatctacctttcctcttcataaccccttgaggctattcacaaagaacaacgaaaaaattgtaaccgcaaactcagccagaagattaccaactgtgcggagctaccacccatggtgatctgccaaatatcacaatgactgtgtacgtttataaatcatcaaaaacatatttatacatggaatagtaccggtacatgaagtcgtagtgctcatcctccctcccctcaaacaaaaaggaaaaagaagagagaaaatgtaatatttatgataataaaaactccaaaggtttggattgggtttataaactttaaatttaaagtcctcataaagagcctgtggaaaaagagcaagattatctgcaaaccctgagccaatagtgatggcacccctacaaagtacatttatatcattcaatgccagaaagttttaagacaggaatatacatctaagcatcaacatccttaaattaacaacatattgaacgattcattatcactgtttccgcatctcttacaagacattatccagtaacaaattaatcaacaagtcaacttccaatattagtgaaaacccaaacttcaatcaggaaccaaactctattaaagctagaggatatgtaaccttaaccctaaccctatagtttgcaaaacccaatggcaactccatctctaagaacccttttattttttttccctatttcagaccaccataatttatcgtatagctatacgacaaatacttaaatttgtcctagtcttgacatcttaaagggatagctgagttttgatatagagggcgctacacacaattattttgttgtgagataatgaaaacttgagtgtaaaagcatacaatcgaaataacaaaaccctctatgtttgatcacaaacggttcaaagacggctgaaatatccgtaaatataaccatttgtggggcgccacaaatattcgataattttgaaccagccgttcaaaaaacgaaatggcatcttttacgtttgattccagccgatgcctattttggcgttttgttggctttttcgtgttggttataataaccagctggcccgtgttttgttattattaactaattaattaattaacggtcatctaatttttttaaagtaaagctgaatgggtatgatcagatttaatctaaatttcacgtattttggggtctaaaattaccttcaaagccatttcaggtcctaaaagggctctagaaatgtccgaaataagaataagagcaataaccatgcactttgaaggcatttgcggtctgaagcaaaaactcaactatcactttaaaagaaatgtcgtataaccaaacgttgtatggtgatatgcctgttcgagtatcgtttcggacgaaaacccaataaagaatcaggatcctaccttggtctaaatggtcggccttctcttagaattgtcacacaatatttctctgtgatattatgatgttattttcttgtctgtatggtcttgccgctctacgatgatactgtaccattttacgagtttcgtttcaatttcatatatagtttgaacaatgttatttgacaaaatgaacctggggcaattgtgacaggatgaaacacatttttcaatcaatatcatacatgtaaatatttctaaaagtataaattggtaccacgacgagaagagttttcctgacgatgtcccgcttattcacaaaatgaacctggggcaattgtgacaggatgaaacacatttttcaat

SEQ ID NO: 23936 - DNA, 2083 bp, Oryza sativa
acataatcatatcactagcaagtacaagcttaagatatgccaaaatgcatgaagttgcaaatgacaatatgcacactgagatgtgcattaaacagtttgcctacgcttttatatcatgatatgtcattcaatgcaaatgacggccccatgactgtgtgattcttggcatgttgattgggttcgtttcttacatgttttttatcaactttatattcacattgtcgacctgttttataaaacaaataaatgtacatctttttaagctcatgtattagcaatatgtacggcactcggttgaatcacaatgaaccagacaatgaactcgacaagtcttggtcaatatctaattgtaacttgacctgcgtgcataattctcaaaaatgaattatttgtgtactaatgtatcatgtaaacgataagggaatgaacattaagtgctaaacaatgcacaaacctcaaaacccctgataccatagttgaaaatagtggcgatgacttgcgtctgttcgagcctgacaactgagtagggaaggtggagctggatgaagaaatcctggaacacactcaccgtggtttcagaaatacacattccttgagtaggtgaaaaactgacagctgtcaaatgccaatccgtgatactacttgaggtggagatcgggtataagtacggactaccatcttcactggaaatgagaatttaaaataaaaatgagaaaactagatggatgttcaactgcacgcaatcgaaaatgatgcctccgccataaagcgattttacaaaccaaaacagaagcaatcttaaaattcaagtttgattgtaatccattaacaggttctcagaatatcgtgattaaaagctatttttcacatacacgtatgaccctttgaactttgacctcatgaccctaaaatctaatcagttcattggctctgatagatgcatacatgtcccgagtttgatagtaatccattcatctgtattaacaatgcgttcacaagctatttttgcatacataatgagccccatgacaattgaccgttgacctcatgaccccaaactctaatcagttcattggctctgcaagatacatacacgacccacgtttgacgctaatccatcaatcggttcttgagataacgcaatcccgagctatttttgcatacataataagccctgtggcctttagaccttgtgacccaaaaatgtatcagttcattggctctgcaagatacatacatgatccaagtttggcggtaatccatcaatcggttcttgagataacgcgatcacgagaacgggacgacatacgtacgtacgtacggacggacggacaaccagaaaacataatgcctccggctgctttgtagcggaggcataaaaaagccataggcttcactgagaacaatgaacttccaggttgcatgctcgatatctggaaggagacactaggggaagacacatgagcatctggttccatccaggcagatgctgaagaacgtaagcagagatgccaaccttcatcataaaacaaaaaccagtattttgggacaaaaaaaacagtatttttgaaaaaaatatctcaccttaacatattgcccaatcgagaagctttaaaaaattaacggcagtaccacgtaccgcaaatctccgcgtataagacgcacctctgttttgggggccacgagaaaaaaaaatcagtttttttttcgccgactttgtcggcagcaagccaagtccaaggactttcatttaactacgaggtgcagttgaaggcgcccatttttgcttgtgaactcgttacaaataatattaacaatgtcgtttttaaaagaatgtgtattaaagatcattaatgtaaattatatacagtagagtacctaggatagaaccttgtggtacgccgtgtgtaatagaaaaaaaggggaggaattattattataaactacatattgagatccgtctattagaaagattactttcaaaccaagataacagacaaatttgagtgttgttctagtttccgactggtgagtcaacaaaccgattactgagctgggagacattgccaggtgaaagggcata

SEQ ID NO: 23937 - DNA, 6402 bp, Oryza sativa
aaagggctgaaaatataaggacaatgaaaaacagatgcataatggtgagcatgaaacatgtagagctttgttaacccaaagccgataagtttagtgacgttttattcgtatcttttgatccaaaatgctctgaattactaatacataagcagaaaaaacataaactattagaactataaatttgagtccatttctgttgcagtaaactgtgccgttcattaataagagtaatttaatagaaaataatcactgaagtctctaaattggcacgcatacaatggatgcatgtttggcaagtgaccgaccaggcagagaaacaaagaaagcaaccaaaagtgttaattccttaaaccacaataacatgtatacccaaacagacgtcaacaattgacaaattggaggtacgtgatagccaactccactcaatccttgttcataaatacacgactcagtaatccgcattttaaaaagttttatttacatgcaactgtatggcaagtaggggtcatgtttgatttagttaatacaaatttgcctcatatctttagagtactgtgacattatagagcatagctattccacaacacaaaaggaagtggataatcacgtcttccaaaatttaaaacgacacaaggtcactattagtgggaagtgaattttggaatagattacttatgtcaggttaacaaggtctagaaatagatttcgaattccttacacgtcatttgttcaacaaatcataaacgacaactccatgtaaatactagtcggcaaatatatacaaaaatcaattttattttatcattttgtaaattgtaggactttgtttagtattcttatttttttaaatattgaatgttatagtaaattcaatacttttaatgttttttcgtgttctaaacttacttgtagaagttaggctcgacattcaagcacatgtgctataatctggcccccggtcttttaccaaacaaaagtttatcttcatgtttatatgaagagctaggtagtacactctcaatgaaaactgctcaatgttgagtaaaatattactcttttaagtagttaaaaaggaaccgctcaacttttgagtaaactaaactcagcttgtgttgagtaaaaactctgctcatctattgagtagaaatagtactcaataaaagactaaatatctactcagtttgaatgagtcaacctttactcaatatatattcctttgttgagcggttccctttgttactcagcatttgggtagaaacgtacacaactcacgtcgagtaagaaactgctcatgagttgagccaaatcttacttaattaacgagtacatattttgactcaatttattttgactcaatttgtttgagcaattttttgctcaaatattgagtatcatgttttctgggtaacgcttagttgagtagatttttttgctcaatcaataatgagtaaaaacatgtactaagctatttaatacatgttattagtacatgtttttactcaatactgattaacacaaaggtggattcaaccagggttgtaactttttgactaaggggttaactaaaccgctgattaatattgttctttttttaacagctgttaagtaaccttttttttttaatagagaaaataaaccataattttgcctgatttctaaatttagcattgatttgaagttcttcactcacacactatgcaaatcacataaaattcacgacattttaaattaaataacataatatgtggactttaatttcccaaatcagtttgaatcacagtaaaaactcagagttctcccatcatacatgatattaaaaagtatgtagtttaacaatttcaattttaaaacaatgttactttacatcgcatcatcataatcagcatttaagtttttggcatcaattctgaatgttaaatatcagtaacataatttgtggactttaatttccaaaatcagtttgaatcacagtgaaaactctcatcatacatgatattaaaaaagtatgttgtttaaaaattgtttaaaaccttcaattttaaagcagtgttactttacatcgcatcatcataatcagcattcaagtttttggtatcaattctgaatgctaaatatcgcactcatcttgttatgattaacgccatcaatgaaagtcaggtaaacaaaaattaatacatgaatctcctgattacagagttacaaatttaaagatttaaaagccgtggtgccgtggtgctgagtgggcttttcccaattatcccggcgtttttatctgaccgttaggccgtagaaagcccgtaaagggcccgaatggcacctaatgggtcccgcgcgggctccagacggtgcccggatgccccctcacgatttttgggggccaattctcatgaaaaatcttcacgggcgccttgcgatgctcaagaactccatacgtgtaccctaatgctccctcacgggcccctcaagagccccttgtgatatgcataacaacaggcgtctagtgtctgggggccatttgaaattgatattgcccgtgcgggtccctcacggcggcatctcagaatgttcaacgcagattaaaatacaggaggtgcggatgccagaggacacatagttcagtgaaccgcgcggcacctggccgggcgccttgaggatcccggtcgggcgccgacagggcaccttccgggagccatggatgtccctgcttatcggacgccttgcatttcactcgaccaatttttaccgggcacctcccgggtgtggcagattatgtgaccatacatccggtagaaattaaaggttcccgtatggtctctatatcctcggcaagctgccgggtagggaaaatcttaccgggcccggttaatatgtgacctaggcattatggggcttttacatattcactccgcggcccgtacggcgagtaaaaacagacatttttgaaattttcggccggtgcccggctggatcccgtacagttcctacgggcgccgggacatgtttcacttgccttacgggcactgtggtgatgagttggctgctcctaattctcccggcattttcatctgagtgttaggccgtataaagcccgtaaaggacctgtggggtaccgaacgggtccgagcgggtttcggtcggtgcacagacggcccctcccgattttcttcttgtaattttcaatggaggcgcggatgtcaaaggacaaatagtttagtgcaccgcacggcacccagccgggcgccttgaggtccccgtctgggccccgggagccattaggtgcacctgctaatcggacggagcgcgatgccttacgggctccttgcattttcaccgggcacctcccgggcgccgcagaatatgtgaccgaacgtgctgtagaaatgaaaatcggaagggtcccgtacggtccctaaaattcacggcaagccgccgggtagggaaaatcgtacggggtccggtgtatatgtgacctaggcattaccgtgccacatctgaacgagcctcttaaccgatatccttctgccggaaccaaatgtcccctgaatcaatgctatacaagaggattcagtagtcagcatgttaaaacgagaaatatcgcaatctctattgccgcgcaatgcgaatgtacccctcggcagcgtcatttttttctgcggcacatattgaggcttttttttcaaagaggtcttgattttaaccctaaccctaaccctaaccctaaactttcccataggctcaacacgcacctaaccccaatctgtgccgcagaaagaaaaaaaaacgccccccccggcattggcagcgatttttatgtcatccttatccctgaaacaaaatgacgacgtagagattgccactagtggctcggactattgtcaagactaggaacagcatatcaccataataatatgtgtgtagattagagtataacgcacctctatggaaaatttgaaagaaatgtgtgcagaaatgtgacctgcaaagcgacacaggatatcaccttaagtacgacctttgaccctataacagacggaacacgggtggcagcatcaccaaacacttaagatgtgcagcttttactaagaaacacctcgatccatacaaaatttgaacgaaatccgttaagaaatgtggtagttatagagcgcataaaagacgtatgacctttgaccgtataaaggacggaacaatgagggtagcatttcattttgtggcatggtttacacaatgtaataaatgaatcaatcaataaattactttaattataaagaaattaaaaaataatatgtttactcaaaaaatcaaaaaaatcaatacaaatgcactctacatgtgctttatggtcagtaaaatatactgtaaaccaaattcgtatcttcacccctgagccagaggctacatacaaaccaatatataagcctaacctaaaacccagttgcaaccctaaccctatatctttgacaaatgttgccatagcaaatgtacatgcaaaagcacaatttatacacatcataatggcaagcatcaagactggccctatttcattcctctcgggtaccagctgcacacatccataaggtggacaggctagatgtttgggggaagggactacgtgttctacttcataataattcaaacttgcatcatgtaaacatgacaatgacaatgggccagtttatcatacttatagttcagaagcagagggagattaggaaggagaggcagatgaataattatgtcaaacttacggcatggaaacgacgtcgaaaaaccaagtctctttgaagtcctctcggactcttacatcaccattctgataaccaacacccccgcctgatcttcgcaaccttggtttatcagctaaacagtttactagataagtcggatcatacagacactgttgatctgtaggcaaattcatagaaaaataaacaggtaattttacttcttgtatagattgaaaatagaaatatgaagaaacaaaaattaacaaacaacacatgacataatgtacatgtatgttgtttacaatacacttgaacctattgtaggccaaaatatcttgtgaaaaatatcatatacatgaaatgttatgtgtatggaattgatttttagctttgtttcacttttaattctgtgtagctggtaaactttatttccaggatttccagtttctgcttgaaggcccggtcacacagaggggacgcatgggggacgcacgaccagcgcattggaaattgctaggcgtgcgtcatcattcgttactcgttcgtcgagcgcgctggaccaacgatggaccagcgctatgcattcgtcgttattcgctgtgtgcgtcgggtttttgttagcatgctccacaaaagtgtgcgcggagctcgatgcatgaatgtacacgccaaaggcacgccagccatgcgtggagcgcgctagaccagcgccagacatacgcggagcacacgccctgtatacgcacagcgcgctagatacacgctgtccattttgtgtcagctcgctagcttttccaaaatcatgacaaaagttaaggccaggtcacacagaggggacgcatggggaacgcacggccagcgcattggaaatttgcaattttggccagtgcgttgtcgtgcgcccaacttttgtcgaagctacagcgagctgacaccaaaacgcgccagcaacacgatgtgcattcgtggaagttgttatcaagtgcgctctggtacggcctgtatacgcactgtatgcgccctgtatgcgctcagcgcgctagcaacacgctatgcatttggtgtcagctcgctgtagctacgataacagttgggcgcacgtcctcattcgttactcattcgtcgagcacgctggacccacgctatgcattcgtcgtcattcgatgtgtgcgtcggaattttttgagcatgctcaaaagtgtgcgcggagctcgacgcatgaatgtacacgccaaaggcacgccatacatgcgtggagcgcgctagaccagcgccagacatacacggagcacacgccctgtatacgcacagtgcgctagctacacgctgcttgcattttgtgtcagctcgctagcttttccaaaatcatgacaaaagttaggcacacggccttttctgatttccaatgcgcgggtcgtgcgtcgtctatgtgtgaccagcgcgctagcaacacgctgtgtattcgtggaagttgttatcatgtgcgttatgtgtacgttctgtattagcactatgcgccctgtatgcgctcagcgcgctagcaacacgctatgcatttggtgtcagctcgctgtagcttcgacaaaagttgggcgcacgacaacgcactggcaaaaattgcaaatttccaatgcgctggtagtccagattcagtccgttcattctttttatcccc

SEQ ID NO: 23938 - DNA, 683 bp, Oryza sativa
tcgtcaccgattggaagcaacccaagacagttactcaagtccgcagtttcttaggtttggcaggatactaccggagattcatcgagaacttctccaaaatcgctcgacccatgacacagttgttgaagaaagaagagaaatttgtgtggagcccgcaatgcgagaaggcgttccagactctcaaagaaaagctggtttcctcgccggtgttaatcttgccggatactcgcaaggatttcatggtgtactgtgatgcttcgcgccaaggattcgggtgcgtgctcatgcaggatggtcatgtggtggcctatgcctcacgccagctacggcctcatgaaggcaactatcctacccatgatttggagttagccgcggtggtgcatgctctaaaaatctggcggcactatctcattgggaatcgctgtgaaatatatactgatcataagagtttgaaatacatcttcactcagtcggacctgaatcttcggcaaaggagatggttagaactcatcaaggattatgatgtgggaattcactatcatcctggtaaggccaacgtggttgccgacgctctaagtcggaaaagccattgcaacactcttaacgtccgtgacatcccacccgaacttaatcaacagatggaagccctgaacctaagcatagttggtcgtggattcttggct

SEQ ID NO: 23939 - DNA, 536 bp, Oryza sativa
ggcaccttcatccacttcggccgccgttccagtagtcgccgtcgacccgtggtgagccgaagaccgccgcttcgctccctcttctctcctctctctcgggcgccgctccgttgcgccggtggtcgccggcggtgaccatctaggcgcgggcgcgccgcctcccgtcggccgtgccggcgaggccgcctttgggcgcgccctgcggctgccaggtggggcccggccgtcagctgcccgcgcccgcgggtgcggctgacgcgtgggacccacggcgccagccgccgccagccgcgtgcacccggtccaccgtggaccgagaggctgacgcgtgggccccactccgtggacccggtccgcgcaccctctctctcggctgacgcaataaatgagtttttaattaaaatttaaatgaagaaattcgcaaatatccatttaaagagcatatccccttcaaatggccataacttggccatttgaactcggaattggaccgttcaagtctctaatttttccttaagaagtcaagaagggggatc

SEQ ID NO: 23940 - DNA, 15503 bp, Oryza sativa
taggtaattatcagtatgttttatatgtcatgtatttcagcaatataattatgtgcaatattaactgccatgatgattggcaaagcgggtttttccattcattcgtattttgatattgcatgtacttttatcttcctctcactccctcattccttttttctattcgaacttgcttcttttcaaatttccttttctcttcttcagttctggtctttcctctttattctttatttcactcccattccctctctctcagctctatgtctgtctctctctctctctctgcctcttcctcttactcccttcatctcttcttcctcctctctgtttctctctctcactttctgtctctccctcctcttctccacctcattctcttctgatgatgttttacagtacaacattctttaattatctgctattcttactgtaaccaataatacctaaggaattccattgttctcatgtgcaatatgtttatacattatactgtactcatatcacgcttgtgattagcacactgccaagactccgattgtaatactatttaatactttttaatactttttaatactcaatattcaatattcaatactcaatacttaattacaatttttccaatgttacagttaattgaattcaagtatctgtatacattttatttgtttatatgtcaacatttattcatttttgccagcaatatttcatatcttgtatttttgttttaaatttttttttgttgttttgtttttttgttactactttaatgtttttaacttaaaaatgtattcattgttatatatttgtcctcatttactatgttatctttatgtttttgaatgttttttatattgatgtaaacttgcatttttagtcttcggacttgttgacaagtaatgaataaaaccttatttgaacttgaacttgaacttgaacttgaaccctatttgtctgaattcagtttcccctctctcgcgcgaatcgcggaagctttgacgtttctttaaactattagaggaagcagacgattcgttgtactgttcacgacttttaatccttatctgaattcagttttcctccgcccgcgcgaagcgcggaagcttagacgtttccttaaattattagagaaagaagacaattcgtcgtactgtattcgactcgtctaaatgaagttttccccacctgcgcggagcgcggaatttttggtgtttcatcaaaatattgagaaaggacgatgattcgtcgtataccgttattgactgttactttgattaaatttagtttccacgaaaatgttaaacctctgatttcttcagctgatattataggaaagtgaaacttcgaaaaaatacaagttgtagctgtagtcactctcgaagttgtcacagcggataaaaagtcacagttcgtagggaaaaaaaacttgtcggccgaccgacaatatacatctcaccgacttcaaacttctgcattgatattgtacacgaggatcgagcaagaataccgacacatgacccgacacagcaacatatttagccgtgtctttctactccctcgacgagacgactccacccaacaaccccctatctcaggctcttacctcccctctctcttctctcttttatcccctgtttctttgttttcccttttctcttttttgtttttgttcctttcctttcttttccttccttccctctcctccctcttttttttctctttctttcttctcttttctttcctttcctttcctttctttccttttcccccctttttttttcttccttttctttttttcttttctttccctttccctctctttgttcccctcccccttttcttttttttcccgacggcagcgcaattttaccgacaatatcctgacaggtgggggtgtcacatccccaacccccccccccttatggagatacccctgctgctacaactacacaaactcaacacaccttgacagtttttttcgtaatacaatatttcagaggtgtttttattttttatttgtagcccaccttttgacgaaaaagaatatttcgttaataatatttttaaaaaatcttgaaataccataattttggtgtcatacgaatgaaaactaaattatctacattttgatattaatttcaacgaaattgggattagttaacatcaacatttatatcaaaaatatgatttttttttttttttgtaatttttttcgaaatatttaattttatcaaaaaccgttattttccatatatcaaaatcgatgaggtgccttttttgtaacttttcagatatttgcccatgtacaaggacgatattctttgcgaaggtgatgctatctcatttcagtgaaaagttatattaacccaaacttattgatttgatttcgaaaaaaatgacatctttgcctattcgtatgcatatacgtgtattagtgtatcatgattgaggacgtgttactttggtgtgttaacatcaagatacattttaagttaaacctctaatcaacatggatttgtatcaaaagatggataattagaataccttaaagttaatatcaaattaatttggtttaatgtagtgtgcgaaatatacattttgagtaaaaaaggtgcttttttgtaggatatttttccccctaattttagccagtatctcggtatattaacgtactggacagtagtgattgtacattccgtagtacagaaagttcaaaggattcagagtgctgagggcaagtgataagtactttttttgaactttgtgctgttttaggaaatgtgggtattggcatttgccccccccccccccccaccctccccttccagccgcttgtcataaactaatacatgaccaagacacgttagtgcattaacatgaataaagtaatgcagacggtcaaaaccgggcgaaattcggggagcttctccgcccggcgtcccggcaaagaccgactgatctcccagcggggggtagtgagctctatatctttttctttggccctcgaaaatatgaacatttgcacccccccccctccttgagcgcaaggggagggaggggggggggcatctcccaaaaaaggtaaaattaacgcgtttttacacgttttttttcagggggggggggcctggatccgccactgtcctaaagcaactaaaaactatatttctatgtttgtcttcataagtgggagatatgaattgctatcaaattccgtgatatgtttctcaaagtcacatgatatattccagaataaaagaatacattattaataaattcggatatgagcagtgttaatatgcagaatgatgggtagtggataaatattattctactgtgagaaagtggatgaaaatatacaaaagagtttcaacattaaaaatgtggagtctttcattttttgtaatgattctagttacctgtatatttgcagatttgacattcatgaatgcgtaatttgtgtattcataatatatgaaaatgaacctatgcgcggcattttcaattatcttaacaataatgaaacgttatgaatttggaatgaaggaaacatttattcaatacatttcaagattcttaacaagtccaaaaacaaataggcctatgctgatttttctgtaaaatgcattttgcacatttgcaaattaggaaaaaacgaattatatcatcttgttccttacgtgaatatctacaaacatacaaattgcaaaaacactgcttatacagtatacagaaccaccctatccaagtttggtcaatacatgaacttatggaagaccctatttgggttttcaacacaaaattgcgctgttttaggcgggctttgaaataaagttgatgaacagtaaagtctagttgacatatgcttggtaaatggtggccgatttttgttttctcctttaaaaacaacaacaataatgcactataatcctatacatacatgcgcccactaacatgtatctgtgcatgtgttgtacgacaaacagatgtgacgagtagaacgttacgaaaaaaacacggttttgacctatactgcagtttaaaagcagtttatcaaacatgcatgtagaatgtaagtgcacttaaataaacttacaagaaagtggaggtctatgtcttcatttcctgttgttccaattctctgaaccaagaaatcagttgtcacatcaacctacatcatgaaaaaaagacaagtggaaattagctgatcctacatttgctcctaagtcttattttgtcacatgtgtagggctgcgggtagggctgcaattgggttttaggttaggttccagttagggtaagagttacaaggtatactggtagtgtttagtccttcaccatgccaaattgcttatgaattttattaccctaaactatgttgttatacccttgttacggtttcttttacacaatttgtttttatcagtgtgtatacaaatttgtaaaatatatttcatatttcatcaaagatagatatacaaacattcatgtatacagtcagggctggattcgctatgggttttctgttcagcatagggttatgaatgcaatacattttccgttaggtttagggttagcgacggggcttggttcagggccgatattcaattcaatacttatgtcaggaatgtgaatattttacacaattcttggcttggataaaatactttgacaactttggtattcagttcaagattttggctcagtattttaccctaaatttaagacagcttcctattacagacttaagctaataatttgtggaggccttgactggcagcgcaggcatatggttttcaaagcagtcttcataagctgtgagcaaatatatttgtgcagtttaatacgacgcatcaattatattgcgcatcattttggattttggatcagtaaagtattttaccctaaatttggcttactaaggtagctcagatgtgatctgaatacgagttaagacatggccaagtaaaatgctaagtaaaatactgtcttaatccacgtactaaattaaatagggcgccaggattgattttcagctcttataacttgctgatcacgctatctcttgtaatgagattttggtattggttggtctgcacctacctttctgctattgagtctcccatgaaacagacaaagtattaagcaagaagatattttggaaactcatttacgataaccacaataatattcaaagcttataagcacagagtgggtgaaacccagtaaaaaaatatattttctgacttacattcaggctacggtaatctgcatatcggggtctgatgaccaagtaatcattcccattggccgagtctgctagacttactccaaaggacatatcggcttggttgttcggatattgcggatcatgagttgatgcctaaaaaatgacacatgcataaaatatgatattacttctgtgaccacatccctttgtagaggtttctacaaatacacccccctaatatgctaaaaatgtccagaatgaaaatggaacaataaaaaagaaagagcataacatttccaaatgtttgcctatgatgttaattatgaagaacaatgtcaggcatcataaagacacaaataacaaaaaactggacatgtaaattactgactgaagttatatgtacctggttgacagtcattggactaatacacaagatgtccgtagaccttacgttcacatgagctcatgaaagaaggagccgtgcaaaaaggacctagctcccatcccctttgcaccaggaacataagatttattagacattagggcaatttaggggtgctgccccaaagtcccctacaggggacctggttggtggagacatgacagtcattggactaatcaaaaagggacctagctcccatcccattttccccaggatcatataagatttattggagcattaggacaattaatagggttgctacttcaaagtcccctgcaggggcaggtatcccattcaaacaaatataagtcttcttcacaaaaaagaatttctacattgtttagccagaatccataccaatattttggtatgaaatcatatctatattgcatgatctattatatgaaacaaattagatggatcttcgactgctcgcagtcgaaaatgatgcccccgcaatagagcgattttacaaacaagacggaagaaaaatttaaattcaagtttgattgtaatctaaaaaaggtatagaccagttttggaaacgcccccctctcaacaaatgaaacggaagctcttattgacatgacccaagtttggcaggaatccaccaatcggttcttgagataacacgatcacgggaacggaatgtacggagggatgtaccgtgccgtgacggaaggacggacggacaacccgtaaacattatgcctccggctacttggttgcggcataaaaatgaggctaaccttgggggcatatacccagtcttacagacgacggacaaaataagtcgcaatcattcacttgagccgttggctcaggtcaacttaaaagagaaagacctcagaccaaacctctcaaaaaaaatgaaaactcaagtttgatcgattatagctgtcttatcatggcattatcattgttttaaataatatcattagaaaatgtttttattcctctttaaaatgataccatatttgttatgattttgaagccatgaaataagcagtacatacgaataaaaggcagggtgaagagtgaaaagtttcaaaatgaactggtaaacactggtctagtattgtataacatacagagcactcttctttctttgacctaagagagtgttatttttgtatatgacagtggggctattatggttcccaactggtcatccatgaaagctaaattctaaagaatcaaaacttgaaattcatgccctatggtgaaatgtcaagcaagattttatactgtatagtcataaactttctgaagtatcatgcctaggttgacaactgttgaaaaaagcttgggttatggtataatttgaatgaacaagggcagtgcattttgtaacgttcacttttgaccttgcccttattttgatctactgcacattctatgacttaaagatcataaattgggttttatcttttgcatgcaagaatctttcacaaaatgtgtgaggcgctcggattcctgaaagtttcatgcgacataataattaggttgcaactggcacaatgttgaatttttgctaatcacaaagtgttgttccacaaaaatgccttttctttaaaaattgtcgttccacattttgtggtttagctcaataactttttattcaaatataaacaaatgcatgattagaaagagcaaacatttctgcacatactacgtccattttagtttcatgaccacgtagcatttgatgccaggaattttaaaaaggcaacacaaaactaaaaacttttaaggtttagaccagttttggaaacgcccccttctcaaaaaatgaagtggaaggtcttattaccaatcatgtgaaaaatgtgtttttactaatacgtaatgatacaaattttgccaggaaaccgcctacttattgatatatttggtaaattatcatatcgatttggactggatagatatcgagctcgggtatatagtcctatatacatctttctgtgtacaagtgcttgtaactttaccaagactgggctaaatttcttatcatccagaaccttgcagtacacacaaatacttatatgctagatgatcaacctcttctgatagtttccacaacgtttctttcacattgcaatcgcaccaccagaactggtctatacctttaaaattcgtaacttgacaacacattgaaggtttgaaattattttgttttaatgaaaactggccattatttttacttatcgataaagttcttacccatgtacatgaatattgtatttagccacattacataaattaatgagaaaaatgtagtgatgaaagaaaagaatcttgatgccaatttgaagaacaacatgtgaaccattaagccctctagcaaagggtcctgttctaaataagtttgttttctttgtcttcttaccacaatgttaatgctccttatacttgattggacaccaaaatccatactgactcctccttgatcatcagtgttggatctcaggtctacctgactaccatatatatcagtcctccgtagtggctcctctcgaccacctagaaatctggcagttgctatgacacttacaggaacatcggtggccacatctccatttgcaaatgttaaatccagctgcgaagaaaggagaagtaatttatggtacgaaaggtcccgggtttaattccccgacaggcctccaatattttaggttgggcgcttcaaaatttatttttaatcctctacctccctttttaacaatttaaccatgatgtctcaaacagaatgaacgtaaaaaaacagacaattgattaagtcatctactgcaattggcacatacatgtaggggcctggggtcgcttcacaaaactgtcatataagtacaagatcaactaaatctcgaccctgtcatcgacttgtctactaattgttttacaaaaccgtctttgccaagacgagcgacaacttccctaacaagagacttgttgcgactccaaacctgtcaaatcttgttagaacgccatctcatgtcaaaggggatagttgagttctgttgcagagggcgctacacaaaataatttttttgtgagataatgaaaaactgagtgtcaaatttgaaagaacataatattgaaattacaaaatcatctttgtttgatcaaaatcggttcagagatggctgaaatataccgatttctaatacttgtgtaccaccacaaatattagatattttgaaaaacttgaaaaaaccgttgaaaaaaacgaaataacgccttttacgtcgtatttcagccaatgccgatgttggctttttttgttggcatttttgtattgcttataatatccacaattagtcggctcgtgtaatgttattttcaattcaataattaattaacggtcaccatgttttttttaaaagtggagctgaattggtatgatcgtattggctgaatttcacacattttggggtctacaattacctttatagcaattttaggttctaaaagggcactataaatgtcatagataagaataagagccataaccatgcactttgaaggcatttgcggtctgaaaacagaactcaactatccctttaactttaaataagtctttgggcagcaaaaatatggagactgaaatctattttaaaacttctttctttatcttcgagctctcaatttattgaacagttcatattggtgttaatacaaaagcactaaacaagcataccgtgacaacttattcttatataaaaaaaaaagaatgactgtattcttcccatacatctttctaccatagcaaagtcgcgaaagatggaacattctgtaattatgaacccatgagaatgatgacaattgtcgtgtaggtacttctctcgatattttccctttacaagcataaccttgatacaaattcaatcgcataatttaattatttgataagaaaatgtaaaaactttgagtactaaaatgttatgttttcattattttgttaaatagatatagtaatagtggcttccaatctttaattttttttaaacagttttagtaaatctaagcctcataacaattttttgtgatatagaataaaattaatcgatcataatgaagattatattttttagccgatagtatcgaaatcatgaatttgtcggttatcatggatttgtgaaattggttgtccgcttcccgacatctctcaggtcgcagacctcctatattctaatgttctttgacaagacatttgtcactctccacccaggtgtgaaatgggtaccggtagaaaggaattccttcaatgctgtgagcactgaaattggtagccttgtagagccagagaaatattggagcgcattgagcaccttgggtggtgaatatatgtacactttaacaatattaaatattattattattattctgctgaaatttaaacaaagagggttagactgaggtgtaagttttactttgtcaaaagtgatctgagacccaggaaaaaatttaactaaattaatagaatacagaccaatgaattttaatctttattgagtttcttcttatcttacatttacttgcagattgagcccagccttgaagtactgcacagttcgctttctactgaatttgtatggtgagtcgacgaaaattgccttcgtgttgatgcttgcttcactgaactgagtcgctgattcgtgtacgattgcctttgcatggaaatggcgacctctgaaccgatcaaaccagtctggaccatcaaaatcattactgagatcatccaaagtaactacagcccttccagtatcaccaatctgatagaaagatgaataaaaagtgataatattggttatatcagatgcgacggttcaaattaaaataaagacccacgggccaaatgttacatgcgagaggacttgatgcggcctgccaaaaataccccaaaatacatgtaccacaaaaatgaatttgttgtttcgttcattttcattctacatgtataagtagatcttttttttacttgtcacaaatttgtcatagataatcctggatccaccactgcaatcacaaggctctctcccttctcccccttgtagattaatcttgtgaccttaacctagtgatagaggtaccattaaaccccccccccccgggggggggggggggtggggttggacaggggtgtgccgctcaagcctcaaaacccctacccattttcaagggtcattttggcagatttttctcgaaaaataggccattttccacaattcttttaaaaacacggacccaaaatgagacccatgtttaggggttttatggtgagaaatcgactcattagagcggcacatcactgtatgtctaaatatggcccccttccctgatgagaacactgaggagatcacatgggtgtgaggcagacccacaatgaacaagacaaatgcgactgcatctcctatatgcctccaatacaaaaaagattgataacagttttgtttaggttttgttttatacatttatgtgatacacaacaaatctaagcatttgtgacatatcacgatgaagaaaaaaatcctatattcatatgtcaactgacgattacgattaggtctatagcttgtagcccctaactgaaattggatcatcttcctatagtaattctgtcaccatgtttggagctcatacctcaagttcttgacatattatgataacaaggatactcagatattgacctctgtgacctatgaccttcgaccaatttactaaaaatccaatcagatcatcttcctagggtaataaatactaccatctagtttgagcttcatatctccagtggttcttgagatatcgaaataacaaggatgatatctagaatttcagatatttaccttgtgatctttaacctttgacctatcaagccaacgtcttgtcagatcatcttcctaaggtcatacatgttatcaccaagtaagagcctcatatctatatagtggttatatagattgtgtaataacgaggctaatttagccggaatttcagaagttgccctctctgaccttaaatctttgacctagttactccaaaatctaaccagattgttttcctatcatgatacatacaatcataaagttttaaggttatatctcaagtggttcttgagatatcgtgatagcgaaaatgcaggacggacaattgaccaaaccataatgccttcggaaccaccttcggtgggtggaggcacaacaacaacaaaattctcaataattcattgcattttgccccgacccccaacattaaaaaaaaaaatcccctatgtgggcatgacctgaaccataatgcatggccctacaaagaaatttttcctgttggggaccggggggcaatgcaatgaattattgataattaattgcatttgtcttgttggggaccgggggacaatgcaatgaattattgataattaattgcttttttttgggtgtatttgtgggggcgccgcacagtgggccagggaggaaccaaagtgcgccaaaactaagtttgggtgatttatttttttcaatttttttcttgcccagttgaaaggtaatacatagaggaatacctcagtgaaatatttaattccggtatgcacaataagggtataaatttactgcttcaaacagcaaaatcctacatattcacagttttagtgcaaaagtgacttattttataaatctttcaattaaacatgaagtttttaagttattgatatgaaattgctctcacatattcctgatagttcatttcgttgaatgaatgggttaaaattaatagaaacacaatcttcatgatatattatagggaaattcaatgaaaaatggactaattatccatgttttttaaaaatccagaagaaatgtttagatctctgcggtgtaccgcttaaattttaataccaccattttctctgatgtctaagcttcaagttgataccaaatttggctgcccaaacttgcccattgttatgttagagccgatttcccttgccacattgccccgaaaatgttggtttttggggtccgcggctgaatcatgaaggattcgtggtcataaatcacggcgcgagggggcgcgtgacacgtgatctgacaccgcggaccaaaataaacacatttttcggggcaatgttgcaaggaaaacggctctaacataataatgggcagaatcgggcagccaaatctggtatcaacttaaagacatcagagaaaatgttggtaataaaatttaagcggcaatccctggaaatctttatttataaaaaataaatccccaaacatgagttttggcgcactttggttcctccctggcccactgtgcggcgtaccctagcccccgctgcgtacattaatgattcagtggctaagcaatggcctcgctagtgtgagcccgaggatcaaaaccatgttgatgtgctatattagtgcccttttacgaggcattaatcctcattactgtcagttatgacttagctctaaggacgtaggtcccccagattagcatagtagcatacacatgctttagcagtcacgcaaaacaaacactcgcaaattatttttcagtaaaatctgagaatgtatactatcatctagaccaaaagcttcagtttctctatatcgtcggttgatccactgagactacgtctggctccactagacctccgattataatattgtattagggcatgtcaacaaatgtcagttatattattaaaataaatgacccaaatcagacggttatttctgtctaactattatctagatctattaggaataaatcattgtcaaagtcatttcataaattggggtaaaaataattattccaccattttgaccaacagtgtgtagatttatccttttgaaaaaaatcacaatccacttaccagaccttgcctctctcccagctcttgaacagtaccatcctggataacgccatacttaaaggtatagcggccaagcacaggcttgccaaatacgtacctacatagacagttcgaacaaatgatagtggtggtttaaagccatccaatggtatacaaatgatgcgcagatatgagtaggtcggaaaggaattttgagcacaagataactttgggcatggtttaaagccacccaacggtatacaaatgatgcgcaggtatgagtgggtcagtaggaattgtgtgcataagggaaaattgcgcatggtttaaacacacgagacgtagccgagtgtgttttacatcaccgcaaagttaccgttacctgcacaattctaccgaaccacaaaataaacctgcgcaatgcgcattgatatctgatttatagaatgggagtaaaaagagttatcgcccaatttagagaagaaaatataccagacgcatgaaagtgatttaccggaagcatgaaagtagttgagagtcacttctttattcaggaattgggtatttttttcatgcgtatgaaggtgaagaacggtcaaatgactaaattgccattcaactagtcaccagtattacactgtcttcatgaaatttaaaaaaaaaaatgtttactgatttgaactggtttttaaaacaaggcagcagttcatgaaactgtattaacttcaagttcgccgacaattctttgaaacacgtgtattaaattcaacgagtattccaataggatgtcggggaacatatatggcagttttctgaaatgattttctgatttccttactgagcatttattgtcgagaccactgaataagctccggctagaatgtatttaggcgtttcgatgctcactgaaaatgtcggtagaactgcagtggagaattaaaatacatatccaattacatgtgattagaatcatgaatacacattaacccatgtatgcaagagcagtagagcatataaaatgtcaacaaatcagaattataacaaaaaccataacaaaatataataataactacgaatacagtaagaaaatgaaggaagagattcaagagagcataacaagtggaagcgaaataataggtttatgacgaaaaaagttagaaaagtaactgaaatgaacagactattaaaactctatttacatcctttcgttcagtgaacaaattatatttttcttcatttgtatatatgtgttcctattgtattttttcttccctaaattgaactgcattacctgctaatgatggtggaaaacacatttccacatttgtgaacaggaattcaattcttaattattatcattctttttcacctgttaaaggaaacctcaccccaagaaataaccaaaaggcattacatcatgccaataatatcttcattcttttgaacatttcgtaaagaaaattgttcatcaataggctggaaataaatttcagcattgtacccatacttattatctgggggtgaagtttcttgtttagagccgttcgctccgcaaccagtttgtctatacattggtctatttccatatgcctaataatcatttttgtctacttatcattcggtttactgaccatttaggctaaaagtcattttgatctaatttccatttggtttaaaggtacatgtcccttttgcagccaacctcaaattctgtagaactttgcaggaattatgaatatgtcatgtatgtcctctctgtgaaatttgaacgttagcaatgtcctaatattcaaattatgcaacgaaacccgtttacttgctagacttcactgtcagacaccattgattgacttacttctttggtaataacatacataaaatgagctttaaagggtacatgagcatttgtccacatcaataaccaacttcttgtgatggccaaaattaaactgattgaatctttgcgcagcataaaacgtatg

SEQ ID NO: 23941 - DNA, 2501 bp, Oryza sativa
cggggggcgggagtgcgcacgtatttatttttaattttttgttggccggggggcacgtccctgtttgccagtacatttttggcgcaatttggggctgatttcaagattattttttttgcacgtgccccctgtgccccccccccggatccgccactgtagaaggctcatagtggttcgaaaatgtggccagcgctcgtacgtacgtgatcacgtgatatccgccatctttgttagtcctctttttgtgttggccgcatttttctcaacgacagttcaggctggaattctcgaaatttgtgagctgaaaagatcgagcactaagcaaaatggcggcgtgtgcactcgagcggatctcacagcgcgttcaacggccacacgtctaatcgtgcattgtgaattgggatgagcactctacgtattttacagttctgtgcacttgatcgacccatgcactcaacgctgtgagttatggtcgacttcttttatgagacaaatccaagcaaacgtttccatatgctcaggttattgcaaacaatagactcccgttacaatgtaccaatcaaattgtgtgcagtaagaatgtacaaaatcgacttcctcaataaaaatctactaagctttctatggaccaacatataaggaccatgaagaaaataaagaataacatgaaaccaagctcatggaatccaagtcggacttgagttacgtgcggtccatattttttgtaagttctaactaaacgcttgattacaggtgggccgagtaatctactcattggttgcctttaggttgggtgagagtgcatttaactcctatctaatctctttaagctcttattctgaatatagttttaagacatggaactactagcatacaagacaaaactgttttttcgtcgataagtatatttcaagtgataggagcctacagataaaatgcacatataaaggggcatgttcccgccagtgcagttatcgctgctctagtcatcgccatcttggttccgaaggtcgacttctaatttgcatacagctgtcaatcaaagtacgcgcggcctggcctgccttcgccaagccagctgattgctgccgatcgcgacgtcacgaaagtgggcggaaacagcagccgaatcttagagccgaactgcgattggtattacttcggcacatgtatgtgataatcggcattgtccgggcattcggaacatgccatctgcgtaagagccgtattctgttgatgtcaataggcagctagcaccgtccgccagcgggtacgtattttgaacgccctctggaatacggggaacatgcccctttaagtgaaatcaggaaacccatattggtatctttaaacaaaataaaagaagatttagcctatatacatatgtgttggagaaagtaaaaagggcacttaaatatcaaaaggaaaaggacacctgttagaatagaaaaggagcacatgtcaaattacaaagggtaaacagaggtgaaaatgtgcacttcttgcacctaaaaaggggcactcacaagatagtgaaaatagggcgcttttgagaatggaaaaggggcatctatcagagcatttctgagcattcctgtccaatacatgaatacaaaagtcaaatatttagtcaattagatatgaaaatatcatacataaaattatctggtgcccggatgtgacaatattcaggcacatgactgtcaaagagatattctggcacctcgttgacgacctgggtattcaggcacttcactggctataatcatactgtttctaaatgtagcgagcgagtgaagcgagcaaggaaaaaacatttaattgctcttaaaatgttacttctttaggaaaatatgaagtctctaatattttgttaccatgaaattgacctttatctttcaatggatcctaaaatagatctttaattaatttctgtcgcggcacccctagagacttctcgaaaagggtgccgttacgataaaaaggttgaaaaacgctgcttttatatgacgtttcttttacgatatttaagtcttctagtctgtaagctcttttcgccttagatgatactttatgtttctttataacatagtttcagataaatttccttcagtctgaaaggataaagtaaagtaatgtacataattacctcgggtccgtagaaagccgaaacggtccatatacctaaggctggatgactatggaacctatactcgcctgataggaacccggaaggcagggcttgagtctgtctgagtctttttacactggtcccacttggatcaattatttcgacgtggagctataaaaacaagaatgagaaaaagatgattggagttgaaaaaaggaagattaaaaagggaaatatcattgctttgctgctttagaaaccgtaaggtaatgacactatactgtcgctagtttaacgaaattctcaactttaaaaccctggtcagtacacacctaacctgaaactctatggcccgaattcacaaaggagg

SEQ ID NO: 23942 - DNA, 3001 bp, Oryza sativa
ccgatccagcggcccgttgattggctgagtaccgtatgcgtcggcaaataggcctggtgtattagccgaaccagcggccgaatccagcggcctggtgattggtcgatcaccgtgtgcgtcgaccaataggcattgtgcgttattgttccaattatcgatcgaattatggaccgctccgcacggtcctcccgtagagtataaaagacccttgcttacagtagtttttatcacctgacgaagtatcgcagtagcatacgaaacgtcgtgatcttttagattccttattgaccacattgcgagacaaacgaatatcactagcgatattattttcgatactatatccgcaatgagtaatatatttagcaagggaaaagttgcttgaatgacttaatagtgacattatcaacttactagtaattcagaattccagtacgactatcacttgaatttataattattttttttagattgtatcccgtaatagcggaaatatttaaaatttgacatttttagtagtttccctctttattatcttggctaaatgcaactcgaacaaaaaaaaaatcttccttgaatacaattaagctacaatttcatttaaaataaaaatcgtataaatgcatatgattattacagtatagtaacattaaaaagtagtaacaaagcaataaattacgtacagaacaaaatttaaataaaggaaaatacaatgggtatttcaaatacagcataacagaaatatggacaaacgcatacatataaagagaaaagttacaatgtatacgttgatcaacagaacaaaagtgagggaaactaaataacaaataaaaaaaagtttaaatttatacaatatataaatgcataaagacaaactaaaatgttatatgtatgtgatgacctaaacaacagctttccaattgtgcccaattgctgtcctcccttttggggaattgtttgcaaaaaaggttgaaaaaatgtacccaccgggaaccgaactggcttaaaacaccaattggttgaaaatacatgtatgagtcagaatagctgtaaataaagctaataacctatacaacagcttggcaactctcgaggaaatatttataatgtaaaaggaaatgagagaatcaatggatgcgcagcaaaaaaaaatcaaaatggagtacaatctaataatttgcaattaacaattacaaagtgtcttaacaatttcttctagaatacggaggattactttttctcgagtttttttacatctagtaaaaatgtgagtactatgcaaatattgattgcaagcgttattttcttcaaacataacttcttacttttaacagaaactaaacttttattcatggtaaagagtaaatcttttgaggagagccctatacaggaatttatcttcttttggtgattaacaggctttatagctgataggttccatttttgtttgttattttaggcctactttgttttatgtattctatattatggttataatccattttgttcatgggaataagataagatgagatgtatattatataaataattgaaacaatgaattacgtaactaaccgaataactaactgactaaaaataatgttaaaaataccgtaccgtcttggttaggggtgtagattggcttgtccgtctgtacgaagacgtaaccagattgaagagtgaccaggatttctgtttccttttggaatgggtagctagggtccagagattcagcctttaagaccatgtgttggaaatctccttcatttctcatcaaattatcggcttgaatttcgaccgtaaaaagttgagatgaacctagatcaaagcaaaggggtatagtcagtggtattttctatggagctcgttcagaagtaaacggctttttctcatttccaccatgtccatgtgtgcataaatggcaactgcgcaacatagttcactacgcgtctcagctctgtgtttgctaaagattttaagtcattgaagaaaattgaaactgccgcagttgaaatctgattgatgcttaatcgtatttcaccattcatgtttaacagagttggtgtgaccatatggaaatcacaacataaggctcatttacacatccaaaataccattttgaagaaaaaaaatcatcgatattttgaactaccatttacaatactggaaaaaccaatgaaaaaccttcgaagtttgctcatacctgttttttttttggtgagtagtgctcatgtgcgactcgttggtgccccgtatgccctgtatgaaaaaatgacccctaaaaatctaaaaaaaccataaatttctcataccaactctgtttcgtctcaatttcttacagtatctttatatcataattgagcatacccatgcagaatttcacgctctaatggctatgcacaaaataaatagcgccctctataaatttctgaaattggttttctttctgtggccgtagcttcatcgtgtctggccgaacccggagccattttggatttagatacttgaatatcaagacttccagcaaaatatacaaatatataccctaacgctgaccgactttttaaaaaattgccctctaaatttgcaggtttcaagaaaattgcgaaataacttcaacttcctcaaaaatggcgatcttgatacctacgtcaacgaaacttagcagacaaatgtaaccatacacctgacaatggtttgtcaagtttggtaaaaattgatgacgatatgatgattgatatttactatgcaacacgtaacagcccgttaaatgcgtggagtacattatgtgtatattaaaatggtttcagactgaccgcaatgaagtgcccttttgaatgataccaagtacggtatatgttcacgcagacaattttgagtaaatcgcatttgaacaagggttactgtacgtattccgctgagtatccgcctagttataacacgtatcggctatgacgtcatttttacagactgcttttcccaatccatgttggcccgaattcac

SEQ ID NO: 23943 - DNA, 6701 bp, Oryza sativa
aataaatgtctcatagtctggcttacagtgcttcttatttaaagcgactgagagcaatctttctcaaatttgctccaaaactcgctagcttcactcgatcgcatatatgattgattaactagcatattaggggtcttattcattgttttattgtgagattgtgcttaaaacccaccagagtccgttattttaatgacaacaaatcggtcgcagtgaggccttaaaattatattaacattcttgctcgcttgctttgctcactttcaaataaatattcacccaatcacacaaaacagcaaagtatggtgctcaagcaggatcttggaccacgtaacgagtcaatcttgaagatcatccctgatataaattacaatttaggatgtatacgatgtttaaaaatggttatttatggctttgaggttaccccttgtaggtgcacttttttaagtttgaagtttgaagtttaaattattccacattttacatagaaaaacagtttatattcttttcttttttatacaggcgtatattatattgagaaatgatttcacacaagagactgcacatttttattagtgccccaacctctatgaaagaccctctgtcgcccttgctattaaggttggaatttcgtttactacctgggctgacagctcttgtatcttccgaaaaatgtacacccgaaccaggccgcctcaaagagactctcacttgaacattctgaacgtttggtgtggatctgatgagggttacgacgacgctctcgggcacatcaacccgaaacacgttgggagaggtcacgaaaaaggtgctgtataagagagaagaaggaatatagagaataaagagagacgtatgagagagagagagtgaaagagaaagagaagagatgtgataaggagaggtaaaagagagagatagacatagacagacagagagagagagagagagagaaggagacagaaagaatgggtagagtgagagagagagagagagagaggggggggggaagaagaagataaagagagagagggtaaaaaagaaggagagaaagttataaagagagagagagagagagagcggatatgaactaagaagagctggtatggtgtggtattcattttcaaaatcataattaaaaaagcccacaatacacacaaaatggaaagtacgtgtaaaatcaaaattatatagaaaacggattgatagcggcccactctttgtaaaaacgagttgatacaaatacaacttgaacgtacattaaaaagaaaagaaacccaaataattatactcttaatcggaaattaaggacatctagagctcatagtacacatctattattgtaaccccccccccctctcccgccaaacttaattggcataaaagatacatcctttaaagatcacagcaaaaatgatttcgtatattcaaatgtttgcagaaagtgctcgagttcttcgataatttaatataaaatggtaggtcattgtattgacgtgaccctcggttaaaacatcacgaaaaagtgagagggagagagagagagagaaagagcatcttactccaatgacatgactttagaatgtaaaataaaacactacataaaattatgcctaatgtgtgctgacgatgatgcaggttaccctggtggcaataagatttataacggatgtttgacgacataaaaggtgaatggaaaagtaactttttgaataattatgacaaagacctcacgtaaatgacgtaaaaagaaatgtccatgtaaaaatgataataaccacatttgattgattttggattatatacatacattgtaaaaagttttagaagaaaaacaaacccatagaaaacgttaatgcacagtttctgtaaaaccactctaatcgacagagaaatactttttaaaagtgagaaagagaatactctcattatattaatcctatattttgtaataccttgtggcttctggttctttgttgatggtgccacttcctatttatttgcgtaacaaaatatgctagtgcacatcaacattttacaccaaatacgacattttgcgtaaacacaggtacaaaatattttgtttatactttttcggcttatcgattacacacaaactaaaagtaaccatttccacggaagaaaaaagattcatacgcctgcataatcatgtttgcaaacatgaaacagagggagagagagagaaataggggagagggggggggggggggaggagaggagcgaggggagggggaggggggggggagaagaaaccgaaaatgaaaataatcgagagggaaacgaattgaaattcaaaagaacttgtacaagtgaaacgcctttggcgaaatcctgcatttttagacgtgttttaggtaagcctatatgccaagagacataaaatgcttcgggccatcaaggctacatggagtttggtccgaaagttcagtaatccgaagtttcacgtttcatgtatttcgaattctgttactacgaatgctcgtttgttccaaaggttcgttattccgaaaatggaatagggttcaaggatagaatggggtctcaagtgttcacaaggttcttaatttcgaaacgcaatagaattaagaaccatcttcacaagattttggaaagattcggaataatacccacatcatcctcgatattatcaactttcggattaagaaaatttctgaatataacgaaactttggaacttaccatgaaccttcatagaaatatacaccaattgcttgaaattatgaaacctattcatttcttcaaaagtattaacgcctggtggaagaaatggggaattacaaaaatacatacaatagaagtatacagtgcgtataaaaaaaaatgtacccagctttagtagctcctgattaacaattcataaccaatatgattttgaacttgatttcatattgaagagtaccttatttttcgtccgatgatgacctatttataatatttttgccacggatgaatgagcaccagggtctttaaaaagtgttgtcgaaatcgccttgtaccaagtttgggcttaaggaacgaatatgggtcaggccattatatgcatgtgcttatttggtcttaaatccttttaaaagttaaatttatgcctcatgcttcagtgcttcagtgtttaaaatgatgcgttttatctagtctttttaagaaccttgttacaggataacctttaattattttgaacagcctcataacttcttgtctcatgacatctaaattctctgtgctcacttttccgctgcgccatttgtttatctcgaatagcgaatgaaaactcaaacttgactaaacccatatgcaacacagaacacatatgatgataaatatcaaataaattgacaggagactttcatgaaaaaatataacatcccccaaaaaaattatccattttgtatcacttaatgagaaggtttaccttaaacaagggatgcgaatgaagtcaaaattgtaatcatcgtaacgaagagaatatcataaatgtttacgtgtaataagcatttccttgagtttgagttgttattaatacctttttttattccactgtctaaaagtcaatgtaaataaatgagcatttgcttttggaatgagataacactctcataataccttttgacccccattcatttacaagaggattttgaaaatacttttaaaaagcctgttgttcaataatcctcggcagtagaattatgaacatgtattattttacagggtattggttcctctttacgatgaaatatgatacaaggtcacatactcataactttgaaataagaaagctacctaagtagggtacattatttgttatgcacactgtacaataaggaaggtgaaaacaaatagttataaaaagacggacggaatagataaaaaacatgggagattgtgagaaaagaatacgtaaataaatatttgtaataatatcaaaactggaaggaggccattgttacttacgcaggtgaactttgagtcacccctcccggtacaagtgatgcactaatcgcgattacaaagatgagaacaaacgaccccatggtgatcgagacacccattcattgacaacgtcttcggcaaggtgtttcgtcttcaccaaatctaggaggaatctgcagcaccttgactgatcatgcagtaggttagaattcaaaaggggtgccacaccgacgacggcaaacgctcaattgacgttcgtatcaggcagcaacgagttttattgcgcccaatgttgtgaacttctagttccttaaagtaaaccggtaacattgttgaaggttgatgaaaaaatgcgtaactttggtatgaaatgttacttgttatcttccttctactgtacttactctctaacatgccacaaatcctgacaaaattctcaaacctcaaagatatttatggttttctttgaaggcgtagatatgtaacccccattctaacagtaagttttcccaaccaatcttttaattttccaaaccgtttttccatgaatggaatggtatatagagccaattcattgctttgtgacgatttacattcacctaaaatgtaatcaaattataataatatagctgggagaattaaggaatccatcagataatttttttctaatttttatcattaataatgttctgctttcactcaaactttcagattatctttaattgtacatctagcattgtagttaccaaacggaaaagtcatcaaactactactcctactaatactttagcaccattttccctcatttgaacaacgttaccaagtccctttaattggtcttttatgtcgaggtctgagaaatcgtataacttccaggtgtttgtataactaggaattgacagctactttcaatgtattgattccttgtcttaacccataacgagaaatacccctccccttgaaaaagaagaaggaaaaaaagaccgttttgattcatatccgtttctatcataacatgtaatttagaggaatacgaccaatattaatttgttctgactaggtagacattgtcagaggcagtatttcctttctctttctctctctctctgaccctctctctctctctctatctcctctctcttactctcactctctttctctttctccctcttcctctcctccaacttcttcccccttttctctctctttctgactcaccctctccacccctctcttaatctctctctctctatccctcttttttatataaacttttttaatagttctctgggacttttgtagagtctgttggtccctagatcatctgaggtgacctcttttcctggatgaggaaagaaagatcatgagggatcaaaataacaggaaatgaatcccacctcgtattcgacctaggtctgcttgtcgaaaacatagaaaaagaccccaaacatgatttcgcaatgaaagtatgctatcttttactaggcagatttcctgatagtttacagacaaaaagcctttttaatcgctgtgcgtatcagagtctgcacagtgagactaggctgaaagcttactgtaaaggctctacttgctgatttgatgcagccagatgtggtaacgtgtcaaatttgagtggattccttgactatgacaacagtaagaaaggcattaataatctgtttaagtaggcctgtgtaagtaaaaatccctctggttcaagttttattataatatccatagtgttaggaataacgatagattcatgtgtttaaagataaagttgagttctggtcaccctgcagcattgtgaaagaaacagtgtggcatcgatcagaaaaagttgatgatgtagcatgtaagtattgatgtgtactgcaagtttctggaatcatcaacatgataagaaatttggctcagtcttggtaaaagtaacaagcactgtacacagaaaaaatgtatatgggactacacaaacacgtggcaaaaaaatagaatatgaaggtatttgacgagccatgcttttcagggaaaatttgtttctctgatgttcttccacacttgcataataacaatgaaatcgctaacaaattattttcccctcaccccacaaatcaactttctcgttaagcaattttttcttgtgccaaaagagtgtggctcgcagtcgtgtagtgaccaagataagagctggggtctcacagagtcctacctttccccttcttctcgttggcctgcgagcgggcggtaaagggacgtttcgtccaaggtgctacacatcccacccttaccccactttcaaagatcgagtcgatattgtatggtttgttggtttgatatttgtgttttcatttgtttgtattgtcactttgtttgattcattttcgttttgatttgttctgttttcgcttgatctggaattttcgaacacaaagtgtgatccctatcaggtgattaccttataccctcgactcccctagtaacaaaaagaaaaatatcacccccacagggcctgcctgtcccatcttcctatcaatgctaacaatataataatattcactatagggaatatgaataatttaaaacctttctatttcacgtgagaatgtacgtacttgtttcgtgaaacaatttgttttattaattccttgttgctttagaatatggaggattttggacccaggatagtcttatgtttttttcttatcttagtggatgttggaccccccccctccc

SEQ ID NO: 23944 - DNA, 12141 bp, Oryza sativa
ttgaaattattaggattgagacggatattgatagcttcttttaccctccgtgtataccaatgccgttcttgggaaaggcactgaaccccgtcccagtctggttgatgctggttgtcccaagcatgttcggctacggctgagttgtcagttcgacggagtctgacgtccctcttatgctcagtgattctttcttttatcggacgggcagtttcaccgatgtaggatctatcacatcctttacaagggatgttgtacacaatgccgtcccgtctatgtggaggaattggatccttggggcgtgtaagttgttgacgtagggtggtatctgatctgaaaaccgttcgaatgccatggcgttattgttccaattatcgatcgaattttagaccgctttacggtcctcccgtaaagtataaaagacccttgcttacaacagtttttatcacctgacgaagtattgcagtagcatacgaaacgtcgtgatcttttagattccttattgaccacattgcgagacaaacgaatatcactagcgatattattttcgatataatagtatagttgggaaaatttaggaatcgatcagattacttttccacaattgttataattaatactggtccgtttttactcaaattttcaaattatctttaattgtacattttacatttaagtcactaccttaaggcccggtcacacagaggggacgcatggggaacgcacggccagcgcattggaaatttgcaattttggccagtgcgttgtcgtgcgcccaacttttgtcgtagctgacaccaaattcatagcgtgttgctagcgcgctgagcgcatacagggcgcatacagtgcgcatacagaccgtacccagagcgcacatgataacaacttccacgaatgcacagcgtgttgctagcgcgctggacgaatggtccacgcatgcaccgcgttctacgacgcacggccagcgcattgggaatcggaaaaggccgtgtgcctaacttttgtcatgattttggaaaagctagcgagctgacacaaaatgcacagcgtgtagctagcgcgctgtgcgtatacagggcgtgtgctccgcgtatgtctggcgctggactagcgcgctcaacgcacgtctgggtgccttcggcgtgtacattcatgcgtcgagctccgcgcacacttttgagcatgctcaaaaaatcccgacgcacacagcgaatgacgacgaatgcatagcgctggtccagcgttgttccagcgcgctcgacgaacgagtaacgaatgatgacgcacgcctagcgaaggacaacgcactggcccaaattgcaaatttccaatgcgctggccgtgcgtcccccatgcgtcccctctgtgtgaccgggcctttagcaccattttctcttatctgaacaatgttacttggtccctgtaattggtcttttatgtcggagatccgggattttgcataactttcatgtgtttgtataagtaggaagcgacaaccgcgttcacttaattgatttattttctttatccatagcgagaatcctggcaaaaaatattaccccccccccccacaaaacaaataaaacaaatattagtttgggtttatatccgtatctattataacatttaatttagaggaatacgaccaatattaatttgttctgaccacgtgtaccgctttctctctctctctctctgtgactatctctctatctccctctctctcactttcaccctctctctctctcattctcccttcctcccccttcttccccctctctcccttttttctatatattgtttaatatagttccctgggatttttgtagagtctgttgatcctttaattatctgaggtgaactctgctcatggatgaggaaagaaagatcatgagagttcaaaataataagcaaataattaccgttggtgaaggtgatgggacaaactatcatttccgaggcgatctggatgtagctatatttccgaagcggagctgaggaaagatagcgtatacattctgatcgaaaaggaagtgatagtttgccatcgcctgaaaccaaaaggtcattatttgctttataatccccattaaaacaatttatctacaaaaagaaaaggacgtgtatgcatttacataaaagacacctaggcccaaattcacacccaaaaggtttaagttaaaccaaaccccttgagggtacggtgcgcgcatgtgttttctttaattgcgctcaatggtaatgcgcgcctaattacgcctgttttagtgcgcttttggataatctttagtgaaagtgagttgccctgtgtagatagtacctctatcttcagtgaaagtgcgttgcactgtgtagatagtagtactatctacacagtgtaacgaactttttgcttctcccttcaataatgggcgaactatctttcatcacgtgatttacttttgaccaatcgtagagcaatattcttagtatgtggaatataacaagaaataataaccatctcttgatgcagccagagactgacagagcttcccctctctttcccctccctctcttccttttttctatatactttttaaatagttccctaggatttttgtagagtctgtttatcctttgattatccgaggtgaactctgctcatggatgaggaaagaaagatcatgagagttcaaaataacaggaaataatacccatctcttgatgcagccagagactgacagagcttcccatctctctcccctctctctcccttttttatatatacattttaaatagttccctgggatttgtgcagagtctgttgataccttgattatctgaggtaaactctgctcatggttgaggaaagaaagatcatgagagttcaaaataacaggaaataatacccatctcttgatgcagccagagactgacagagcttcccctctctttcccctctctctctcccttttttctatatactttttaaatagttccctgggatttgtgtagagtctgttgataccttgattatatgaggtaacctctgctcatggttgaggaaagaaagatcatgagagttcaaaataacaggaaataatacccatctcttgatgcagccagagactgacagagcttcccctctctctctttttttctatatactttttaaatagttccctgggatttgtgtagagtctgttgatcccttgattatctgaggtaaactctgctcctggatgacgaaagaaagatcaggcccccccccaaaaaaaaaaaaataataataatttggttatcctcgaccgcctgctcgtcatttttgggctgctcgtattattattattatttttttttaattctatttttttttgtatttgattttttgttctgggggggggggggggagtaatcttaaatgccaaacataccattttgcaaggatcaaaacgcgtcctgttgccagtttggtcttttcagtacgcaattctgtatttattaaacttgtcatttttatttttatatgtcaaaaatgccgttcatttaaatcaggttctgagcattcttaaattcattttaaagcacatctgtactagtttacaggagggattagaccaccctgcaaggtcactggacaggtggttatctcatcaaatcagctctaagttaccaaaatataaagaggatcatgggggaccaatggccaccgattaggcattgtttggaatattatgggcgcaagtaccgataagtagtacagtgggaatttaaaaggtgctgtatttcaaagccaaaaatactttctgtattggatttgctattcattgtacatcaaactagtcttttaccatattaaagtgttgtatagactttgttgttgaaatgcttgacatccaaatgactttttttttgttagggaaaaatatttataaaacaaataataacaaaataaaaaaaatccacccgcccgcccctactccagaaaagcaatcgagaacaaccaaatgattttttttgttgggcctcatgagagttcaaaataacaggaaataaaacccatctctcctggatgaggaaagaaagatcatgagagttcaaactaacaggaaataatacccatctcttgatgcagccagagactgaaagagcttcccctctctctcccctctctctcccttttttctatatactttttaaatagttcgctgggatttttgtcgagtctgtttatcctttgattatccgaggtgaagtctgctcatggatgaggaaagaaagatcatgagagttcaaaataacaggaaataatacccatctctgtatgcagccagagactgacagagcttcccctctctctcccttttttctatatactttttaaatagttccctgggatttttgtagagtctgttgatcctttgattatctgaggtgaactctgctcatggttgaggaaagaaagatcatgagagttcaaaataacaggaaataataccaatctcttgatgcagccagagactgacagagctagactctactcaatgcatgctttaggatttgtgtcaattcggagtgtgtgcttgctgactggtttccttgagtagataatagtaagaagggcatttatgctcttttcaggtgggctgtataacgtacagaccacctaataatttcgttagaattgcctttatttatttattatatatttttcttatttctaaccacttttttgttggcaagataacttgaaaatggctcaatcaaatgccttgaaatttggcacacatatgtataggcatatgtacaaagcacaataacgttttcaacattgaccttcactgatgacgtcatctaggcgccattttgtaaaatgttacgaaaatcaactcatgatcatatcttcataaccaaaagatatttctcattcatatttaccatgatcaaggtcaatatccgtccggtcaatttcaggtcaaataacgcgcgcgtgcgcgtacgtccgcgcgtcaatgcgcgcgcaaaattttgaaatgctcaaaatcgtctcaaaatcattttgcatacattttaggccattctaagcattttataaaaaaatcgcgcacacacgcattcgcgcgcgttttcgcgcgtaaaactattgcacaacatagaattgcctttttttttctttcataatattccacatatatttacaaacaaattgacaccacgtttgtctctttatgactattaataagggattgatcgaccgtttaacaaaaatttccgtgcgcgcgagctcttgtaatacatagcatatatgggcaaaaacatgcctatacaaaatccattgtagctctttaggatgcaaggtgaccccaatttgttttcatattttaatagagtatgattcgaagatattgtttcatgtctcatttgaccctcaattaactcatgacgtcatcataatggcctccgaactcaaaattccaatttgcatattatgacttcagcatatttatggaaaattgattgaatctctgtaaatattgatcgattttcttccaaattttgatatgttctagctgagacgattttctacaaatgcagttactattattcttcattttgacaaaggcatcatggcgtgtttttgcggttgaaggaggcatgtcaattttttacattttgcgtgtattctttatgggacatgactttttctcaaaactcgattctacattcccgtctttcgcgagcaatatctacgtcgttttagcttcgtttatgctgaacttcgagtatgttgtagatgagacaaaaatttatctcaaatgtaccctttattttgttttaattctttgttggatcagcccacctatacttgttccaaacaagtattacaaatctagttaagtagtctaatccctctggttaatctttgttttggtttgttctgttttcgcttgacctggaattttgggacgccagttgtgatccccatcagggcattaccttataccctcaactccccaagtgatgaaaagaaaaaaaatcacccccacatttaagtaactacattagcaccattttctcttatctatttttttaaattttagtccctttaattggtattttatatcaaggtctctgacttcgcataattttaatgtgttggcataattaggaagcgacaaacgctttcatttatttgattccttgtctttatccatatcaacaatcctgaatttgtaaaaaaattcctccccaacaaagttttggcaaggtttatatccatatctatgataaaattacatttaaaggaatatgaccaatattagttttgttctgactacgtagaatttgtcagaggcaatactttcttgatatttctctcttttccctctctttttgaccatctctctatctcctcctctctctctctcattcactctctctctctctctctccctctctccctctctctctctccccctcctcacctcctcccccttctcccctctctccctttgttctatatacttgtttagcaattcctttggacttttgtagagtctgttgatcctttgattatcggaggtgaactctgctcatggatgagaaaagaaagatcacgagagttcaaaataacaggaaataatacccatctctcctggatgaggaaagaaagatcacgagagttcaaaataacaggaaaaatacgcatatcttgatgcagccagaaaccgacagagcttcccctctctctcccttttttctttatactttttaaatagttccctgggacttttgtagagtctgtagatcccttgattatctgaggtgaactctgctcatggatgaggaaagaaagatcgtgagagttcaaaataacaggaaataatacccatctcccctggatgaggaaagaaagatcacgagagttcaaaataacagggaaaaatacccatctcttgatgcagccagagactggcagagcttcccctctctctcccctctctctcccatctctctcccatctctctcccttttttctatatactttttaaagagttccctgggacttttgtagagtctgttgatcctttgattatccgaggtgaactctgctaatggatgaggaaagaaagctcatgagagttcaaaataacaggaaataataccaatctctttatgcagccagagactgacagagctagactctactcaatgcatgctttaggatttgtgtcaattcggagtgtgtgcctgcagcctagtttccttgagtagattccttaaccatgataataataagaagggcatttatactcttttgaagtaggcctgtgtattaagtcaaaatccctctggttcaagttgtatgttaattaatatccatagtgttatgaataacgatagagtcatgtgttaaagaattccccttttttattttgccatatgatctaatcggtcgaaatgcgacctcttcaattttttgactcgttcccttagctcgcgtccgacgatcacactcaactgcaaggcattgtggtgaagcattatcttagaccacgtcgagagaaaatctttaaagtcatccctgagaatgtagtaggagtatatataaatgtttaaaaaatggaattcttctccagtgcaggtgcacgttcccccacccagaaagtaccatctttgttggagcccccccccccccctcacgttacaagatgctccgccaccactggatcatagtcgaccaaaggttgataccccctcccccatgcctgagcctacactacgccactgtctatcattataatttataataattacagaaagagagagagaaagagaggacaaaagagagagagagagagagagagggaggggggggggggttggggtagggagagagaaagggggccatgtctttgtagtttaaaagtcattcattaggacgaattatttttgttttaatcgccattttcatgtttctggaataaagacaaaataatgctatcaatatgtgtataatatgttttagaataaaatgagacaatacagaaaacagatctatgaaattgtctttaaaggtaggtatcccttttgcagccaacagccaacatgaattatgaatttgtcacgtatgtcctatctgagaaatgttaactttagcagtgccctactattcaaatttacccgtttactttttagacttcactgtcagacactattgagtgactgactgaccttttttctttggtaataacatacataaaatgagctgtaaatgatatgagcttttgtacacatcactaacccgcttcttgtaatggtcaaaattaagctgcttaaatctttgcgcagctcaaaacgtaagaccgcacgtaacaaggctctgaaaatcagactattttcgacgcattaatttaaggagcgcgtttcgtaaattcctaccggtcgatagatttcaataaagcggcaattaccagttctaatcttttaagatgagttttaatttggtattatattttgtttaccccaggatttacataattctatattttcagcttgcaaaagggacacacctcctttaagagagaaggagagatgatttctatcgaaatgaaatgattgtttgtttgtttgtttattttattttagcacggtagcacttcagccaatggctgttcttcagcatggccgtgcatataaaaagcaatcacaattttacaaagaaacatacatataaatatagattaacatgatttacatacaaagttaaataaaaacatacacatatatataaacaaataggttagaaggcgagaaataaagaaacgagccctaatttagaaaagaatacgaacagaaaaaaacaaaaacataataggatattattttttttaaagaagaaaaacaaatcagttgtttttgtttgctattaaaagtaaacatgacattacaaatattatattataaactgcttttgaaagtatagtaagtttgtttatatttagtttctaccggtaattcattccatagttttgcaccataataacttagacttttcttttaaaagcaggttttgattcttggtaaagtaaatatacgaggagcatttcttaagctataggaagtgtatttaaaattaaatttacttaaaagataatccggggttgattggtctgcaattttatacattatacatagaacatggttgttacgtctttgtagaatttgtagttttttaatattttgtttcttcatattattccaaacaacatcacaataatctaatttaatttgagcaattgacttataaaaaagtaatgccgttttttgcgagatgcaatgttttattctttttagcaaatacaaattcttcacagtacttttacacaaatgtttcacatgtttatcccaatctaacgagttatcaatgtataccccaaggtatttacacacagtaacctggttcagttttttgttatcaataaaaacatctactttttttagatccaattagcattgtttcacatttctttgtatttagtgccaatcgattacatgaaagcaaatcagaagtattccgtaagtcttgattcaaatgattttcaatatcttatacagtattactagcataataaatgcaggtatcgtcggcatataatgaaacaaaacaatttttaagacagtttggtaagtcgttaataaagattaaaaatgaaagggtgtgtgtgaattttaaggataaatttacaattgatatcgatcatgagggccatattgaaggttttgaacaaaactcatgagcttcaggggacctgggtattaactaacataattattgtttcacttcattattactaaaatctatgaaagttatatctggtcccaacatgggtaagttcctaccgctggtctaattatactgctttgaacaaacaatagaatgctaataagagttgacaactttgaaatccattaccactagtgaaataacgaaataagccttcactgtaaaaaagaatttgttcattggtaatttttacgtattttttccatgtagaatttacttgaaaacattacttttgccacttacgcactaaatttaagtcttgctaactcaaactttcaatttagtagaacatacgtggaatatttaagtaaaatcaaatacataagaactttaagtaatttcagcttgtattaatttagtaattttaactcaaaatcagaaattatacgtattactcaaacaatttatgttgattattcttatctttttaaagtaaggaccgatgcagtgcgtaatagaaatatttacataatttatgaatattcattaagaccaaattaaactcttttttaaataaaaaacaattcttttttgtggttgaatgaaaatttaaggactttaaaacatttactaattcatttaacatggctaagcaaagacaagacaatttttaattgttacccagttcaaaacaaatcaaaacttgatatttcaggaaattgtcaaccaattttccttttaagatgctacgatcaagtatatataaaatttggagcctttcaatatgtgtcgaattgaagcgtatgtaatagtttgtgatggtggtagatatatatatacggttaaatcttaaatagaagtagtgaatgattagtggatgttacttgttagattagatggataccaaatcgtgcaatatgtaatcctatcatagcttttttttaattatctaaaatgattacaatacttaaattatttacgttaatgtaactcgatttaactgagtaaaaatgtattcagcaaaataagtaaattctacttaagatgccgtaggtaatatttacttaataaaaataaggcaattcttttcctcaattttattgagttatttcgactattattttttttacagtgttggagaagctgcagtgagtgaattaaggcagattatacgcaaatgatcggtttattattcaaagccattaaacaaatatgcagaaaagggttacattatccatgtcgtacacaaacattttgttaaaattattaatgtcatgtttttatttgtttatatacacatcatgataacggtcttttaaaatcgatgttcgtgtgtttttattttcgtaagagaaaaaaataaatgatataacaataataactagcacaacataattcgtaaacatatacattcaatattattgttttaattcatgtctctgttataaaagaaaaggtcatattcaagtaatattcaacgatgtataaacatacgattcaaacaaagaacaatcaggaaactcaagtgcaggaatggactttcgtttcaaggacattcatgaaggttactgaaacaatgagggccgattataatcaacgttttgccaaaagagtaatcttcttccggcttctttttcttcttaagcttttttataatcacgaacagtacttgcagctgctagattagagccatatataaacaatatttgaaaacaagaaactgcgcattataagttcagcatactcagtggcatttatttatgagaaatatcgtttttgttcctctcaatcatgaattgtacagattcgtttattgtggagggggtggttaatacaaaggataagtgcctcatatgttgtattgtaacgggttatgttttatacacaaggaaatgagggtaatatacagtagtaatatatcgtgattttttttctattactacgtgttttatatttgctaggtcctatgtaacattttgacatcacctatatcatttacatttgttcaagtagtaacagacttctaacaaattgctcttgatagtcctagagacgctctttcctctaccacgtaaaacacgggcgccaatgcatgcacatcgtcctaatatgattgtagttctagtattcttctttttcttcccctaaatcccattcgtttagcaaatagtgcttgttactcctattaaggtcccttccttgatcccgattcctttcaaaatgtgtaggcttaatctccagcttctaatgtagggcacttaatactctttattttccaaaatcactcacgcataaccgtccaggcgccattttgtccgttttaaccctaaaaaggccgggctatttgaggtcttgatacggctgggggggggggg

SEQ ID NO: 23945 - DNA, 8134 bp, Oryza sativa
ctgtgaacaaaaaacatctaaggaggaggatgctcatttatagttaaaggaaacaatgcaacgatgcaaacaacataggtaggacacatttacgagctgaaaccgttgcggtgttcaaattgtatctaaaacttgatttcagacaggaaaatgccaaagtgttttacttaccctgggagggggaacaccagaaccggcgctcctggatcacctctgaaaaaattgctgtttttactttgacgcttgctccttttcttttcttataaagtcctttccccggaaaatgaacccccggaaaactacccccaaggacaattaccccccccccccggtgaattacaccccgaggacaactaccccaaggacaattaccccccggaaattacccccggagaattaccccctgaggacaactactcccccccccccgattaggcaagacattaggcaagagttaccgtctgtgtatcactagctagcacccccctccctctccccgttgtgcgttaggcaagagttaccgtctgtgtttctgagaagattgataaacggttctattatttatttccctataccagacggttatttctgtctcattcatctccaaaacgaagtgatcattgatgtgacatataagagagtggatttccactactatccatttagagctgggctcatattaacaaatcattactataagcctagttgtcaactagtatataatagttgtcaacttgctgagtaaggatatgaatatgagcccaagtggtgtttcacaaagacttagattgccttaagttggacttgaactacagcaggccattcatgccactggttgctctcaccattcgtctctcaagggaaatcccgaatctacataatttacattttttgatagttcattgttgaaaaaaagaagttacattgtaaacttaagttttttaagacttggacatatcctacggtaggcgatctttgcccttaaaaggtcttgaaccagatgtaaaattagaggaaaaaaccttataaattgtgatctttagatgatatattttttttccttcaataatcaaaaaatgtaaattctgtagatttgtgaccacgatgtgtacgttccttgagagactaatgccaggaatggtgagatcaacaagtggcattaaagggcttgccacagttccagtccaacttaagtcgatcaggtatacaataatgatggctttactctagcttttggtaaattcctagaaatatttgatgaatcgttcaattccaacttaccattacagtgtcttgctcgagcttaccacaacaaggtgcctagatccccttggatttcgaaaactcttttaaggtccataaatagaaaaaaacagattattatatatatagaaagctgaaccaaacgaaaagaataaaagtaaatatactcatctatcggaataagctaactgttatacttcgcatagcaaaaaaaacaatattattaccgtcaattcgatatattcaagtccgacatcaaaagtacgtcgaaggtaatcaaccaatctgactattacaaaaaaatgtatgttgatggtgaacatatacacaataatactagcgttgcaaatgcgtacactaaaaattcatttttcgttaacatacgccccaatcttgcccgcaacattcccgattccaattcaccattccatttttatttatgaggcaacattccaaatagtattttctttttatagttcaggttatgatggtatcactaatgttttactaactaaaaaaaaatcatccatgtaatagtttctcctatatttgtaatctatcactaacaaccggcactgtccctgataaaaaaaaaagatcgcaacggttatacccattttttaagaaaggtgatcaacaggacgtagcaaattaccgctccatttcacttctaactattttctcaaagatcctcgaatttgttttttgtttattctcgccttattgcttttttttaaattttaatcatgttctctcctgctcccaatttggtttttgcaagaagcactcatccgcgtacgcacttctattatttatcaataagattgcaaatgctatcgatgccatgttgccatgaagaggaaatcactctgttaaaggagaagccctctccgatgtccagttggttttgccgggaacgggaattattttgaaagaaatagatcagtaaaagtttcaccaaaatcctattagaaataagaaagttaagacttttgaaattgtaatcatgcaaataaaaattgacaaccctgtgacgtatcttccaaattactctcccgtttgctctgtcttataacatatcatagatttataatttctttgatggcagttttaactcaattacactcatcctagataataattgcaaatacgattttcatcaataagaaaatagaagtatttgtgttcgttgattacggcataaaaaacttaaaaactttctaatacttgttagaatcggatcatttcgcgcaagaaattcccgctatctctcggagagacttcgggtgagggagatgctaaagaatatcaagacaatttaccattccttactttcgtagtacgttcggcaggtaaaattgcttcgtgaagaaaacgggctcgacaaattacgttcgcaataggttaacacgtgaaaacagttttcgttttcctagagatttcatacctcattttatctcaaagtctgatttttgcacgagagcaaggaaaaagcgttcgaaaactctaaacaaaaaattcatctccaaaaaatgtccgcatcaatcccagtgaatatgcatgattgtatgccacaagttaacgcgcgaaacacaaggattactagcatttccttcagattatgtaaaatgtgacttatataaaatttgagggtatggagcggatcaatgaaagaccccggggaataaggttctctttggccttggacaaaaatccccacaaaaaaaatgttataggccctaatcaagtagaggtggatttatctgatatatatatatatatatatgaaatagagtggttttcaacaagtatcaagtgcaaagtgttctttccgagtggcacatttctttcaaaattaatgacaaaacatcttaatttgctacacagctctttccgtgtcacttatctttttattattcacatgacagaaatcatacactctaaaaaccatctgctcttttttgtaacagccccactcatcaccctatcacttttccgtatgtgtctgtccatcgtccgtggtccgtctgtctttctgtatgtttaactgaaaggagctcgttgccaaagctcgtcatatcaccacttggtggttctgtgctggaacgcagggttattaactatcacatacatgcatttctgagtttcattggttgtcatttttctctgcagctcgctcgctcggccagactcacttcagtttgtctgagaaggctatctacgaagtattgaaatgaagttttcggcgatcatcgtagccgccattataggagttctctgttcctgtgcaggtaaggcaaagtttaacattttatatatgataatacgataagttagtgtttattgtgaaaatagtttctttctaattattttaaactgtttcagaaaataaaagttgtcatcgaccatggcgttttacggaaatggcatatcagaacaaaacagactggattgacgcagttttacgtcagacagatgacgcctcgtgtttaataagaattaaagaatgttgttgttcgctcttagtagcatgggccatggcccctggacccacctatcgttaaataagtgtttttaagcatttttttaccgaaatatttgacattctttcagagggtactagctgtcgtccaccgaggagtttacggaaaggacgttacgaatatcagcacagtacaggctatggattgacgcatctacctgtgaattacatggtgcgcgcagtgtgtgagcctgacgcagcgcttgtaggagatgaattcatcatctgccaggacaatggacaatggagcgattacccatattgccatggtaagtgaaaggtggttctaccttttattttcgttgatttttaacaaaagcttgactagcatttttgtattattagttactacacgataagtgtgtccatcgctaagtcagtaagttgcgagacactattctggcggtaaacaaatgccaatctattcatgtattcaattttttaaagaatttaaacaattaaaaaaaaatcacagaaatacatgaaagtagaggtgttgtggtataagcataatggataagtcaccgaactgtagaccacaaggttcggggttcgatttattgccgcggcatttactcgatttggcaatacatgaatctaaatttgccacactcgaatagactcgacccctatgtatttagtgagtacatagtacatagtaggattaatcccgtgagtacaatcagcgctactgctgcaggagctcgagccggggtaataatatgcaaattgcaacttaggctaaaatatctgtcagcataattggtctgttttgcaaatcaaatgtattccttatttttcctcatgaactgaattttcttctaaactctcgatttctttcctttgacttacatacaaaacaaattgatataacaatgttctttcaatataagcctaacttttaatgttcatggctttcccaattaagctccttcattcggggttttgctctcaattctacaatatttactgtactcatttctatattaaacattttataatattaggcagtaagaaaggagaaaataaatatagatatcactttctacaaagaagaggtcaatttgtaatgaataaggcatcttgctattttgttccattaatcatttcgcttatattttataaatatcgtccaaattttgttctttaaattgctaggacctccatcatgccccgacccaaacaaaccgttcggaatgctagccttggttcttgataccaactctggaatcaaacgtggtgatctctacaccgaacgcacagtgttcaactatacctgccaaacaggatatcatccaaccggggacgtcacaatcacgtgtcagaatggcacatgggaagcggatgcggatgtcccagaatgcaacagtaaggttcaagcagggagttgaaagaaaggaggcgaaactcttgtaatttattcaaacgcattcgtgagttctaaagcgtaacaaaggaatgtgtaacattatacttggctttgaagttccatgctccgaaccgcggttccactgcggggactttcggaagccaggcaccagttttacatttattacaaaatattaatttaccggcaacatttcagtgtaaatcaaaaacgttatatggggattgtattgggaatagtgcatcaaacaaatcttcaaattaggtactccgttcttcctttaatgtgtgtgccagagttggtaaaaagaaaaattaaatcctgccaaaaaactcaatgtttttaatgcgataatttgtgcatgttttaacaaatcgatcgaaatttggtgagggggaggggatgcagaatgcgggagaagatgaacagatgaagggcgtttaaaacttaagggaattcgtacaaaggggcacttctgcatccctgccctttgacaaatgaaatgagattggaatcgtttgaaatgttcctaatttgtcagggacgttaaataaatgaaatggatcttttgtttctgctttcttgtaatgtttttaactcgttaatctttacgacatatggcatttgaagcctcccccttaactttttaaagtcagtgacgatcgtcaaacgcacctccgattaattattttgagagttgtttaaagcaaatcggaaggagagctttttcatttttgttatcttatttttttaatacaaattccaatgtcaaaacgcaattcatcaagcaaaactgtcaaaacatatacaagtgcaatagtgtatattatcaaataagttcacatataatgtatattttcataactgggtgtgggatagcttgcgagaaatacgaacgtcatgggataacttttagacgtttaggttatgaaaatgaccttacagatgatggcccgaattcacaaagcaaggtttgagctcagaccaaggtttgagctcaaacctccttttgtttcgccaaacctccttttgttctttacaaaccaggtttgtaaaaaaacgcgtaaaacgcgtcatatgacgtacgaaaaccaaggtttgtcgacaaacctcctttgtgaattcgagccgatgggtctatccgtgtaggttaatccgtttcgggaaaaatggacaggggggcatgattgagccctaaccactcccacggaccctgtgcgttattgtcattcaatgagccaaacgttggtacatctttattcttatgatgcagtgatcacctgtgccccacccaccctggagcccataaagaatggttcacataacattgagaacaggacctaccatgttggagaagtaagtctttagttgtctctcatttattggggaacaaaaaaaaaatccaagttattaataaaagaacaagatcatggccttatggatagtggatttgttactatcaccattatgtattatctagcatgatgacgaataaagatgataatgataacaataataattataattataacaataataataatgataataatgtaataataatattgatattatgatataataataataataataataaaatcatattgtattttataagaagggataattgttgcttgaaatcgcacattcaatgagaaataacttaagaattcattgattgatttagacagattttttttttatctgctcgccattgatccgtttagatagttttttactaattgatcgtttgattaatttgttaatcagttaagtgactgattaaacttagattatcgaatagctaatcaagttattgggttaataaatccatagattcgttaatcagttacgttatttattaataagttaattgagtcggttgttttatcgcagtttatttattggttaatcagatgtttaaaatcactagatgattttttttttaagaagtttaatttcaatggtattctgaatcttcgtccacagatggtgcaatatcaatgtaacgacgggtatcacgtcgaaggaataagttggcaagtatgtcagagtcaaggtggacccaatgggatatggtccgatagcgttccaagctgcaaaggtttgtggtactatcattgataaagagaattaaatccaagaagtatcaacaagtcatttaaatgtatttataaatagggctgttttaattagggctgtgttaaataggctgtgttctttctctttcttatttatgcttacttaaaagttctacacattcctttttttaaaaaggttttttttttcattaccgagtagtcctttgctttcgtttttcattgcttccgtgtattgaaaattaagtacattttatctaaactgttgtaaatatacgtgagtaggcaccgtgcgagtgaagatgcctctgcgttgaagcatgtgggaaccagctggaggcttgaccacacgaatgactggtagagcagcttatctaaatgcagatgggttggtgaatttgacaacgggtctgtcgctcgtaacgttggaatttttgttttaccctaatttatggaattattttgacaatgatttattcctaataaatctagataatagtatacattctcagatttcaatgaataataatttgccagtgtttgttttggttgactgctaaggcattgtgtttgctattcaactaggggacctacgcccttaagccatacattacagtaatgaggattaatgccccacaaaagggcactaatatagcacatcgacacggttttgatcctggggcctcacagttccgaggccattgatgtgccactgaatcgtgactgttcgcagcgggggcaaaggtagggggcagttcccaccaataaaaaaataaataataataagatgcaccaaaatataaataatgcattgcattttaccccggtcctcaacataaa

SEQ ID NO: 23946 - DNA, 2184 bp, Oryza sativa
gggaactgctccctaccctagcccccgctgtgtacagtcatggttaagtggcaaagcaaaggcctcggaactgtgaggccccaggatcaaaaccgtgtcgatgtgctatattagtgcctttttgtggggcattaatcctcattactgtaatttatgacttaagggcgtaggttccctagttaataagcatatttagagcatgcacatgctttagcagtcacgcaaaacaaacactggcaaattattattcaataaaatctgagaatgtatactattatccagttctatgagaaataaatcattgtcaaaataattccataaattggggtaaaaaaaatattccaacgttatgagcgacagtgtacatccattttgtaagtttatcaattgtaaaattctttattaaatgcaatatccccggtgtctctttgataattaaactatttgatctataaaagaagaaataatctgttaaataagatgtagaccgttggatacttttttgtaaatctttagtcgcaaggtgtcccaaccctggttcccgtcaccttgacaacggccggatttctttctcgccgagaaacggacgaggcgccacgaatttttggcccgtaggaacgatgatgaccctcaggtgtccgtcacatctagagctgatggggtcaagtgagagggtgtgtcaacctgatggtcactggaatggtagcctgacgtcatgccacagtgaaggttattataccgatgttgttttgggtgtgaaaagcacggactgttagcacatgtgttgttgagggtttagcccttttttgtaccatttacaaaatgttcctgcttaaactagtagatattttatgcacgacaaagacatttatatttatttaaagagacgttttgagaacctctcataccaattcattgcttagtacattatgggattaaaaaatccagtttaggggggacggggggtctttgaaaatatttgaaccattggtaatgcctggattacatttgaccgtaccctgcccgtatgcccttttccgtgcggccaccgtacggaggtaggaggcggccgtgatattttcgtacggattcacgggctccgcggggcaccgcggcctctacgaatttgtttcgcagaaagttatacaaatttagaaaatcgtaagcccgtatacatgtcgtaggtgtcattgcacaatctccacacgggcatcgcgcggaggacgcgcgctgatcgtgcaacaaatacgattttacggtgaatatggaggcaaaaaacgcttaaaacgacacggttgctgcacggtcactgagccttctccgcgcaacttttgcaagctgcacgggctccgtacgatttccgtgcggaggctggggagactgcatggctactgcattgaaattgcacgatttccgtaaatctccgagcagcctctgtacggatttaccctggcctgccccggaaggtcaatacaagaaatggcacgatggtcgtagataaacaaataaacacaaacatcgtagcccgtagcctcctacgatgccccgaaaagcgcaagagaaatcgtagactaatttatcgtacggtgtcaggggcaactgttatccaggcataattgtgctgacaagcgacaagaaatcagtggcaatgttgcacattcgtgcaataggttgaaatattgattattggtgtaagaaatgtaaaagaagtacaaactgtttatggctgggttaaaaaattattcctatgttttggttggggctgattaactggttataagtcgtaggtgttctaatagaacaacacggcttggtaataagtcgcatattcaggatggtgaagtcgcaggacggtccgaaacaaaacagatctcataaatgaatgtacaatgttgtacattttcacgcacacacaaacacttttttctttttcaatattttgtaattagaaatttcattaaaaataaatcattgcatagaaatcattgtaaataattccatacaaatacacatattcatttcatttcataacatgaataaattattcacaaaacagtgagcaaagaaggagaataatggaatgaaatcactaaattttctaataataataatgaaatactgaacttaactattaccatcattcatgaaaaaaaaggaaaaaaaaacattatacatatttaaata

SEQ ID NO: 23947 - DNA, 4487 bp, Oryza sativa
atgcaccttaaaccatccacccctccacccattttattacttaccccccccccccccccaagaaaaaagcatttacattcactcgcacctcacagtacatacactatttcacacgcgcacaacactgaaactctagccaatcatcctcactcaaaagatcacaccacggacacaacacttatccactcaacacatagaacactgcacaaatacgccattcacacaacagcacccacccatacatctaaccacatacctaacatcctaactcctaagaaaccaacaaacttaaaccttctttgattagatttacataaaataaaacactaatgcgcattgaccagttgcacataaaaagaaagaacatcaatgacatccctttcggatcctgcacccgacattgtaattcatgtcaatgatacaacaaaaagattgagaggtaccatgagtataatattttcttcagctagttaccctgcactgcattggtatatttgtttaatagagatttcattcagaacaaatcattacaaacaaatcaatgtatgaaattcttacttaattactgaccaattatgcctcctaacacatagggcagcaacaaagtctttcactccgtccgatcctgggccagtctttggatggttccccatgtgtttaatctatccttccacagttcttcgccaagtgtttttaggacgtcccctctttcttttgccttctggtgtccagtggagggcttttcgtgtgatgtcatctatgttctttttcatcatatgttcgatccatctccaccttcttctcatgatgatgttctccatgctgtcccgatggcatttggcatacagtgcttcgtttgaaatgttgtttggcaagaaaatgcgacatattcttctcagactctttgtgtggaagaccgacagcttttgaggtcgttttttgtcattctccaacattcagagccgtacagaagagtggaaaggacacagctctggtacaactttatcttggtcgtgatgctgtactgatgtgatctccatatattattgagcattctgaatgcatttctggctttattaagacagttcctaatgtctttgcctgcgccttcatcgtgcctgacagtgctgtccattgcttgtattggtaagggtcagaaatgttcagggtcatcacctctgttttcttttggctgatcttcaggccaatttctaggcaaaatcactgagtctggatattttttcttgcatatgctggcgggtgtgtgaaagaagagcgagatcatctgcaacgtcgaggtcctcaagtgtagaaaagagggttcatcttatgcctcttttttggtcttcagttgcctgtcttctcacccagtctatggcgatattgaagagcagtgctgatatgacacatccttgcctatctcaatcttcacctggaacttatggttactgtttccaactctgcatgtgaaattgatgtaaaagctcttaattacaagatctagctgctctggtatcccatatttacgtagtattctccaaaggctgtttaggtggatgctatcgaattgctctatgctattacgtagtgcaaatatatggtcagtgcatccttttcctttccgaaaacctgtctgttcccttctgaggctttggtcaacagcatctatggtacgggtaaaaactatctttgccaatattttgcttggtattgacaatagtgtgatgccacgccagttattgcagttttttagtgatcccttctttggtaattttacaataactccctctgaccaatcgtcaggaactgcctttgtttcccatatagttgcgaatagtggcagaaggatttttgctgctaattctgggaccgccttaaaaagttctgcgttgagattgtcagagccggggctttaacattttttaagagatttaattgcagttattacttcttatttagttggtggtatgctgctgacatccaagtcatcctctgcctcttgtatgccagcctctactgtcggtggtggtctattcaaaacctcgctaaattgctcggcccatctagcttcccgttctgcttctgttgtaagaagcctcacctgcttgtcttcactaggtgaatttgtgattcctctttacttgccgctgattattttagtagttgtatatacttttccttgttcgcctttaatggttgcttcctctgcctgatttgcaaggtcttcaacaaaggcacgtttgcttgctcttgtcttcgtctttacgaccatgtttgccactcggtactgaagcttttacctttctttcagtatgtctgattttgcttccatggcttgttttttcgcacccttccgtttatctatggcttgccaagtatcatcagttatccactctttcttttccgtctttgtgactcctagaaatgaatcgctaatatttaagtaggctgtcttaacctgttcttgtaaatacttccgtacaaatacaaatcttcattttgttttcataacacaaataaattattcacaaagcagtgaacaaagaaggaaaataatagaatgaaatcactaaatttgtctaataataataaaacataatgaatttattcattaccatcactcgtgaaaaataacaaaatacaatttgtatacaatgcaccctccgttagtattccctgccacccctcaatcccttcttctaattccccccccccgcaaccattcgcattcacactcacaagctcgcacctcacaaacatacagatattcacacgcgcacgacatttcacacgtcatacctgttcacattcatattcttattcacttttagctcttcccacttttgtaggtgcaaattcaacttgcccacctttactgctaagttttttttcttcctcataaagtccgctatatattcacactggaaggtacatggccttgagccctacaatggaagattctacgaaagaagattacatatttgataaatatgaccaaagaattcacacatttatttatattcaattcaagagttctttattcgctttaaaaagcacatataaaaaaataacaaaaaatatacaatatattctacaaatagtcacattcacaatatatgtaaagacaaaaaaacaacatcaacaacagaatacatgtataacagggtaagatcagagtgtgcataaatacaagataatttcctcgcactcctctcggttaaggaaacccttacataaataatcatccctcgagttgatcaattcctttacttgttcaactattcgtattgtctcatcattcacttggcattgcacagcccactgcttttgaatttcattgttatccatgaagtacttatcattcaagaatcttatgttacctcccaacacagaatgagctccatacctggccattccagctatatgtgccactgtataatttttggaattcatagctttcaaaacaaaagataaacatctttttgcaaaccataactctggatccataacacctgctaaataaggcaaaagatgacagtgtgtctgccatggaattttccaaacccttcttattgcaacccgccattgtctacaaatattatcaaaacatttatcaaacagaggatataactgtgagccatagaaactcgaacaatatttatgaaacaatatatttcttatgtgagagttagcatatttgaaattaaacaaaaacatattacattgtcgattgaaatctccaacacactttgagatatcaaaatcatttatattcttagaaatatcattccctagatgagttacttttgatgcaatatcaatatgtcttccatttatcgtgattcctggatccataactggtttaccattacagctgaaaactattaactgactcttttcagggttaaacaaaatatcaaatttaatggcataatctaaacaagttttaatcatttcttgaagagcagtcacgctaggtgacagcagtgtcaagtcatctgcataaccaaatgctcctgcaaaaacattgcccataaagcaccctatcccattgtcacataactcttctatcagcccatctagatacaaacagaacatgcaaggagagataactccaccctgtttaacaccatttttaactgtaaaataatcagaatatgcattgttccatttcaaccttagcctttgattcttatacatattaagcaatagcctgcatatcattgggcagacccctttgctcagcataatgtcaaacaatttcacataattaactctatcaaatgctttactagcatctagcaataatccatacacattactcccttcatgattaaagtacgatacagtttctttaaccatagcagtacatagtgtagttgataaccctgctttgaaaccaaactgtaggtcattagtctgcaagttcccttcttcccttttcataaatacataatctaaaactttaccaatgatactaccaagtg

SEQ ID NO: 23948 - DNA, 8089 bp, Oryza sativa
  unsure (1)..(8089): unsure at all n locations
ctctgttgaacaaaacagttattaatagtgttagatgtatctacctggaaagctatttcctgctaagcaatattcatgtttatgttaaagtctacaaaatcatatatttgttatttaaccgaaggagtagcattcttcaaactagttggtattgcatgagcaatatcgattatctggagtaattgatttgcattaatcccaagattttggaaataagccaaacgctttatatgtccattatcgaaaatttaatttacagtgcgtatgcctttattaaatagatcataatcaaaaatcattttacgtcttatacatatattatgattatttaatataactggatttacctcctcttcatacaatccatacttcctcatatcctgccaagcctttagcatttcttaataaaatggtggtattttcaatgttaatttggacgtgtcaaggtcacatttaaacagaaatctccctccaactgttctaaaacaaaattgtaaatactattccatccagcacacctatctccatacaataaatatttcagccacatcaaacgttgcgcctttacaaacaatttaaaattcatcatttttaaccctccatgagagtaatccttatacattatctttttctttacgcggtctttacctgcccacaaaaattcaaaattaatgttttccacctaacttaacaaccactgaggaataactttaagtgatgagacatactgtagtttaactttgataatgcatatgtttttaacaattgtattttacccatacgtatgagatctctttgtttccaccatctcaaattttggatgtataatggattttgccttctttttccaataacgtaatcacacacacttacgcacacacgcaaactcgtgcacgcacacgcacgtcccctttaaaacatacaggaccacagtagaatgtgttgtacaagggattggttattttataaaccttacacatatcgtctctgagagagaatcctacgtcatttatatatttacagccctgatagtgggtgcgtgcgtgtaggtgtatgtccagggttgtggagttacatgtaatgtacctgcattatgaaccacaccgttttgcggtattcaacttttatgttcttattttcactatagagtacgactgtcccgcattggggaatcccatacacggctctaaagtcagctctccgcagtacagagtaaacaccaaggtcaattttcgatgcaaccatggttatgagatggttggttccgaagagaggatatgtacgttttctggagagtggacaggagagatgccaagatgcatgggtaagaataacattttacaccccccccctaaaggtaggcgtaccaagtaactctttattacataatttcgaaatgcgcaagtgttcaccgcaccacaaaaaaaatattaactgattaaaaaacacctggtacactaatttacaccccccccccccttaaaaaaatgaaaaagaaatggaaacttccattgtattatactcacgtataaaaaccatctcccggagggcccggaaacgtagttttcaaacttcaaagtgctcggtctgtcatttgacacatcatacgtcaaatttactttgctgctcaggggcgcactggatgggctcttagactgtgtaccattattattacccatgttcggatgatcttgtagcagaaatctcctctgtttaaatttaaggtcgtgatgagttcgacgaactttctcgagtgataaatgggctagggaagaccttcgacgaaatcgtcatcgacggcggctcttgggtgggtcaaaatgacacgagctcgaactcaggtgtgcgaagaaaacgtacaattaatctctcttctggaatggatatctattttgcgtttgatgcgtcgaggagtgttggaattgaaaacttcaagataggcaagaaatttgccaagcttctagtgcgaaaggttagagaagtataaagcaaaaatataagaaagtgaatgtctatgttaaagaggaaaagagttaatagagtttgacaaatctttaaatttctatttttaataacaacttataaacattacctatagaattgtgttaaaatgaattattgaggataaaaaagtcgatcaattgataattttacataattttatgccattgttatataatttattttaaatcaatgggtgaatttgaaatgttccgagtaaacaaaggcatagaaagggcaagattaccatttttcctggcgggaaccctgtatgacacttagtggcttgaaaagggatggactccttttaacctcaaacaggctgaatatccttttttggtttgttcaaaaggaattattatggatttatagcactaaaccttggttaattatggtggctcctaaagggacacgcaaacgcaaaggattggcgtgtatatatatatatatacatgaaacatttttgtcttcttttacgttccaagacgtgacacaaaaatacgtatacctatgcagctttttttggtctttacgttaaagacgtgaaaataacaaaattgacgaatacctatgcaacaatttttgttatttcttacgtccaaaacgtgaatattaaaagagagggacaagcagaattttgtttaagtgagcttaaaggtaatacaaagttttggtaaagggtcatgaattcggttcaaatgaacatattggaagcatatgcgatcctacaatactcagtgatggttgtcgcggttgaaatcgagtctaaagtgattaaattgtaaataaactctttatgttgtatagctccctctcacggtcaagatattaattaagctataaaacaatgtttcttgactaaaattgaccgattagttattctcgtttgaaagttatatatcccaactactgtacatatcctgagattttcatggtcgcagctaccagtgtacggccgtaggcgctatttaaactgtataaacatttaccgggagcaccagtaaatttgtatattcaatttttctcaaaagcagaagtgttttagaggctaaattttctagtgcttatcatacatccgcaggggcatccaaatatatcataattaaaaaaatcactatccaacaaattttcaaaaattcccaaaactttatattacttttaactataccgttcggttcgtctgatgtatgtttagtgaaagtcaggcgcggatccaggggaccgagcgggcccccacccccccccccccatcatctgatggtaattaaattactaaaacccttgagctcattggggctacgccccttaaccccacgccaattagtgtcctgccagtgtcacaaataaggtatcaaaataatgctcatctgaccgtaattaattgcccaaaacccctgaacttccggtggttccgccccctagacccaaccaagggccctaaggcgggcccctggacactcatcagacgataatttaatgcctaaaaccctgagcttctgggggctccatccccggacctcacgccaataagtgtcccgccagtgtcacaaataaggtatcaaaatatgttcatctgaccgtatgtaaatgcctaaaacccctgagctaccgaagggcctaaggcgggcctctgaatgcttatctgaccgttataaaacggcttaaatccctgaacttgtgggggctccgcccctagacccaacgcaaattagtgacctgccagtgtcatgaataaagtatcaaaatatgctcatctgactggaatcaaatgcacataccccctaagatttcgggggggctaagccccttgacccccgacggggcttttccctagacccaacgccaattaacggtacgctctaactaattgtaaatattttagcctccccccacccactttgaaaaacgttcagcagggcctgcatgtaagagtgcggtgatgcggatttttgtctgcccccccccacccaactggtcaccattacgtaccaatagttggctctcataatttcaaatttgggcccccctccccctaagaaatcctggatccgcgcctggtgaaagtaggacatttaaatttcaaaagttgcatcgcaggcaaaaacacacttacaaacatgcatttgtcatcatttattcaaatcattcatatggatgatatttatttaatatgtacattgttttgtgtaccaatagaggccgattgtctctgttttgaagatatgggttgatgaaataatctgattatgaatctaaatatatacatttatttgttgcagcttcaagtgacttcctcgcctggtggaacgcgtgtcggggcagtctcctactcgtctcaagcaagcagattgttcaatgtcaacgattattcgtcttcagaagctgtagttaatgccatcgaaaggcatgtcaattacaaaagtaaatataagcgacgttcagacaagataagaccaactgcctcctatatccgttgctgggcgagaatggcaaaagcatgtgagattgtacaagaataggggtcggggctnaagggnagggcggctggggaggggctggggagggctttgagttcatgcattatgattttgaactcaagggagatgtgagttggtccagcagcacgttcacttggtcagctctgtcttcgcctacaaactggctcatgtaggcaaccccgtttcgagactgagtcaagtcattcggatggtgacgttaaaggtcggcccctatacgtaaaaaaaattatattttattgatatgacacagacacacacacgcgcgcatgcacacgcgcacacacacgcaattttatatgtgcctcgttctatatttttgttgttgttaggggagtgagggggtgatgcttaaagggaaagtccacccccaaaataagtttgtttcgatagaggcagaataataagaaaatcaggtgagtgaaagtttgagcaaattctgaatgaaaataagaaagttatgaattattgaagttgtgatcaatctaatacaaattggcaactctgtgacttatcatacgagctctccttcatttgctttgtgcataatattccataaaatcatgttttcttcgttattgatgacggaatatatatttgttccttgcagggggagtatagaaacatatttgcaattattatatttagggtgcatgtatggttgaaatttttcttgagggaaaatgaaaattttagatttttttagtactgagcaaatggaagttgagctcgcatgatacgtcatagagttgccaatttgtgtttgattgctcacaacttcaaaaatgctaacttccttatttttaatcggaatttgctcaaactttcactgacttgtttctttcatttttctactcctattaaaactaacttaatttcagggtggactttccctttaaagaaatatcttggtgattgctgtgcatgttgtattatcaattgtgtctcgaaacattttaaccaccacccttgcaaagttatgtaatcgaatggaatacttgatacctaaagaagttaagtaaatttttccgtcaaaaaccgatccatcattgacttcaaaaccaaactgattcgatattgatatagaaaatgaatgattaattgaaagaagtataaagaaaggatttcaaaaaatactaaatcttcggctttcttgtgacagataaaggaacgaatttgcccgctgctctcaatgaaatcaaggaaatgattaccggcgaaaccctggaaccatatgggaacagtagcaggaaacgaattatatttatcataacagacggtaagttcatcttaacgagaaggctaaatgttcttgtaaaggtgaaaatgatttattactattcatatattctttctttgtgttaaaacaccatagtgaaaatatcacattaagatattgctcttgaaatacatcttctaaatttgacgagagatagtttgaaactttggataaacatttttgcgccacatgactgtacgtgtgtaccaaaatatgtatgcataggtttgcacggttttgaccttcagcaagattagtcgaattacattcattttgattctgaaacgttacactacacatctattcaactattccttaataataataatagcctaatagtccactccaaattttattaaaccgaaacgaaaattctttttgcccaattgatcgtgagcccggcagccacagatcgacgttgctctatcccttattgttgaacgccaaacaaggtagcaacaactcccatcttttaacgtcttttggtattttgcggccggggttcgaacccacgacctcccggttgtgaggcggacgctctactgactgagccaatactccggtatcattccttatcatctttgtattaatatagccactgccatttgtcctccatttgaagggatagttgagttctgttgcagagggcgatacacgaaataattttgtttgtgagataatgataaactgaatatcaaatttgaaagaacctacaatttaaatgacaaaatcatctttgtttgatcaaaatcggttcagagacggctgaaatatcaataaatataacgatttctactacttgggtaccatcacaaatattagaaaatttgaaaaagccgttgaaaaaacgaaatggcatcttttacgtcgtatttcagccaatgccgatgtcggttttttgttggcattttcgtgatggttatattacgctcaaccagccggcccatgaattgttatttttaattaaataattagttaaaggttatcttatttttgtttaaagtggagctgaattggtataatcgtattgggtaaatttcacacatttggaggtctaaacttaccttcatagcaattgtaggttcttaaaggcgctacaaatgtcttagataagaataagagcaataaccatgcactttgaaggcattagcggtctgaaaacagaacttaactatccctttaatctagagaatcgaattttacaatttcgttgaaatgagggtggttactaacttggatttaaaaaatatatatattccaaagatcagttttcccgaaggattataattcaaataaaaaaaaatgcaatacaaattttccataacaaagggttgatagcctttttattcttgcgcttttcggaggtggattgaaattaaaattaaattagttcgtaattataaagccgaaaaataaaataggttcaatacagtatatttacagataattcataatttgaaaattatgtaatttctatttaatgttcggtgttatgaatcttcgaagaaaaaaaatgccatacgggtcatcacccccccccccctatcatccccaggaaaaaaaatgggagggggtatcctgtgtaaccgttaattataaatcgcaagattcatggctgttgttatctatcaggtttcagtaacgttggtggcgacccatctgaacgcgctcaaccactaaaagaagatttggccgtcaagatacactgcataggaattagccagaacattaataagcaagcacttgccgaaatcgcctctctgcctgtcagcgaacatatatttcctctctcgggttatccggcgctggaacgcgccgtggaagccattacctgtacaaagagatgtgagtaatcccaacaaaagtatttggtccatcaattaccataaagaaaaccaaactgacaacatacaaagaaataaaacaaaatcttggtttataattgaagtagccttgaaataacattttaaaatcatcacgatgatctatcatgttggccgatataggctatattaactgccctcgagtggatttctcgaaattctttgcgatcttgtctgcgtgaagattattgagtaagcctatgtaaaaaaagaagcagaagatagtcttgtgttttcaaagtgccttccatttttatataaattagcattaagacttatattttaagtgtcatattgcctcttaatttacctattctattcacagttctacctctcacttaacctgatgagtaacattaatcaaaccatgggcgtagatctttaattgatacctattgttcggggggggg

SEQ ID NO: 23949 - DNA, 3939 bp, Oryza sativa
cccccccccccgaacaataggtattacgtaaggattgacgcccatgaatcaaactcgtaaaaggttgtccgcttttattatccggcacgctttgcttgtcgttgttgttttactatgtttctgcttttacttttaatttgttctctttaactgactggagattcgaattcgattttgtaaatttctagcactttgcaactccatgagcacgctttcatgggcagaaaaagagaggcccctttttaaaaaatcgggtctattgaccgcctccacttcccaggactaaatctgccctaaactctcaaccaagtacaaatgtaatgttgcatatggcgaattcttggaaatgaaaaacgagtgaaaatactcgtttttcatttccaagaattcgtcacatgccaaaaaaaatagatataaagtatattataccttatatctatttgttgttacttcatttatttgcatagtcatttatgtatattcattcatttcttcattcatttcttcattctatttatatgtttacttatttttttatttttttttcgggggggggggggttatttatttattcataaagtttttcattcactttgcctatttattccagggttttaaaaaaacgtgatcttataaaatctaaatcgcaatttttacacttacacaattttgttgcaaggttgttttttgttgttgtaaaaatcaaggacgtgtgcgattaaaacttgtacgcgtacctgaagtcatgagcactggcgtacagatgggggtgcaaaaaagacctcaaacgaggtttatttcaaaaattcaataccagtgatttacaaatgctgaaatgacatgattttccgggatttttttgtaaattatacttttgtatgcgtttgttggaaaataacaaattcccaaattctaagtcaggccaaaaaatatgcttatttagaagcctacatgtaagggcccgtggaacggcggggctcagggggctcgagccccctcactttttaacttgggaaatggaccaaagacaatagcatgaaactgaaccctagcaaatgtgtcatcatgagcattcagttcattagaaaccaggcaaccgtcccaaaagtaaaattggtgacctggaaataagtgaagtacaactagttataagcttttgggtgtgtttgtacaggaggacttaaaatggacatatcatgtcacagaaatggtcaaggcggcaaagcatgaggctacacaatgatgcgtatcttgaaagattttcggctacctgttgaggatctgaaagttgtgtattgttcgtacgtgcgcccgaaagtcgaatactgcgcacctgtttgccattcaggtttgactcgggcagacaagaaactgatggagagaatttagaaacgagcgtgtctcctcatgcttggccaaagatacacgagttatgatgatgccttcaatgttcttgaccttccctcactggaggggaggagggaaaggttaacaaagaaatttgcgagtaacctcacaaaggaaacgtcccccttctatcactggctcccccctacgcgagcttcccgcacttcccgcgacctgcgcaacgctaaagactattcagaaataaaatgcaaaaatgagcgctacataaagagcgcactccccttcattgtgaggttgcacaattcaaaactggaataatgtaaaaacagatctcttgttcataaatgctgagcatatacgtaaatcaaattgttatctaatagatgtgcttgaatgaaaaattatattgtttactgaaggtttactgattgtttatacggattatattaatttcaatattgcattaccaaccatattctctattagccaataatagaaagtgaaactatattttcactctccattcgtattaggttaattatatgtccattttgttctccatatacatgaaccttgcacccacatgacaataggcctacatttaaaaaaaaatggttgcgtccatgtcatgctaaaaggcatcaaatcatgccaagcatatcttcacttatatatcttttgtatgtttcgtaaggaatattgtacatcaaagggcaggaatacatatcatattattattaagaacgcctacacttatttttttttctgggggggggggggggtgttctttcaactgtaaagtaacctattattggaattaagataccggtagttttcgtacatgtataagaggacttacttgacggtcaaattttaatacgaataacattaggaaagataaaagaaaagtttaaagaaagttaaaaacaaaaaataacataagcgaagcgaaagaaaggatacatgaataaaaataaagaaatgcatggggaattatccaagaaaagatgaacggacggagaaaaagagctgtaaatctgtattgaaacggtcatagaagaacgaaaaggatgaaaactcaataggagatttcagtgtggtgctgttgcatcaatgtatgcattggcctaggttttagctatatcaacaacaaaatcttaaattaaacgatatagtatattagtagcacaaatctgtgcaaaagaaggaaaatatgaacacatatgtgaatggaagtgattgaaatcaccgatttcaaaacaattttttttttttttaaatcacgatttagatctcgtcaaccctgattcattaaattctttaattattcatatgtggtttcaatattccatagcttacgaggaatgtggagagtcaaaacacctgtcggggacgtctcgcattgttggtggtaatagagccggttcaggggattggccgtggcaggcagccctttacgataaagacacagacgaagtaagaataccttttattaacgatattatcttcgtcggcgaggggatatagtaacgctgccgtccgtctgtaacaaatctggtttccgtttgataactttagtaatgattgacggattttaatgaaattttatatgaaggtacatggtataaaaacacatcctaagttcgatttcggagtttgtatgtcaaaagtcaaaggtcatagctcattagatagcctatgcgaaaaaagctaatcgtgtattcgaaaatttgatttccgttcgataactttagtaacgtttgacggattgacgtggaggtacatggtatcaaaatacaggccaagttcgatttagtagtatttaggagtttttggagtatttaggtcaaaggtcaaaggtcatatctcactaaatgtgcgaaaatacgaaattatatttgcgaagatgtggttttcattcaataacgtaagttatgttgttgagtatgtacgtgaaatgtcaaagctcacagctcattaaatatgtaaagaatcgctaattatgtacatgataaatagctacaataattatgtatgcaaaaatgtggtttccgtttgataacttaagtaatgttgggcggattttgatagaatttctaacgtttattggccatttttacccggcgtggggatgctacgctttgcgttgacttgttagttggttgcaaaggtgagtggatctttgttttagacttatgccactatgtgatttgtttgagtttaaaatgaggacagttgcatgagttcttcttccccactttcttattcaaggcaaagacgcaggcagataagaatattgatgaatggcaagttagcatgcaccagcgcacggtggatttgatgacagtgttcaccagattcccttttcggtatttggccctggcttactgtgcggcatggctcccacttagccgagtttgaacctcgagttgtggcgagctggcgcgatcttatggcaagccgttttattattaatttatatcaataaatcaattcttgttatcaagaaataactttatgttgtaaagcaatggtaattcttgataacaagaattcgatttcgtgatatta

SEQ ID NO: 23950 - DNA, 9015 bp, Oryza sativa
cccccacacacacacagtttttaaagtctttaaagtctttatagggttaaagacttaagacctgagttttatggcacctattaactgtaccttaaatcaaattttattagagtttccttcctttagaaaagaggaaaaagcatatggacaatctgaacacgcatgcatatgttgcctccttcattactgctttctttcgcacaatgtatattaccttgaaaatttgagcagtgttttgtccccctcctggtccgcatcctgtgtcatagctcctcatccaatcatacatctgtaaaaataatttccttttaaagcttacttttagataaaatacatgatttttgacatctaaacttgattttatttttttcttacaaactgtacgagcatttggcaagtaagggtgaaaatattgtgtatacatggcacctgtattttaagcattccacactgtatatagtagcactggcatacattcaacagatctctacaagttttgtaatacatgtaataataaataataatggtggcttcttataaagcgcaccagggacccgtttcacaaagcattttttcaatgacaaattacacaaatttgtgacaaatctgctgataaccaatcagaggcaaggattccattagcttataacaaaggctgtcatttgtcactggtgacaagttttgtgaaacggggcccaggtccgtcccgtcaagtttgacgctcatatggcgcttatgacgcgtgttaattgtttgccattcttgatttacatgtacatgtatgcatttaaaatgagcaaatcgtttgttcagagttagaaaggcatttttttagctctgttttgaaatataggagttaatgcccctctggctccaaacagacaaacatgtatcctttgtggaaataaatcctgaaaatgtggcggttggtgtgtatggcgcgacttcattttcgagaacacacattgctcactcgtatgcgtcatcaattataatccacaaagggtgattcacaattactacatctgtaataaaacaggcagggcaatgtctgccactgagaccaggaataattgaaagtttaaattcaaccacgcatgactattgaagaggtagttgttcttgtcattcatggaaattatatgaaagcacaacaatgttaaaaattagagcaaaggctaaaaaaaccaagggattttagttgcaggccttcgttacaagattccttagattcagaaaaaggattttggaaaaaaaaggtctatgagcacttatcatttaattacaagttaccccctaccagaaatattagcaataacactgaagaaaaaaaagttcaacattttgatgtttttttcctaaaggcccggtcacacagaggggacgcatgggggacgcacggccggcgcatggaaaatttgcgattttggccagtgcgttgtcgttcgctaggcgtgcgtcatcactcgttactcgttcgtcgagcgcgctggacccacgctatgcattcgtcgtcattcgctgtgtgcgtcgggatttttttagcatgctcaaaagtgtgcgcggagctcgacgcatgaatgtacacgccaaaggcacgccagacgtgcgttaagcgcgctagaccagcgccagacatacgcggagcacacgccctgtatacgcacagcgcgctagctacacgctgtgcattttgtgtcagctcgctagcttttccaaaatcatgacaaatgttaggcacacggcctttccgatttccaatgcgctggccgtgcgtcgtagaacagggctttgcaacttctcacaaaatctaaggctgacataaaaacttgcatgaagcttattggatgattgcactttctctgtgtaaaaagatgacaacattttatcttttttaaacttcacctttgttacttatttgaaatgatttgtactctaatctggttcaaagtcaaaagcttaagtctggcgagtttgagtctggtttggtttccaagctacatgtactgcaccggtttctgacatgtatgtctttatacattcaagctataaatcagtttatgaaatgatattaatctagactgacctttcgtttgcccattcggtccttgtttcttagcagatagacagctttgtcaacagctagaaggccaacataggagttgttaggtgcagtaacttctacccgtatctccccattgggttcataaacggtacgttcaggtcctacatgccttggaagaatctccagggaaacctgtaaatgttcattcaaaggaaaaccaagatggcttgatttgactttcgtattaatgtttacaaccacttagttcatgattaaagtagatgtgtcgtggtctagtgattaagtcgccggactgtgaaccacagggaacggggttcgaatccctgcaacagcactggtgtcctttggcaagaaattaatctacatttgccacactcgaccaatttacctcgacccgtgtgaggtaaatgggtatcttgcaggaattaattccttgaaatgctagagcatcacagccgccatgctaaagccggggtgatattgtggagcgtcaggatcgagtgtaaagtttgacagccatgagtgaaaaaagaacccattattatcattattattataatcatgatcattatttgtgtaactgatcaacagatatgttgataaagttttggcaatggaaaacaattattttatattttatatacatatactgtgagtcaaacctgcttcaacgataacctgtatagaaagaccacattttgtatttcccttatatgggtttctcattgaaacatgtactaaaggaacctgtatatagagaccacctgcctataacgaccacttttcttgtctcccttgggtggcctttatagacaggtttcactgtcaataaactcccatgtacatgcacatgtatatattgcatatatgttcctcatattccgtacatgaagctacagtacgtacatgtacatcgtatgttcacaggtagtcattttgtatttatactacagtttacactcatggctccagaattatcaagcacagttaaaattgaaatttgtcatgacgtagttaacaaggatatggtttgcttcactttacgttttttttgtttgttaatcttttgttttgtttttatggctctctcattggtaggcctacattatattaaaaatggggttagtttgaaaaaaatgaaacggtttctgaatacttgccaaatcaaagaagagagaaaaattctcaaaattggctctagagtcattaatcacaattatactataaatttatcctgatgaattgaaacatgaaaatgtatttattttaataatttttgtgtgaggctctctcactggtaatccttgatacaaggggatggtttgaaaaactgagacaataaaatgtttgcaaaaggttgtacatacttgttcatgtaaactaaactagaatttaattcgtcactttgacgaattaggtgagacgtagttatgctcatgtgtaacataatgaagaacgcattttcacgatttcatctttcgttataaaatacaactcccattatggtctatccatgagtcaagtttcaactgtgtagggcagagggagacagagcaatataataagagggaggcaagatagagagagggggaggggtgaaagagtagagagagagagggagagagagggggagagggtgaatgagtagagagagagatatagatagatgcagagacagaccaaaaagggagaggggcagaacatgagaggagaagggaaacagagcaagagagagatgcaattgagaacaatgctttccatatttctagcataaagctcttgtgaatactgatcttgaaagtgttgccgataataaaaaaaaaaattatgttcatgaatacgatgatgacgatattagaatgaaggccatgactgcaagtggcacagcgcccccttcaggttttgatagaagattaaactgtttacctatactaaacaagctcaaaacacttttttataaatattacaaaatgtacatagtgatttatttagttctgatttaatatagaatatgagtgagatattaatattttacccatccataacccatccatttgcccaaacaatgttgcaataactaagaaacggtaatataagtgtattgtataacataacgagaacagattgaggcaaagtatggcggagtttggtgatgacaccagtatttctagaccctatcttattaatatgagatatatgtgttttccaggataagtttcgtcaataagaatagacaagaacttggtattggcaacacgattatccagtcataacgtaacaaatcctttttgaaaacattaagagatgtatcattgataatacgagtattatatacagaaattttataaatagaaaactgtttttgtgttatttgaaatattggaaaattataagatatatcattataaaacaaacaagaagaaacattcaaatcaaagttatttgtaaatatattatcaatgagggatattgatctgtcagtctttctcaaaggcttatcaattaaaggaattttaaaaaaaatgtattgcgctcaagaaataacatacagcattgccagtaaatttcacgagatcaatgttaaaatctcccattatataaacctgtttatgttcagtataagttttgtgtaaaacattttcaaagagagggatgaaatcattgatatttgattgaggtttcctatatatgacacctacaataatattcttatgtcacgacaagttgctttcaataaacagtgattcataattgtatgatgggtataatataaatatatcattgcgtatttcatattcaaaattgtcagcgaccaatagactaacacttccactctttcctatacttggcgattagaatgtataaatgaataaccagacacattgaataatagtggcgtactgttattaatccaagtttcagagaaatctatacataaagtacagatgaaattggatatagcattaaaatgtatgtttaaaatgtaaaatactaaaatgatagtcaatgttactgaattcagtcgtaaaatcctcctcagtataatatttacagttcagaaacctactgaaattaaattatcttctttttcggataaatagtttaaatcattgatatcagtatgagtatttgtagtgttactaccaaatttgaatgaagttcgtcattattcaagtcttgaaaaggaaatgaagaatgattacagagtgggttattaatggagacaaatgctcatgtttcctataacgctcattttatgtattttatgtcttgaaagtaaaagggtttccttacataatttgaaaacgagaacactgctaacgtttaacccattgcttactggaacctggtggtccctgtgttaagcctatgggacctatataattcagtagtcaacgggttaagtttcacaaataggacatacgtgacatattcatcaattcaacattcaactgaaaattgtgacatgatcttatcatctgatcaaaaaactaaaacgttttgatagcccatggtctcagctataacataccaaaatctgggagaaaagaaagcacaaatgagcaagataaacggtgctcaaagatgaatgtcatgtagattcatgatgtgaacaaaattcaccttccattgacataacacgcaaatgaagaaaattctgacatgtggccttcaattgaattttgtactatgatgacgtcattaaaatgaaatttagttatattgatcttgtagacaattgcctcgactacaatatattagaatgtagaagaaaattggtgaatattgagagaaatacactaatttttccataaatataatgacgtcataatatgcaatttggtatatttgacttccaaggccattatgatgacgtcaagatgtacttaatggccgaatgagatatgaaatcatacctccgactcatactctatctaaatatgaaaaaaaaaatggcagtccttattcatcccaatggactttttataggcttgtttttgcccatatatgctatgtattgcaaaaatcgcgcgtacggacggttatcttgaacggacgctcatttcgttattaataataataataataataaatttatatagcgcagcttttatacaaaatatattcagctgcgctggttaagagctcctttttactaaattctacaaaataagatcactcagttgaacaaataagtttttaaattggatttaaaaacattgagtatggagtgcttcttatttctattggcaagctattccatagtttgggggcagcaatagcaaaagcacggtccccaagagttactttagttttgccatggggaatctgaaacaataatttatctgtggaactgcgcaggctacgactgtgtgattggactttgagttgtagtaattctttgatgtaactaggggcttgaccgctcaatgatttatagacgattaacaatattttgaatgagattctttgacggactggcaaccaatggagttctctcagaagaggtgcggttgaagtgaatttcgaccgacgatagacaagtcttgcacatgcattttgtactctttgtaacttagctatcagagaatcaggcattccaaacagcaacccgttacaataatcaagcttacttgtgataagagcgtgtacaaccaatttcatacttccttgatcaaaatatttgcggatacgtctgagattgtacagaagatagtatgttgatttgcatatatttttaacatgtgtttccatggttaaattagtatcaaagtatactcctaaattccttgctgtaacagagggtatcacattggaggatccaactcttacaccgtcaatgcttatttttgagatctgttgtggagttcctataaccaaaaattcactcttactatcgtttagcttaagattattgttaagcatccatctatgaataaaattaacacatttttccaacattgaaacacttgcatcttgagtactagtggatggtctaaaggataaaaataattgtgtgtcgtctgcataacagtgacaggagacttcaggaaaattatcctgagtgctcttgattagattacttgtgtataacataaaaagcaaagggccgagccgagagccctgtggcacaccaaagggcacctggaaagagtcagagacaatgccatcaattttaactttttgatgtcgatcagacaagtatgactcgatccagccgagagcaacaccgtcgacaccgcagcatatcttcaagatatctagtaatctggaatgctcaatagtgtcaaaggcactactcaagtcaagtaataacaggagagtgattttctgtctgtccattgcaatcagaatatcactcttgatcctgagtagtgccgtttctgtactatgaaactgtctatatgcagactgattggatggaaggagtgaattactgttaagaaactgtaaaatctgttgtgtggctgcaccttctaccaatttagaaatgtattgtaggttacttatgggtctaagattaccaaattcaacatcaagccctggttttttcaacaatggtgaaacaagtgagactttccattctttaggaaagtggcccgtagacaaggagacattgatcatggatgtgaacacaggtagtataacatcaatatattgcagagagcagcataagcatgtacatgctcgtgcgctcaacccaatcaatattaatagtgatgaagagataaacatggtttcaaattgttcggaaaagtatgaggaatattctgtcaaaagtttttgcggaggaattgtttttcgttcggccgtgacgaacgaaaacgtgcaaaaatgcgtgttttgcgtgatattttatgaaatgcttataatggcctaaaacgtatgcaaaacaaatttaagacgattttgagcaacttaaaattgtaagcgcacgcacatttttgcgcgcatttattgatcggaaattgaccggacaaatattgaccttgatcgtgataagtatgaaggagaaatggctttcttttatgaagatatggtcatgagttgattttcacaaaatggcgcctagatgacgtcatgatgatcttgattcactgaaaagtcacgcagttctaagttagactgggatctaccatcatagcaagtttcatgacaaaccggggtttattcattcttgagatttcttgcgaacaaattcgagtaagaataataataatttttggtgaataatacaaatcttgacgaaatctatagttgatacgtatacttcgtacgtatgacctaattaaaaaagaggaatatgctcaaaattggctctagagttagcaatcacagttaaactgttattgagttctatatgcaacttttttttaatagcagtcttacctcttggttttgtctgcactgttcttccacacctaaaaggagagagtcggcaataacgctgccatccatagtgacatagtagacaatcagtcgcattcgtggaaccatgttggatctgattgttatgggcaggtttgtaccaaatgcacttatgcgttgctgaactccctgcagaacaatcttgccacctgtaatgcactgcaaacaaacatttaagtttaagttgagttttagccatgcaactgcaatgtgaaaaaaaaaactgtggacgcaattggaaaggttgatcgtgtagcacaaaaatattgtgaggtttaggaataaataaaatgataattaattggtcacatgcaacaaatactataaagtgtatatgggactacacaaatatgtggcatgaatgatgtggtgtacattcttgagatcttatgggtcatatttcaaatatgagggggggggggggggggggtaagagcacatttttttttgggggggggtccaatttttgagagaaaattttacaaccacttagccggccg

SEQ ID NO: 23951 - DNA, 1772 bp, Oryza sativa
attcctgcagcccatctagagcattactcatcatagcagacattaaatcaaaataatcaactgaagagttcggtggacggtacataacacaaattaaaaatgatttcacgttccgtaccttggtttttatccaaatagtttctaagtttaacccaagatctttcacatgttgaaagtggagggtgttcttcaaataaatcatcacgcccccaccatgcctacttctatctttccttagtaaatcataaccatcaatatgcagttcgttgtcactaaccgtgttatcacaatgagtctcagtaaggccaatgatgtcgaagggagaatttcttaacaaataccttaggtcttcaagtttatttggtaaggaattaacattcaaatgacacatacgtaatcctcgttttgaaataactggtatacttccatcatcagaaagttcaagataggcttcttgattgctattactgtctgcattgtcactatttcgaactgaatcacttgatcgattgaagtcatcaatgtcttcatgactattgtctaatctatgtgactcttgaggagtctccgggctgtttgtagacaatctagccagtctcgtgggaaaacacggtcggacgctttcttgcggaatttcgctttgctcatcatctgaaaagacggagcatcaggatattgagattggagccgaggatattcgttatccaaactagccggaccagaaacataaacagtagttgatggaaactggtcacgatgaaacgcagggcgggatcctcgaagatatgcgatgatattctgtgccaatacacgtactccgtagccgtttaagtgtacgccatcagcggcgagatgtgtgtcaggagtgatgttttcattgtccacgactccccagctgcggcgattggctagaagtttcaacatttcattgacactgcgcactttctcgaaatcgcttgctgattctccgcgacgatggattattgtcgagacacttattttcttggctggtgtcagtttgacaatttgttctgccagggactcaataatgtagtccaaccaaccataatttgtatacgaattatttcgttaacttagtcagcatcatagctgtatattttaatgcaggcgcagagctaggatcttattttagggaggggcggtagtgagcaagcgaatcatctaaacagcgcgcaaagcacgctcattaaagtgacttggtaacattgtcgaaggttgatgaaaaaaattgcttaatttttgtatataatgttattccttttactgtactaaccctctgacaggcaaaaaatcctgaaaaaaaaattctcaaaccacgaagatatctatggttttctttgaaaaggtcgatgtatgacaccctctaacagtgattaacagtaaattctcccaaccatttttgaattttcccaaccgtttttccatgaaaaaaagacataaaacaggctataaaaaatctgtcaacacttaaatgtctggaatggaatgtaaagttattttattgctttgtgacgatttccattcacctaaaatgtaattaaattctaataatatagttgggagaattaagggatcaatcagatcatttttttcgctatttgtaccataaatattggtccgttttcaatcaaattttcagattatctttgattgcagatctggcattgaagaagtgacaaccttagcaccactatctctcaacttaacaatgttaccaagtccctttatagggtgtgtgggtaataggcctc

SEQ ID NO: 23952 - DNA, 27255 bp, Oryza sativa
atttgtgaattgtcatctgcataattgtcaataggtctttgcccacatgttacctcaaggataaaaatgccaaaagcatacacatctgttagaggtgttgccttaccggtacgtgcgagctctggagctaggtatcccatagtaccgactacatgcgttgtttgcgggtctgctccatggtcatataactttgcaaggccaaaatcacctaggcgaccgttcatttcaccatcaaggagcacattacttgctttaacatcacggtggatgacaattttttcccacctatcatgaaggtaaaacaagccagatgcaacacctttgatgatttgaaacctctgagcccaatcaagcgtaggtttgctatcttcgcagtacaagtacttatcaagactaccattcggcatatattcatataccaataatagttcaccttttctcctgcaataaccaagtaactgcacgagattgcgatgtcgaaggcggccgatactaacaatctcagcgataaactccttcattccttgctttgaatcatgggacacccttttcacagcaacatgcaacttagaagttggaagcacacctttatacaccttcccaaatcctcctagaccaagtagattcctattcttaaatccgtctgtagcatgaaacagatccttatatgagaagcggtgtggcccaaactcagcctcccaatcttcatgtagctcagcgtacctcattcgcctccgtaccaaaagaacaatggtggttcccactatgagaatgaatgttgctgtggcaattggtagaatgatctctagtagtttagtccgtggttttgggctaacacgaggtagttttggtaatttggataagtcaatggctggggcaggacggtttatacccaagctcaatccgagcacacaatataatgtgttgattggaccagttgaagctgagaagccgatataggatggttcttctagcacaagtgagaggttatgaatttctgacaacagtggcctcaatggtttgcctacctcaatgggagccatggtcaccttgatctgtgtggtgtcttcgttgtagtcaacccatacttgcattggcttgtagctacagagggacaaattgttgaagatactcttgttatcactatagaaaccagctggccgagattgaactgaggtgagattgttgatgtcgatgccaacgtggttgtcgtcgatgtcgtggaactcggtattttggctactatcaagctcgactgcaaaaatgtggttgcttgcttttccatctgatgttttgttgagtagacccaagtattgggagtcctgagcacttgacatatcactggttggagagatcacgaaagtcatgccatcggtacatttttcattagagtagacaggaatcatgccaaacacaaagttaattgagaaggattgcaccgtcccgttgggcgtcttcctgaattgccatggagttgggtagaacgcatggcctttgatgtggacggtgcgattggtcagctcaagaaccccatcatctgtaactgttgctgcaccatcaagggtgaggtttctgccggagaagcccgaatagacgaactggtcctcgctcatggtgatggcaaggtttagggctagggcgatgaagggtaaaaggagggacagatgctccatatgaggtatgtttgctacttgtaaaacctcaacaagagcagaattggaaatggggtgttctcctagaccttgaggcttgagaggtgctttgtgttgttactctactttcaagtacatgatttatttgtattatgagcaattcttgaccggtcatgcctccgacgcacaagtcaattgtctatgtagttttttcaagtttgtcattgtcttcaaacgatctaggctgcgagcctttcatgaaagccaagtcatttgtctacactgagaaattatttgttcaatcatctatgtgaaattaatttaggaaatatttttacagagtactatcaagtttctgaatttcccatgttgtatgtctgaacaacttaaagtgttaactctttagcattcaaatatatcagtttattgctacaaaattccagatgaaaataattatgcctcctttttgtataacatgactggctttggcatatcttatttctaaatgatatatcaaataccaaaagaacatttactagtagaagtgaaggaaaagatcataactagctatttgaatatactatgtagcagagcattctagaaagaaataagatgcatacaacactattcacttaagaatcggacaacattctacatgtcaacaatatttttttttcaatcgctccactttcattttgaactgatcaagtcagttttgctcctatgttttggcattccctttgttgaatggagctattcctagctatagtcaaggtaggaaaaacttcagtagaattatgtggtttagttaagctcagctccattcagaagattccttctgtcactgccggccaaattcagtttgttatatttggtcaattttgtgtacacacctggcgttcaatttagttttcactatggtacagaagattccttcgtcactgccggccaaattcagtttgttatatatttcgtcaattttgtgtacacctggcgttcaatttagttttcactatggtacatttgtcaattgaaggacaataattcctgtccacatggaacagtggatgtggaatatattgtatggatgggatcttttttttgtttgctttttttttttggttggtagatttttttttaattgttatagatagcttgtggtcagggatatgcgcaatatttactggtgttgtagaattctaacagtcaaaatcaaaatctgtagaattgctatccttctaatatattcggcaattcttttgccgcttccactttaaaaaaacctgtagaattaccattcaactactctgtaaatttttaatgctcaaagtcaaaatcaaactcttattctcatctaatggttgtagaaacttgcagtcctgagatgaggcatcaataaaaattcacctgaataggacaggcatggacaatttatggaaaattgaaggaaattctcttctcatgatgcaactggtgacactgatgcttggtaaccatcattattgaacagtcaccatggcaggccaagcttgctcgatcaacatccaagtcatactggtgctgggttgtaactacttaccacccataaccattttttaaagaaattaaattcaaatagttttgttttaccatttgatgtatttttataaaatttaaacttctgggcgttgcctgtcggtattctctaagaaaataaatttgaatatccgtctgataaaaccagtaaaccacctggcggttgcgggactggcagtgtttgccaagatttatagcaaaatccatatagtaatgatgaaaacttataaattttcattaattaagggaaatggagaaggatatgctacttattttggtgggaatagattatgatatatgctgtaaaatataagaggaaaatgctcttatattactccctgaattcactttacaaaagataataagagttcaatctaatagcaccgaacaactagattgagtaccaatggtctagatctaatgtcctcagcctatttccgttacaccatcctctctctcatgctcccaatatttgatcacatccttccttcatcccccttgtgattcctgagataagctcaatgggcactatgtatatttatagcatttatcactggcttacaagttacaactctggtacttaaatagcagtggtatcagccactatttgcaaccaaatcacagtagcagctgctatcgagggcacatgggcaggatacacagaggattactttagtggcagtgtgttgtgaagtgtataatgtacatgcttgcatccaaggactcgcaaaaccaacattagaaaaaatttcaagaaacaagggatatgattgatgaaactgaacggtaaagggaacccttaaaatgtatcacaattttatccgctttactgataagagcaacccattacatttacatcagaatacaggctacaagtgcacagctagtgaaagccattaagcaagaacattgaatcaagccatgggcatcatcttccttctagtgagaagctagatgttgagccaaagcttgtcatcattggagatggatacaaagacatagcagatgggtcgtaaccttcattttgcttttgtatcaatgctaacatgtcaaagctgaagtgctccggtttaagctctggtagtggcacatccccatcgagatattgcataacttgtcgcacattgggcctaacattaggaaatgggtgcgaacacatcaatcccagctttagtacaagacatgcttctcctatatcatagttaccttggatcttgatatccattgtatcaagaagtgatcctttgtgccagttctgaagcacccaatcaaccaagataagttgtctgccttggagtcttccttgataggcttttgcccacaagtaacctcaagaataaatatgccaaatgagaagacatcagtaagagtggttgcctttcctctgtgtactagctctggagctaggtatcctatcgtgccaacaacatgtgtggtttgtgggtcagttccatggtcatataatcttgcaagaccgaaatctcccagtcgtccattcagttgtttgtcgagaagcacattgcttgccttgacatcacgatgaatgacaactttatcccattcttcatggaggtagagcaaaccagatgcaatgtctttgataatttgaaacctttgtccccaatttaaagttggtttgccctcttgtcgatgcaagtatttgtctagacttccatttgccatgtagtcatacacaagaagaagttcaccttttctcctacaatatccaagcaatttcacaacattgcggtgttgaagatggcctatacttacaacttcagcgacaaattcttttataccttgcttcgattcatacgaaacccgctttatagcaacctctagtctagagttaggaagcacccctttgtacacccttccaaacccacctgtgcctaccaagtttttgttcttaaatcctttagtggcatcaaataaatctttgtaagcgaaacggtgcgggccatactcaacctcccaatcttcacgtacctccttataccttaaatgtctcctcacgagtaaaacaatagcaacaccaatagctagtacgaatattgctgatctattggtagaacaatctctaagagtttggattgaggtcttggactaagattaggcagtttaggtagctttgtggggtcaatgattggagcaggaatattcagcccaaaactccaaccaagaacatagtgatgtcctgtgcttaagcctgttgaggatgagaagccaaggtatgcttgatctgttagcactgttgagaggttatggactacagagagtagtggtctcttaggtcttccaataccaagaggagctaatgtcacatcaatttgtgtggcattcccatcatactctacccaaacttgcattggtttatctccaatgaggctcacgtttgtgagcgcgccattgttgtcattatagaagccgacataagaggatcttactgagttgagactgttgatatcaatcccgacatgattattgtcgatgtccccgaactcatcattcctaatggtatcaagctcaattgcaaagaggtgattggtcgaactgccattgtttatatcattaagaagacccaaaaattggattggaaaggcagtggagaaatcattgcttggggcaatgaagaaagcaaatccatggcctcttatatcaccaaatgaagagagaataccaaatacaaaggagacagagaaagattgcaccgtgccattgggggacttgcggaagcatagcggagctgggtgagatgcatggcctttgatccggaatgtatcatttgtcagcccaagaaggccggtggctgtgatttttgctgcaccatctagagttagattgctaccggtgaagccggtgtagatgaattggtcatgatctccactagcactgatggctaaaaggctaatgcttatggtaaggaagaggatgataggcaaagtatactgcttcatgctagctagacatatacagttgtgacaaattggttaatgtaaatatgtcttgcattgcatccatttatagggttcacatctcgcaagctaggttgtggcctagtcagttggagcatgtccatctcagcatggaaaattctaggattcaggctaaagacatggtagaagcagccggtaatttacatgtcttggctaccatgaagtccaacaacatcgacatcaggtgtttgctattttctcggaggaaaaagtcgcatcactcccatcttgaaaaatgaagatttcactttcagactatatgatgccagcatagactatattattgcaggtgaagaaatagaccgtagtttacaagtcgtgagatccttttctttactctcacaatgttagttttgtataatctttgtaagtacattcaacatccctattattaggactttctgttattataataggatttatacatgatattatatggagtatacattagtttgactttgaattgttcttagaactcagaagaaaactttgaatgcagccttttgaaaatgctaacgatttgcattaaggctacattcagaaggctcttataatgcaaataatgcaaatagttagcattttcagctgtgttcggctcttacactttctcaacatctattttgtgaaatcattatcatgattaatatttatgatgaataattggctatgcaaatgatttaatcaaagaattggtttgagaatttgtgtgaatgttggtgtgagtgcgtgtgactaatgtgggtcaggttgtgatatctgtgcccagaaacggttgttttgtctgattatgtgcaggtgacttgaggtcagccttggtcaatggtgaggaccgggactatgttcagggaggaacagaggtctagtgcggtcgggataccatgtgagaaggtgactagagtcaggattcttggaggtcaacttcggtcaacggtggggatcgtgactaaactcaaggaggagttgaggtccagacggtcaaggataccgggtgacgaagttggatacgatatggcacacggtggatggacatcgtgtgggagagatttttgcaacgggcttcacgaggtgtgcgtgcaagcgtcggtgtttgcgaaggagattggtgtgagaaattgaggaagagtatatggtgctacagtacatgtggtgctgtagcatgcatatatgtgtgtgcagtacgtgtatgtgtatgcgtattgtgtgggctagcaggcatgtatgtacgtgtggttgtacatgtgcagctagttggttagcatgcatgtgatgcatgcgtgtgttgatgagattggttgagcaggccgaagcagccgcggcgtggacgtgtgttggctcggtggtgacaagccgactcggctcaggcagcaagcagcagcagcgtagcaggaggaggagtccggctcggttggcggctgaagtttgggctgtgcgagttttggtaaattgtaaaaggtttggaaattgtggattgagtcctactgtgaataggagttctacacctactttgagtaggggtttttgtggtataaatagagagggagcgtgaggcttcccggtatcgcttttcagagcgtggagttgatagtttagttagggtttcgagtttagtcgagatttttgtaaggagtgctgttgttgcacttcgtaaacacagagagaagcaataaagttgtcatctactttgagagtttttcgatttgtgtttcaccgggtttcggcggtataaccaggcaattcaccggcggtcagactggcagcaaggcggcggtcagaccggcgggagcaaggcggttcgaccggcggcgtgcaaacggttcgactggcggcggcgacaggactacgttgagattttcatcgatttgagggtaacttttatttccgctaaaagttttgggtttttggttttccctaccattcacccccttctggtaggcttggtttcttgtgttcgattcttcactattcccacgttttccacacatgttttccaaagtgctaaatatgtggttttgttttaaaaaaaatctatagaaatattgttttaaaaaaaaatcatattaatctatttttataaaaaaaagctaatacttaattaaaatatgttaatgagtcactctattttacgcacacgagggattagtttccaactgtaaagccgaacacagcaaaagctatcaacctgagaggtttatcagtgtgctctgtaaatttttgcgccaaggtacaaaattattgtaaaaagaaaacctctaaatagtgcaaaggagatgggacagggggtagtggcgcagggcagggggacttatattacggaatgcacatttcttcccggtgcaaaacagaactttggaaattttgtaaacttctaaccaaaataagttaaaattttgattcgatttgaatgaaatttgctaaattcattttttatcatgtaaaaggaatatttcggtcaaagcaatatcgtaccatgggacgatatacctagatatagatggccatggcccgaggcccgatggcccgcccaaggtctggtgattttggcccagcccaggcacggcacgggtcgggcctgtgcctgtccagcccaacagtcgtgacgtgcctagactgctacctcggcatgttgggccagttcagggatacaaaactaacttattctcaaccatatgtaaggcacgtcacaaagaatagagagcaaaaatagacttattatatggcacaatccaagagtagaggcgtaaaatagacttatttttaactatatatatgtcacaacacaaagaggagggagaagaaatatacttattttaaagaaggcacgataggccacccgtaccttcaggccggcatggcacggcccaaatattggtgggtcgtgcttgggtctgaggtgcagcccgtggatcgacacggcaggcctggtgtgttggtcgggccgtgccggcccgatagattctggcccgagcacggccgtgcctgggccgtggcgcccagatggccatctatgtatccactatccagagtttccaaaattccgggaataccattcccaaatattgaacctcaaaatcgagaatttaaaattagggattagtgttcgaaaatacttataggagtaagtaagatgtgtgcttgtaagaacgagagtgcgcgcgtttatgagcagctaggttgtaccgtttttcgaaaaagaaaagaagaaacactacttatctccgtcccagaatataagattctagtattagatgggacacatcacagtactacaaatctagatttataatactaagatatatcctatcatatactagattcttatattatgggatgaaggtagtaccaagagcatacagtgatgactgaggagttgttaatgccggatagcgatggcttacccacacaatcattcacatgtgaacaagacaaccaaagcaacaactttgcaaaaacccaaaaaagaatacgaagaaaagaaaatattaataataattaaaaaaaaaagaggataagcaagaaccgtacaaggcgagcagactacactacccttccatgttgccggccgccggccggtgagatcgagctcagccatggcatccgccgccgctcccgagatccaggagctcatccaccacccctacgacggccgcgtcacctccttcgtcgtcctctcctgcgtcaccgcctgcctcggcggcatcctcttcggctacgacatcggcgtctccggtaaccacccacccacccaccactctccctccctccctcccactcatcatcgacgacgagctcgccatgaacgacgcgatacaattggtggtgcaggcggcgtcacgtcgatggacgccttcttggagcgcttcttcccggaggtgtaccgccggatgcacggcggcggcgagcgcgtcagcaactactgccgcttcgacagccagctgctcaccgccttcacgtcgtcgctctacgtctccggcctcgccaccacgttcctcgcctcgcacgtcaccgccaggcgcggccggcgcgcgtccatgctcgtggcgggggcggccatcgccgccggcgccacggtgggcgcctccgcggcgggcctcgccacggtgatcctcgggcgcgtcctgctcggcgtcggcgtcgggttcgggaaccaggccgtgccgctctacctgtcggagatggcgccgccgtcgcggcgcggcgcgttcagcaacgggttccagctctgcgtcagcgtcggggcgttcgtggcgcagctgatcaacttcggcgcggagaagatcgccggcgggtgggggtggcgggtgtcgctcgccgtcgcggccgtcccggccgcgttcctcgccgtcggcgcggtcttcctccccgagacgccaaacagcctcgtccagcaaggcgaggaccacggcaaggtgagagctctcctgagcaagatacgaggcagcgacggcgccggagtcgacgacgagcttgacgatatcgtcgccgccgacaggtgcaaggtgacaacgaggcgcgggctgacgctgatgctcacccaccgccgctaccggccgcagctggtcatggcggtgatgatccccttcttccagcagatgaccgggatcaacgccatcgcgttctacgcgccggtgctcctccgcaccgtcgggatgggcgagagcgtggcgctgctcgcggtggtcatcaagcaggtggtcggcatcggcgccacgctggcatccatgctcgccgtcgaccggttcggccgccgcacgctgttcctcgccggcggcgcccagatggtgatctcccagctactcatcggcgccatcatggcggcgcagctcggcgacgacggcgagctgagccaggcgagcgcgctgctgctgatcgtcctcgtcgccgtctacgtcgccggcttcgcgtggtcgtgggggccactgggatggctggtgccgagcgagatcttcccgctggaggtgaggtcggcggggcagagcatcgccgtggcggtgaacttcctgctcacgacggcggtggcgcagtcgttcttggccatgctttgccacatgaaggccggcatcttcttcttcttcgcggcgtggctggtcgccatgaccgccttcgtctacctcctcttgccggagaccaaggggttgcccatcgagcaggtcgggaagctgtgggcgcgccactggttctggaggaggttcgtcgtccccgactccggcgacggcgaggaggaaggcggagccattgatgccgataagctctgaacaattaatcagctgtgcacatcactgactgactatctcattgtctgactgatccggcattccggacacggttgtttcagaacagaactggctatacccagcaacatgtacagactagcaacacattttttagctggatttaagtatgtaacaatacatatttgattacacataccaaggcttaaacaagcatttagtagtaactttttttttattttagagccctgacaagcatactagattatgtaggatcgaatcacaagaactaagccaaccagagggggggtgaatggttggtatacctaaaaaccgaaaacttttagcggaaataaaagttaccctcgaaatcgatggatcacggtctgaccgaagttgccttgccggtctgactgctcggatgccgccggtctgaccggtaattttaccggtctgaccgccgaagtcgtctgccgcgcctgctgtcgccgccggtccaaccgccttgctcccgccggtctgaccgccgccttaccgccggtcggaccgccgatgagtcgccggttaaaccgccgaaacccggtgaaacacaaatcgaagaactcttaaagtagatgacgactttattacttctctctgtgtttacaaagtgcaccaacagcactccttacaaaaatttcgactaaactcgaaaccctaactcaaaactcaactcaattgctctctaaagcgataccgggaagcctcacgctccccctctatttatacatgaggtaggcagcttaaagccacgaaccaaactcatactaggagtcctaaacaccttaggaaacccactagtacaagaaagaaactttacataaccaaacgtaccaaatttagtctccttctaaattcgactccgcatctcatacacacacaattcctccatcgtatgccatatagaatctccatcaaccacgtgcatcaactcttgcctaagtatcccgcatgatctctgaccaccacggacgtcgtcttatccccaagccgactcccggtccatcaccgcaaatactctcccgagacatcgagtcacctacacatggaaaaaacaaagaaaccatattccgagaccaagctatctccaacttaactcattagcagcaaacaatagtattacatacgtatagtatccatctagaagtcataatcatggaataaactcggatatccaaataaacaaaccgaaaccgaaaccgacacagtgtcggccggtcagaccgcgggctgcgccggtctgacagcgcattacacgccggtctgaccggctactagagcccggtttgaccggtccacataaaatcacagcagtccctgtaaattcacctgtgaaaaccaatcatctccaaaaccatttcgtgaataaattccaaataacaaaaccaataatctccaatgcccaattgttcatcacagaataataatcaaaaacacctttgattttacagattatacatgtataacattttactaggaggaaatatacctcaaaattaaataaactgaaacttaagtgtatatatggcagcaggtggatgctacctcccttcggagaggccagtgatggtgccatcgctcaccactgattggcaatatgcaacgggtgagcccacctgacgattctgcaccatgtccattggcgccaactcaggaaatggcaagtcatggttaagatactgcatgacatgccacatgcttggccttgcagcaggtgattggtgtgagcaaagcaatcctagtttcaaagctaggaatgcttcatcagcatcatactcattttggagctttggatccattgcctcaagaagtgatctctcgttccaacaatcaatcacccagtctactaatttgagctgatcactattcatcttgtgttcaatgggtcttcgtccacaagtaacctcaagaacaaatatgccaaaggcgaacacgtcagttaggggtgaagccttaccattttgtaacaactcaggggcaagatatcctatagttccaaccaggcgtgttgtttgcatgtcagtgccatggtcatataatcttgcaaggccaaaatcacctaagcatgcattcatctcttcatcaagaagcacattactggctttgatgtctctgtggatgacaacttgctcccactctccatgaaggtaccataaaccagatgcaacaccctttgattattcgaaaccgttgaatccagtctagaataggacggttactatgaccatacaaataattatcaaggctaccatttggcatatagtcgtaaaccaaaagaagttcacctttacgccggcaatagccaagtagctgcacaatattccggtgtcgaaggcggccgatgctaacaacctcagcaacaaattcccttatgccttgtctcgactcatgggacaccctcttcactgcaatttgtgacttagacttggaaagaagacccttgtacacccttccaaatcctccagtgcccaagagatgactattcttaaacccttcggtggctaaatataggtccttaaatgagaacctatgcggtccaaactcaatttcccaatcttctcgcaactcagcatacctcagccttcttctcacaaagaagaagatggccaagatcaccaaaaagacaaatgtgggagttgctagaggagaaattagtggcagcaagatgagctgagtagcttttccatctacacgagctttaggtagatttggtagatgagctgtgaagaaaggtggggctagtccattcatactaaagctccagcctaggatatagtgcctcgattctatttgacctgttgcagctgataaaccaacgtatgcaacgtttgtgagcacggctgagaggttataggacattgacaggagtgtcttggtgggtctggccattttgaatggagctaaagccacatcaatccatgttgcctctccatcgtagttgatccaaatttgcatggcctcgccactaatcagactcaagtttcggaaggaaccagtgatgtcatcgtagtagcctgcagaagaagatgttgccgagtgaagatcgcagatgtcgatgccgacatggttgccatctatgtccataaactcgttgttttgtgcagtgtcgatctcaacagcaaaaacatggttgctcaagttgccgttgttactgtaattgaacaatcctaggtactgtgccggtaacgcatcagaaaaattagagcttggggcaagaaagaaggccatgccctctgtgctggcatgcaacaagggagagacgacgatgccaaacactaaggaggcggagaaggactgcaccgcggagttgggcggcttacggagccggaaaggagtcgggtggaaggcatggcctttctgattgaccgtaccattggtcagctcgagcaagccctctggcgacaccattgattagtgtagatgaattcttgattgatgtttgcaggtgttgttcgtgatatttgacctgacggagaagcgatgcctttttatgttatggatctattccttttgaccaagttcagctcgttgtgccagggcatcactttgagcttgcttttgaagattttgattaatgcgatgatggttattctgaattcacgttgctttgccatgataatgttccgtttttcatgaaacaactgtttggcagttggttgttaggcaagataaagcctaggagattactgttagcgaagccgtagtacacaaattggccgtctcctagggttgtagccaaggatggcagaataagtttttgttcttaaatcctttagtggcatcaaataagtctttgtaagcgaaacggtgcgggccatactcaacctcccaatcttcacgtacctccttataccttaaatgtctcctcacgagtaaaacaatagcaacaccaatagctagtacgaatattgctgatgctattggtagaacaatctctaagagtttggattgaggttttggactaagattaggcagtttaggtagctttgtggggtcaatgattggagcaggaatattcagcccaaaactccaaccaagaacatagtgatgtcctgtgcttaagcccgttgaggatgagaagccaaggtatgcttgatctgttagcactgttgagaggttatagactacaaagagtagtggcctcttaggtcttccaataccaagaggagctaatgtcacgtcaatttgtgcggcattcccgtcatactctacccaaacttgcattggtttatctccaatgaggctcacatttgtgagcgcgccattgttgtcattatagaagccggcataagaggatcttactgagttgagactgttgatatcaatcccgacatgattattgtcgatgtctccgaactcatcattcctaatggtatcaagctcaattgcaaagaggtgattggtcgaactgccattgtttatatcattaagaagacccaaaaattggattggaaaggcagtggagaaatcattgcttggggcaatgaagaaagcaaatccatggcctcttatatcaccaaatgaagagagaataccaaatacaaaggagacagagaaagattgcaccgtgccattgggggacttgcggaagcgtagcggagctgggtgagatgcatggcctttgatccggaatgaatcgtttgtcagcccaagaaggccggtggctgtgatttttgctgcaccatctagagtcagattgctaccggtgaagccggtgtagatgaattggtcatgatctccactagcactgatggctgaaaggctaatgcttatggtaaggaagaggatgactggcgaagtgtgcttcatgctactagtcatagcagtggcaaattggttgattaaaagatggcttgcattgcaaccatttatatatagggcacactcacatcctgcaaagctaggttatgacctagtcagttggagcatgtccagctcaccatggaaaattctaggatttaggccaagacatggtagaagcagtcggtaatttacatctcttggctgccatgaagtccaacaacatcgacattaggtgttcgccattttctcggaaaagttgcatcactcccatcttgaaaattgaagatgtcacttgcaaactatggtaccagcatagactatattattgcaggtgaagaagaaatagaccgtagttacaagtcaagaggtccttttctttcactctcaaaatgttagttttgtataatctttgtaagaagatgaaacatccttattattaggacttcctatgattataataggatttatatgatattatttggaggatgcgctactacagaaacacaaaaaaaggacggcactataggtgccagttcatctaaaactagaacatataaggcttttccctccctcacgtggctctaaaatccaacactagcacctataacatcttgtaggtgccgattttttaaataaacgtgcacctttatatgggataaaaatgccagttttattaaaaactagcacatcaggatggagctaaccgagccaaacacccagcctacgggtttttcctcctcggcctcagccttactcccttcgtcccaaaaaaaaatctaggtagagatgtgaacccttgtccagattcgttgtcctaggtggagtcacatccctacctaggttgtttttttttgggacaaagggagtatgtcctcatcctcctccctccctccctccctctctctctctctctctctctctctctctctattcttcgctctttccccgaagagccaagcaccccccgcccatccgacaacgatagagctacctccgattcgggggctgcgggatctgtgcccccctcctccaacggcgagggcggtgcatcgatggcgccacctctggctcaaggggggagagggtgccggacttgtgcttcccccctccaaaagcggcagctgcctcctcccctcggcccgtccaatggcagcggcagtccgacttggggactgccgatctacgcaccccccctattctcggcgtagaccatgacgagtggcggccctgcctacccttgagcaatgatggcagcggactaacaggtaggtaccccttctccccttccccatccaccccttcaaaaaatcccttcactcttctgggatgtgacagtggtggtgagcggcaacgcctcggcctccgatgaacagtggcagctgtggatttgtgatgaatattatgttgtaattttatgggatgattcttgttgctggatatatgtgagaattttcttatctagtttcctttacatgttcttggctcgaagcattggttcgatttgagccgatgcgagccgcgtcacttttgattctccacatcggtgctgtttgagaggtgccggttggaaaaatccgacacctatgtgtggttcctaactggcacccattgggtattctgcagtagtgatatattaatttgactttgagttgtcatagaacgaactaaatgaatatatgcagcattctaaatatgctaactatttgcatgaaggcctagatatagcattcatgaaagctctatttgtgacgagatacaaaattattataaagagaaaaaaaataactctaaacagttggaaggagaggagaccagagggtggaggtgcaaggagagcaacacaccaagaggctgagacagtgatgcctcacccacacaatcattcacataacaacaaaacaaccaaagcatgcacaactcagcaaaaaaagaaaagaaaagaaaagaaagtggataaacaagcaccgaacaaggcaaaacagactacagtatatccttccatgatgacggccggccggacctgctcaagtactatagcacctggcatctctcccgaaatccaaaacctcatgagcacgatatatatggagcaacccctacgataccatgcccctggattgatcacctctttgctccttcatcagttcatggtgttctcctgtgtggtcagcgtcctcgcttgcagtgcgtgttcgactctccaagacatatgctcaccctccttaataatattgatatcaggctaggatttgaattaggaattcaaattttaactttgaattccaggaactaagggtaaattccagaaagaatgtcttaaagtttttgacgatattcagattttagaaaattcaggaattttgatttttggagaaaaacaattttggtaggaaaagaaatttcaaaggcaattttgaatttgatttgaaaatttaaaaactgagtttagggaaaaattttgggattttaaactagattttgaattagaatttcaaaggaattctgtgagcaacttaggagggatacaccgattttataattcgaaactagtgattttcatttcgatggtaatttttggatcgagattgggatggtcatagggagagatttaattgagatctttggcacaagcactaagacacactaaataactgaatttgttgaattaggtttttattaatcatactatcaaatcatatacagatttattttccattataaaccaaattaattccctccattttgataaattcgaggtactattttatcaaaagtaccatgagttacctccaactgtttatatgtgaaatagtgctacctagcatgcaagaaacatgactgtgagacaagaaactaaggtaaaaattgttatagaaatttaagaaagcaaagttaattgtggttgttttactctgcatttggagaatcctatctatcaaattatgtgcaagatttcttatgtgtgcttgacagaggttgccagttgccaatgcaatcaatacctgccttgtatttgcctcgacgaggactctaatatgtggttcttataatatggctaatggctggtagtaatctaaccaatatcccatattattttcctcggaaaagtataatcttttaattttcaccaaaggttgtgctttattgagtggttgcctgcagttacaacaatcaagtatcaactctgatagttgtgagaaataaataaggaacacaatctgaaaatgcttgaattctaaagctcacacgctctctgcacattgtcggaccgacaaaggctaactctgacgaagctgaagtaaaaacagagaatcaaagacagtttgttcggcgatctcgctgcagcttttccgggattctcttctccttctattcatacccaaaactaggggaaattacatgcaaacgtggccatcccacgttcgactaaaatcagttcagccacagtaacagatttaacataattttggttgaactggccaagtaatatgcatgaaaggaaacttcaagacaactaaaacagcacaagaacagaaatatggagtgaacaaggatgttgatttcgttttttggttagctaatatttacttttccttccccgtttcatagaataataaataatttacagtgagcatccacaaatttgaaaaaaaccttctgggtcctgattttgttaagaaagcaacattactacaaggctgggaacaccagcttacaataaagctacaatatgttcatacaagtagacaatcactactgggaatcccatccatttgtatcatcttccactcgtgaggctcgatgtcaggttgttgctgcaaactgtagatggcacagatttgtactggtcgaaaccgtcgttttgcaaatatcccaacatgctataactcaagtttgtgggcatcaaccgaggaagtggcatctcattgtcgaggtattgcatgacttgacgcataccgggccttctggtacaaattggatttgcacacaacagccctagctttaaaacaagattgacctcatctgcattgtggtctccttgtaatctgacgtccagtgtgcttgtcagtgatcctttttgccaatgctcaacaacccaatcaactaatattgtcgggctatcatgcgtgtaattgttaataggtcttcgcccacatgttacctcaagaacaaaaatggcaaatgcatatacgtctgttagaggggatgccttaccggtgcgcgccatctctggtgctatatatccaaaggtaccagccacatgtgttgtttgtgggtcattgccatgctcatatagtcttgcaaggccaaagtctcctagatgaccgttcatttcagcatcaagaagcacattgcttgctttgatatctcggtggatgacaactttctcccacttctcatggagatagaataatccagatgcaacacctctaatgatttgaaatcttttggcccaatctagcgtgtacttgccctctttacagtgtaaatacttgtctaggcttccatttggcatatagtcatagaccaataagagttcatcttttcttctgcaatagccaagtaattgaacaagattgcggtgtcggatgcggccgatactaacaatttcagcgataaactcctttattccttgcttcgattcatgagacaccctcttgatagcaacctccaatttagagtctggaagcacacctttatacaccttcccaaatcctccaacacctagaattttctcattgttaaatccttcagttgcatcaaataaatatttgtacgagaagcgatatggcccaaattcaacctcccaatcttcatatagttcagcatacctctttcgcctccacactaatgctgtgactgctgctcccacaagtaggatgactgtggtgatgactatcggtaggactatcttcaaagttttagaccggacttttgggccaaatcgaggtaactttggtaacttgatgatatctattgtcggagcaggactgttcattccaaagctccagccaagaacataattcaatgcaccgacattattagcaccggaagagaagccaatatatgatacaccttcatctaaaattgttgagatgttgaggattgctgacagcgttggtctcaaaggtttggttagcttgagaggagctatggtcacattcatctgtgtggcctctccatcatagtccacccatatttgcactgccttgccgccaacaaggggcaagtcattgaaaatgccgttcttgtcatcatagaagccagcaggatgggtctctagcggtctgctgaaactactgttgatagaaatgctgatgtcgttctcgttgttctccagaaaccttttgtcttggcaacttaaaaaattaactgcaagattgctctccctctgatcattcttgaggcccttgctcggaaatatcatgaaagccatgctgtcgggacatctaatagaaggagccatgaagagcacaaagttgactgagaaggactgtaatggtaccttcagaaattgccatggagtcgggtagagggcgtagcttgtttcgtaggtacttgcgccattggtaagctcaaggattccgtttggtgttaccatggctgtgccatcaaggataaggttgctgccggagaagccgttgtagatgaactggtcctgtccaatactgaccgtggtgaaggatgttaggaagaggaggaagcaggctaaatgctccatggcaggacgctgcaaccggtgatggaccatgaaaggtgggcaaccgggatactgcaaattaaccggcggtacaagtcgacccaatttatttgcagcgatgaggaaatagttatgcaggcatgacttctgtggcgcaatgcatagtcagtcttccatctagtcttttccatgttagggtgtgtttagttttctgggtgtaaagtttttaaagtataccagtacacatttgaagtattaaacctagactaataataaaaataaattacatattccgcttgtaaactgtgacacgaatttattaagcctaattaatccatcattagcaaatgtttactgtagcattacattgtcaaatcatggcgtaattaggctcaaaagattcgtctcgcaatttacacgcaaacattgtaattattttttcatccatatttaatgcttcatacatatgtccaaacatttgatgtgacgtttttaactaaaattttttggaacctaaacaaagcattagtcattgtggaaaagtagctagcgtgcttccaatattaatctcatgaggtcagagaatcacagctagcttccgtctcttaatttaaacctatgtcatacgtggatgtagtggcgaattgaagccaccatctggtgaccccgatcgagcagtcgcctggtggctcgtcagaaataacattaaaaacaaattcgatgttattatagggactgaatgtacaattgcctagctagcaaataatgtacaaccagttatatataaccaggaggtagcccgcgcgcccacctatgcgggcatccgtatccttttatatgattattaactagcacggtggcccgcgtagattgcgcggctagcaccattatatttgttttcttatataatagcttaaaatttttaatactttattactaaaatatattaaaaatagcaacacaatatttattttttattatattgatagttattaattattttctactttcaaattttacttatttttaattatatttctatatggactctaggctcttctcttattcttgcttatttttaattttagttatttataaaattttctttctatatgaactataaatcctacttttaatttttaaaattattttaattctgacttccagtcagttctgttcttcttccaatattcttaattttaattccaaatttccgttactataaattgtattcctacaagaactctatttccaatattccttattttttaaattccaaaataaattatattcttatgtcacatcctgattttcgtttcaggatttataaattatttaataaattattaatagaatttatattaaatgttctttaatttacaagtgaagttaaatgtgggaataaaatttcctaaatttaaagcatggatggatttaatttttattaaattctccatgcttaattatactctctgaaattttctcggatttttcagagctcaattcctaaatgatacaaagaacagttcagtaattatttgatcaataattatctaattataattgttaagagcttttcttgtttaaaaatccttaaattataaattgttgtttaaaaggaattattagaaatgattttaaaagcctaaaagagaagatctaattttaatttgttaaatctcaatataaaattgggctagataaaatttcattaaatactttgcttaattctataattcctagatttttctgggatttatttgagctaaggaagtatttttaataaatggaattgcatttaagaaataatttaaattgaaaaaggtttttaaaagtcttcttttggctttgggccgaaagtcggcccaaaacctctcttctctctctcctcggcccagtcggcccagtcagcccgcgctcctctctctcggtgtcgctgacaggcgggacccacctgtcagggtcgtcgtcctcctcgcgccgccgccgccgcccgaaccctagcgcaagccgccgccgtctccttccaagttcggccgcgtctttccttctccggccgaatcttttgaggggaaatgatcttctcgacctcctcttccttttctcttttggaatctccggtcaattcggtttggaaactcgaggattcgaagtcgaatcggatccatctctctcctccgaaccccgttctttccttctcgccgccggtcgccgtgggcctccgtcgccgctcgatagcccctataaaaggacccccgagctctcctctacccgccgcctctctcgccttcgcccgccgtcgtgtttagcgccgcctccgcatagccctagtcgctgccgtcgttgccgtcggttctgccgcgtcgcgccgccgttgcagccgccgtcgtcggtcgccgtcgccaccatcgggttcgcgaggtcatcgccatcctcgtccgccccttcgccgccgctgaagaccgccggagcaccatcgccgtcgtcgacccgatctccgccgccgcttcttcctcgtcgccggcgctgtccgttgttcctccgccgcttctttggtcaccggtgagttcgcctcgtcgcccgcatcatcttggtgccctctgtttgtgccgtagagccgccgttcgccggcgagcgtgcgccgcccgagccttccaagccgccgccgccggtggtgacgtcaccgctgacgtcatcgtcgtcctctcccgtgagccggtcgtggaccgttcgatctcggccgtccgttttggatagggttgatctcggccgttcgttcccgtgaaccgctgccgtgcgcccggtccaccgcgaaaccctagccgctgacgcaataatcctccttttccttttcaaaaataattcattattgcatcataattcaattaaaatccatataagtgttttaatctgatttaatctttaaaaattcataactaattcatttgaactcagtttaatgtggttcaagttgcaaaaattatataaaataaagatctacatattaaaattgtccataaattgaattaaatttatttaattctttttaaatgggctttaaatagatttaatcttgtaaaattcataataaattcatttgaagtcagattgaggccgttcaagtctcataattcatctaaaattaagatctacatgtttgtttactttttatgcattgtttatttggtttttattagtctttttcttcgttttgcgtgttagcttgtcatttccgtcgttgtgaaggttcgtgagtgcgccggaagtattcaagaagattaattgaagaccgattattgcaaggcaagtcacacagatcctaaacacaatcctttgagcatgttgatcctatatttaaattctctatttatttcaactgtgcatttattttcgaatgtcactgggtggtgtgaacctattcctttgttatggcctgtttgcattgactactttattccttgataccttgggtgattataacttgactagttgagctatatatattggttcagctagatattagatatgattgcttagccatgcttagaaacattagcacactattgggataacttatgactcattatttaaggatggtttaatggtagctcacgatggtcaatcgtgattggttaattaattacttgccaactaaaacttgataatggtgggttgtgagcacatggttttgagagtcgtgctcatgacaattaaggaccggttcgcgagctactgttgtgaaacattaaccgtgccaaccacaagctatcgtgggcaacggctttaccttttgtatagcatggttcattgcggagcaccagactgagaagtggcggagataagcccacgggggtcgctggggagtccatgcctctggtttttgagggggtgattatgatccaggaaaggtgcgctgcggtgggttgtgttatgcaaggggtaatgtcacagctcctttccgaggtaccgtggtggtactgaggcacatggtgacatgatgtgggactgtgtcttgtgggtacagtggtacacctctggccagagtaaaactattcgaatagtcgtgcccgcggttatgggcgagttgagcaatgtttttcgtgattagtctcacacctctcacaataattatagatgttatacccgtgcccgcggttatgggcgagttgagcaatgtttttcgtgattagtttcacacctctcacaataattatagatgttatacctggtaataatttgcttagctcctggtttggagttagatctgttcagccgggtatggttgttcagaatggttgggcctgtgcagcatgggtgtgctgttcagtgttgattaaaatttctgattaattactccactgttttacttctcttaaatgttttgctaaatgctgcttttgcaaatgagcctatattatgccatcctttggtatccttgtgcacttgcatatttgctgtgtggcttgctgagtatgtcatatgctcaccttgcaataatcaatcaacctcagttgaagaaaaaggatccagaaggagaagacgtttggcttataccccagttgagctgcctgtgggagtggagccggagcttcgctagattttattttccgctgcagttttcttcttggtgaggactaagtgcctcataagtaagtatttatcgttttagttaatttgatgaatctgtatattaaattgtcagtttgtgtacctcggctgattcctggacgaggattttatgcacaaataagttcggaaattactagtgaatttccgggcgtgacatcttatatgcactttagactcttctcccaatattgcttattttttatttttaaattttaattttagttttctctaaattgtatttctatgtggactctaaactctatttttattttattttcttgattttgactttcaatttactctaaattcctatatggactctagactcttttttcaatattcttattttttaattctgaatttctgttgtttctaattgtatttctatatagactctaaactcatcttttaatattctttattttttagcccacgcaaattgcacggctaatatcattatattttctctcatataatagcatatatgttttctcaatgtattattcaaatatattaaaatgacaacatacttttagattttgtactaactttatcaaactactaatgtgtaatattcatattgtatttcagttatttataaattgtatttctatatggactctcttccaatg

SEQ ID NO: 23953 - DNA, 12332 bp, Oryza sativa
ccggcgtgcaccagcgatcgggagagcaggtctccggaacctctgcctttgacgtcctgcaccgggagaaggcggcaataaggtttttgggaagcgcttcgcgcgactgctccctgttcgttcgcgacggctcgccttcctcttcgctcgcgtgtttcgtgccttcgtagacacctgcgaaaagtttcgaccaagcagccgatcttttcgtcacctcggtacgtgttcaatatgttgcgcatatttgatctgttcatgttattctgcgtagtttacatgtgtagatctaatgatgcgttcatgctagttttcatctgtaatgtcatgatttatttatggaataaattaaatctttatatgcccataatctcaacaatccaaaaaccttattataggcactgtgattttactatggctggttttgccgatgcactgaggccggataaattcaccggtgtgcattttaagagatggcagatcagggtcactctgtggctgacagctatgaaatgcttctgggtgagtactggcaaacctgaaggagttcttactgctgaacagcagaagcaattcgaggaagccactactctctttgtgggatgcattcttagcattcttggcgatcgtctggtcgaggtgtatatgcatatgaccgacgctaaggagttgtgggatgcactgaatactaaattcggtgctactgatgctagcaatgatctgtatatcatggagcagtttcatgactacaaaatggctgacaaccgttctgtagtcgaacaggctcatgagatacaaaccatggctaaggaactcgaactccttaagtgtgtcttacccgacaaatttgtggccgggtgcattattgcaaaacttcctccatcttggaggagtttcggtactgcactcaaacacaagagacaggaatactccgttgaggggttgattgcgtctcttgatgttgaggagaaagctcgggaaaaagatgccgcgtctaagggcgatggtgggcagtccagtgccaatgttgtgcacaaggcccagaacaagagcaaggggaaatacaagctcagcagaccaccaacttcaagaagcagaagaagaacaaaacaatcctaatcaggatgagaggacttgctttgtgtgtggccaagttggtcatctggctaggaagtgtccacaacgcaaggggatgaaggcacctgcagggcagacttctaagtctgctaatgtgaccattggcaacactggagatggaagcgggtatggtaatttacctactgttttttcagttaatcaatctactaattggtgggttgatactggggccaatgtacatgtttgtgctgacatctcattgttttcttcttatcaggtcgcacggggttccaccgtcctaatggggaatgggtcacatgcttctgttcatggtgttggcacggtagatctgaagtttacttcgggaaagatcgtgcagctgaagaacgtgcagcatgtcccttctatcgacaggaatcttgttagtggctcccgtctgactagagacggatttaagttggtttttgagtctaataaagtagtcgtgtctaaacatggatattttattggtaaaggttatgagtgcggaggcctgttccgcttttccctttctgatttctgcaataagtctgtgaaccatatttgtggcagtgtggatgatgaggctaatgtttggcattcacgtttatgtcatattaattttggcttgatgtctcggctttccagcatgtgtttaattcctaagttttccattgtcaaaggttctaagtgccatagttgtgtgcaatcgaagcaacctcgcaagcctcacaaggctgccgaggagagaaacttggcaccactagaactcctacattcagatctttgtgaaatgaatggggtgttgacgaagggtggaaaacgatatttcatgacattgattgatgatgctactagattttgctatgtgtacttgttgaaaacgaaagacgaggctctagactattttaaaatttataaggcagaagttgaaaatcaacttgacagaaagataaaaaggcttaggtctgatcgtggtggagagtttttctcgaacgagtttgacttattctgtgaggaacatggcatcatacatgagaggacgcctccctattctcccgagtctaatgggattgctgaaaggaagaaccgcacactgactgacttggtgaatgccatgttggacaccgcgggactgcctaaggcatggtggggggaggcattgttgacctcaaatcatgtgttaaacagagttcctaatagaaataaggacaaaacaccatatgagatatggattggtagaaaaccatcactttcttatttgcgcacatgggggtgcttggcgaaagtcaatgtaccaataacgaagaagcgcaaacttggacctaagactgtggactgtgtttttctgggatatgctcatcatagcattgcctatagatttttaatagttaaatccgaggtaccggacatgcatgttggtacaattatggagtctcgtgatgctaccttctttgagagcttttttccaatgaaggatacacatagtggttcgaaccaaccctctgaaataattcccaattcaatcacaccaccagaacaaactgaacatacacatgaacttgtctctgaggaggatgtcagtgaagctcctcgaaggagtaagagacaaaggacggctaagtcttttggtgatgatttcactgtgtacctcgtggatgacactcctaagtcaatttcagaagcatatgcatctcctgatgcagactactggaaggaggctgtccgtagtgaaatggattccattatcgctaacgggacttgggaggtgacagagcgaccctatgggtgtaaacctgtggggtgcaagtgggtgttcaagaagaagcttaggcctgacggtactattgaaaagtacaaggctcggcttgttgctaagggctatactcagaaagaaggcgaagatttctttgacacttactcacctgttgctagattgaccacaattcgtgtgctactttccctagcagcctcacatggtcttctcgttcatcaaatggacgttaagacagcttttcttaatggagagctggataaggagatctatatggatcaacctgatgggtttgtagttgaaggtcaagaaggcaaagtgtgcaaattgttgaagtctttgtatggtctgaaacaagctcctaagcaatggcatgagaaatttgacaaaacattgacatctgcaggctttgcagtcaatgaggcagataaatgtgtgtactatcgccatggtgggggtgagggagttattttgtgcttgtatgttgacgacatactgatatttgggacaaaccttgaggtgataaatgaggttaaatcattcttgtctcaaaattttgatatgaaagatttgggagtagctgatgttatcttaaacattaagctaattagaggtgagaatgggattactctcttgcagtcccattatgtggagaagatcttgaatcgctttggctacattgatagtaagccttctccaacaccttatgatcctagcttgttgcttcgcaagaacaagagaattgctaggaatcaactggaatactcccaaatcattggctcgttgatgtacctggctagtgcaactaggcctgatatctcctttgctatgagcaagttgagccgatttacttctaatccgggagatgatcactggcgtgcgcttgagcgagtaatgcgctatctgaaaggtactgtggaattgggacttcactatactgggtatcctgcggtactggagggttatagtgattctaactggatctctgatgtggatgagatcaaagccactagtggatatgttttcacactgggtggtggtgctgtttcatggaggtcttgcaaacagacaattttgacgaggtcaaccatggaagcagaactaacggcactggatactgctactgttgaggcagaatggctgcgtgatctattaatggatctgcctgttgttgaaaaaccggtgccggctatccttatgaactgtgacaatcaaacggtaattgtcaaagtgaatagttctaaggataatatgaaatcgtctagacatgtgaaaagacgattgaagtctgtcaggaaattaagaaactccggagttataacgttggattacatccaaacagcgagaaacctggcagatcccttcacgaagggactatcacgaaatgtgatagacaatgcatcgaaggagatgggtttgagacccatgtgagttatactatggtggtaacccagtctatgtgatcggagatcccgtgaattagatcctgggaagaacaaaccattaataaactagaggagagtaccaatatatataccctatccaagtgaagatgcatatactctcgtgagctgcaaggcaggttggctatgccttaatgagttctgttggctttaattagcaaagatgttgtcctgcagagcattcttgaaggaactcacctttgtgagcttgactgttggtcgcagtctatgaagattttgggtgaatcttctaggaagcttactaaagacctaggagtatgacttatacgctccacccgaggggtagtctacagacggtctagtaccagataagactttgagtgaaacttgcttgcacaagacttgcaattcaaggcgtagtccattgttcaagttgtgagtaagtgtagcttggagttctaggtggatgttcaaccttaattggtctccatcgaaccgctggtatataaacagtacattggaaaaggcaaatctcagtgggattttgagatttggtgggggattgttggaattaatgaatgggccttagcccactcgaagattaattctttggaaaatcacaaaagcccacctcatgggatggcatgcatgtggagtttagtaccaccttgcttattctaggagagggggacctccttaaaagggaggatgccctcctagccacttgaagcatgtgtggtggagagaagaggggaaacacacgcgcgcgctcgctcgcctcgccgggccgggccgggccggcggcgcgcgtcacgacgtacgcgtcgaatggtccgaaaaattggctcctcacccttgcgcagatgcagcctccttttgcagttttgttttgctgcaaattcggattcgttttgttttggatccggataagttacgcgcgacttatccggttcggttacgcgcagtagagatcgtgcgggcgccctgatcaagcgacccttctctatataaaccgacccgccgtcttcacgcaatatatgcgaaaatcaatctagggtttgcctcctactctgtactgcgccgtcgctcgtagactactccatcccgctcgccggcgtgcaccagcgatcgggagagcaggtctccggaacctctgcctttgacgtcctgcaccgggagaaggcggcaataaggtttttgggaagcgcttcgcgcgactgctccctgttcgttcacgacggctcgccttcctcttcgctcgcgtgtttcgtgccttcgtagacacctgcgaaaagtttcgaccaagcagccggtcttttcgtcacctcggtacgtgttcaatatgttgcgcatatttgatctgttcatgttattctgcgtagtttacatgtgtagatctaatgatgcgttcatgctagttttcatctgtaatgtcatgatttatttatggaataaattaaatccttatatgcccataatctcaacataatttgggcatagagccatagtataatagagacataagtaaaaacaaagcttcccaaacttagttttggcctagtagtgtaacagggacttagttttgcgtccttgcagtcagaattgcctcatccatgcacataattgcaatgacagctgaattaagtccgattaaaagttagataatctcattttttttcttctctcagaattcataccatcttatttttctcctttaattcaaagacattttgaagattactagtatacatataaaagaatataaattgtccacataatcgtgtggttatatttgcagttaggttaacgtccttttcatgaaattaaagcgtgatataccaagccaagtttcccaagtttcagggtcttaattaatttccggcagacgaaaattactcagggcgtgtcacattagctattatataagatgtcgtatgggatgttcgggcactaataaaaaactaattacagaatccgtcaataaactgcgagatgaatttattaagcctaattaatccgtcattagcaaatgtttactatagcaccacattgttaaatcatggagcaatcaggcttaaaagattcgtctcgtaaattagtctcaatttatgcaattagttatttttagcctatatttaatactttatttaggtattcaaacgttcgatgtgatagggtgtaaaatttttgcatggtaactaaacatgtcctcacttgtaagttctacgagtggttgattgacatgaaccttttccttgtttgaaccttccggccataagacaaccagtcagaataggggaccatgtgatatgacattttccggtagattgagtcttaggccctctttagttcccacaacaaaaaatttcacgatgttacatcgaatattaggacacatgcatatagtattaaatatagttaaaaaaaattaattacacagattgtgtgtaatttgtgagacaaatcttttaagcctaattgcaccatgctttaacaatatggtgctacagtacacgtgcatttgctaatgacggattaattagacttaataaattcgtctcgcagtttcctggcagaatctgtaatttgttttgttattagactacgtttcaaactttaaatatgtgtccgtatatctgatgtgacaatcaaacaaaaaatttctccaactaaacaaggccttagcgaaaaaaagagatgatttttactgtccagcagaggtactagtagttcagcaggaggtaccagtagttcagtgtaccatctaaggggtaaaacgggcactcttattttttccattattgttctctctcctggtgacttctcgaaattgtcgcactacgccggatccggtcatctctgacaggccctaactctcatcttgacggatttggccccagtcagggattagtggtcactgatgactacacctgatctctaatgggtgaaagtatgccaatggtaattaaaacctttgacaggccaaatcgtttcaaatcgttgagtctaacaatgctcatcctgcccagctagatccaacgatcggaaacgatttggtaccgtaaggtaccgatacctcgaggtactttttgttggaccagagcaaatctctatttggcaatcagggaggtcatcaaggccttttccggttaaagttacttaaaattttaactttttaaccgaataacatgccccggtaaaagaaagcagctttaataccaattaacaatcccctttattaccggttgtagcaaccgagaccagtaaatcgaccagtaaatcaagactaaagatctcgatgtttagtaccggttgaaagaacctttaataaagatgcatactaaatcataaattatatgtagaatgtgggattgaaactcaaaatctacctcaaccctcacgtgcattaccatatcccacctactacacatatctaacttgaatacaaatgcttttttttactaatcctggagacatctttagtaccggaatatttttagtccaaattagtgttatcaaccggtactaaaaatacatctttagtaccagttgataataccaacccggactaaagatcctctagctttaattagtctcggttggtgttaccaaccgatattaaaaatacatttttagtagcgactggtaacaccaaccgagacttaagatgtttatagggacttggatttttagaaccggtttagtaccggtttttaatctagccgagatatttgtgttttggggactcggataaaagatcgttactttaatctctacaagtgatggaattttctacgcactctttcttaaaaatatgacagattttgcagcaataaacttggacatacagggcgcctcttattacgttcgataaatacagtatacattagtcctcaataaaatatcaatatatagaaaatagcaaacaagcaatattttgtatcatttgggccgtccaaattctctgcgccagattagcagcacacattgaattaatatagccaaatcatcttccacgtgtagtcagaggcagcaagtatagttgaaccaaaatgctcatctctcatcacacttgaaacggaaacgatggcattgcggacaagttgactgcttctttaatttctacatcacggacacatttagttctggcaactgcgcatcgccatcgaggtattgcagaacttgccgcatattgggccttgcgtttgaaaatgggtgtgagcataataatcctagcttcagtgcaaggtaggcttcatcgatattgtagttaccttggagccttctatccattgtatcaagaagtgatcccttatgccaattctcaaccacccaatcaaccaagatgagatgtttaccttccgagttttgcctgataggcttttgcccgcaagaaacctcaagaaggaagatgccaaaaccaaagacatcactaagtgtagttgctttgcctgtgtgaactagctctggagctaagtatcctattgtgccgataacatttgttgtatgtaggttactgccgtggtcacatagtcgtgagagaccgaaatctcctaatcttgcattcatctccttatcaataagcacgttgcttgccttgacatctcgatgaattacaactttgtcccactcctcatgtaagtagagcaggcccgaggcaatgtctttgataattttgaacctttgtgaccaattcaaagttggttggccatgaaaattgtataagtgcttgtcgagactttcattttccatatagtcatataccaaaaggagttcattcttgcgccggcaatatccaaataattgtacaatgttgcggtgttggagattccctatactaactacttcagctataaattctttaataccctgctttgagccatatgataccctcttaacagcaacctgtaatttcgatattggaagaacccctctgtacacctttccaaacccacctattcctaccaagttattgttctaaatcctctagttgcgcgaaatagatcctggtaagcaaaccggcgtggaccatattcaacttcccaatcttcgcgtacctccttgtacacaagttgtctcctcacaagtagaaccacaatgccaataattaataccaatagaattgaccctattagtggaaggattaatagaatggattgagttcttggaccactataattaggtggttcgggtagcttgggtagcttggtagagtcaatggttggagcgggactgttcataccaaagctccaaccaagaacgtagtgatgagctgtgcttaagcctgttgaggatgagaaaccaagatatgattgatttgtaaacactgtagaaaggtcacgggtaactgagagtagtggccttataggtctagccatgccaagaggagctatggtcacattagttaatgtggtgtacccgtcgtactctatccaaacttgaattggccctcctccgatgaggctcaagtttgtgaatgtgccacccttgtcatcgtagaagccagcatgataggattgcatagaattcagactatttatgtcaatgccaacatggttgttgtcgatgtccccaaactcattgtttcggatggtatcaaattcgatggcaaagagatggttgctcaaactaccgttgtttttatcattgagaaggcccaggaactggattgggaaggcggaggagaaattattggtgggagctatgaagaaggcgaaaccatggccccttatgtcaccaaatgaagagagaataccaaacacaaatgaaacagagaaagatgtcaccattccattagactgaccgaagcggagtggagccgggtgcaacgcgtggccttgagccctgaacgtgtcctttgtcagtgcaagcaggccggttggtatgatttttgctgagccgtccatggtgagattggcaccagtgaagccggcgtacatgaatctttcatggtcaccaccggtgctggaagctgaaagattgagggttaggaacagaagtaggaagcacaagatgagctttgtgctactcatcgatcgcttcttggttgacttgtattttgtagatctagtacttgtcgttgcgcaggtgcactgtcagtatggtaacttagtaagcagttaaggtgattttataggttgtaagctggagcgccgtgcccttcacgattggaattaacttggaaataaatggttatttgacctggaaaatttgctactcttataaacgacgactcttcaaatgtcactcctattatcgtacttaatttttatgtcattgaacagacaagttttcctcttcttttttaccactttcacctacgttgggtgacacggtggattgccaacgtggattagtgttaagaactgatttttttcccctttccattcgcaaattcacgaacttaattagcattataaaaggagtaaatttagaatatgccatatcctgaactctcaaaatacattttatttttgtctttgaagttatcatgaatgtcatatagatccaaacagactccaacctactaagtgcgttgctagatgccacgttgacacctaggtgtcagtgaaacccacatatcagtcatatagaaaaaataaaattaaaattaaaagaggagagtaagatgtttgtaaatcttttaaaagtaaaattttaaaagaatggagaaaatacgttttaattttttccccaaaatatatgtgactgatacgtgggtcccattgacacatatgaaccaccgtagcgtaccacatcaatgtatggaatagcatacatgacatcaactaaaaatacattttaaaagttcatgaaactatatcatacactcatacaaagatcgtccatacacattattcttataaaagtattgttcaaagcaaattcccaaaccatttttttagctaagtagttgagatctttttaaaacgtttataattgtaattaaatatttttcttaaacattgaatatttacgatggcagcgagcactaatgatgaacactgttaagtacttcctccataaaaaaaaatttaaattctaaagtttaaattttgtttaaaaaatcaatttctatcatcctacctaccttcatcatgaaaaacgataagttttatctcttcaatactctttacctgcctatcactcttactattttttcaatgattaaagatattttagtcattctcactcttcactaattctatcttaagatgttaggaatatttttttttgggcgggaggaagtaagtgtaaaggaatacagtactctcgatcgcctttccaggcttgtaaaaatctcttctttcaatggcatgtacatcagaacccgtgggccaattctgcaatcatccacacaatcagccatcaactactctgaaaacagaagaaaatgacaaaaagtggataagcaagcaccgaacaaggcgagcagactacactacccttccgtgctgccggccgccggccggcgtgctcgacctcagccatggcgccctccgccgccgctcccgagatccaggagctcatccaccacccctacgacggccgcgtcacctccttcgtcgtcctctcctgcgtcaccgcctgcctcggcggcatcctcttcggctacgacatcggcgtctccggtaaaaccacccacccaccactctccctccctccctcccactcatcatcgacgacgagctcgccatgaacgacgcgctacaattggtggtgcaggcggcgtcacgtcgatggacgccttcttggagcgcttcttcccggaggtgtaccgccggatgcacggcggcggcgagcgcgtcagcaactactgccgcttcgacagccagctgctcaccgccttcacgtcgtcgctctacgtctccggcctcgccaccacgttcctcgcctcgcacgtcaccgccaggcgcggccggcgcgcgtccatgctcgtggcgggggcggccatcgccgccggcgccacggtgggcgcctccgcggcgggcctcgccacggtgatcctcgggcgcgtcctg

SEQ ID NO: 23954 - DNA, 2981 bp, Oryza sativa
tctttttcttcttcgcggggtggttggtcgccatgaccgccttcgtctacctcctcttgccggagaccaagggtttgcccatcgagcaggtcgggaagctgtgggcgcgccattggttttggaggaggttcgtcgtcaccgactccggcgtcgacggcgaggaggaaggcgaagccattgacgccgataagctctgaacagttaaccgtgcagatcactgactgactatctgattgtctgactgatccggccacggttgtttcagaacagaactggctatatccaacaacatgtgaagactagctagcagcacattttttagctggatttaagtatgtaacaatacatatttgattacacaaaccaatgcttaaacaagcatttagtagtaacttccttttgttttggaggccttacaatcatactagattatacatgtataacattttactaggaggaaatatgcctcaaaattaaagaaactgaaacttaagtttatatatggcagtaggtggatgctacctcccttcggagaggccagagatggtgccatcgctcaccactgattggcaatatgcaacgggtgagtccacctgacggttctgcaccatgtccattggcgccaactcgggaaatggcaagtcatggttaagatactgcatgacatgccacatgcttggctttgcagcaggggattggtgtgagcaaagcaatcctagtttcagcgctaggcatgcttcatcagcatcatactcattttggagctttggatccattgtctcaagaagtgatccctcgttccaacaatccatcacccagtctaccaacaggagcttgtcactattcatcttatgttcaatgggtcttcgtccacaagtaacctcaagaacaaatatgccaaaggcgaagacatcggtgaggggtgaagctttacctcttcgtactagctcaggggcaagatatcctatagtgccaactaggtgtgtggtttgcatgtcagtaccatggtcatataatcttgcaaggccaaaatcacctaagcgtgcattcatttctgcatcaagaagcacattgctagccttgacgtctcgatggatgacaactttctcccagtctccatgaaggtacaataaaccagatgcaacgcctttgattattcggaaacgttgaatccaatctaaagtaggatggttgctatgacaatacaagtatttatcaaggctaccatgtggcatatattcatagaccaatataagttcatctttgcgccggcaatagccaagtaactgcacaatattccgatgccgaaggcgaccgatgctaacaatctctgcaacaaattctcttatgccttgccttgattcatgggacacacgcttcacagcaatctgcatgttagatttggaaaggagacccttgtacactcttccaaatcctcctgtgcctaagaggtgactattcttgaacccttcagttgcaaaatataggtccttaaatgagaacctgtgcggtccaaactgaatttcccaatcttctcgcagctcagcatatctcaaacgcctccgcacaaataggaagacagccaaggttatcagtaagacagatgtggcggttactataggaacaattatcggcaataccttgcgccgtgaagcttcttgagctctacgaggtagatctggtagttgagcagtgaagaaaggaggagtgggtccattcatgctaaagctccagcctagaatataatgactcgaccctgctaagcctgttgcagctgataaacctacatatgcaacatctgagatcactgatgagaggtcatagggcattgacagtagtggcttggtgggtttggccattttgaatggagccaaggccacgtcaatctgctttgcccctccatcgtagtcgatccaaatttgcatcgcctcaccactgattagactcaagttatggaagccaccggtgctgttgtcgtagtagcccgctgaatgagatgtcacggagcgaagatcacatatgtcgatgccgatatggttgtcatcgatgtccataaactcgctattcaatatggtgttgatctcaacggcaaaaacatggttactacgattgccaatgtttctaatgttgaacagacccaggtactgtgcggctaacgcatcagaaaaattagtgcttggggcaaccaagaaaaccatgccttgtgacccaagatcaatgtaaggggagatgatgccaaacaccaaggaggcggagaaggactgcaccgtagtgttgggcgacttgcgaagccggaaaggagtcggatggaaggcatggcctttcatattggccgtactgttggtcagctgtagcaagccccctggcagcaccatggcagctccatcgacggtgagactgctgttggagaagccatagtacccgaactgaccatcgccaatggctgcagtggaggatggaaacgtgataattatcaggatgatggtgaagaaatggagtaccgcaagaaagcaccgacgattctcgccagggacaggcatggctccaaacaaaacctggaagagaggagggaaggttcaacaatagggcatgcaggaagctgcatattacgatgttgcagtgtgctggtatagtgatacagatatggctgccttgctcttcagtcaacgtagcttcatgacaagtctaaaattgtgtgctgtcattcaatctaagtctgctgtgttgacgggccaaatcagtttttccacaaattttgataattcgatcctttgcagaaactatttttacaaatgaaccgttgccaaaacttatttgaaatctgacccttttgctcaacgccaaatcttgtggcgctgaacttagaaacctcagcgccaaatagcatggcgctgaatgtacgttggcatgctgacttagtctctcatccgtcgtggcacggcattcagcgccagctgacgtggcgctgaggtgtctaagtt

SEQ ID NO: 23955 - DNA, 18306 bp, Oryza sativa
catacatgatagatagttaatttgctacaatacaacccttaattcatcacaagaattatgtattttctttgccaagtagtattggaaaaacatgaataatccaataaaatacgcataaaactacttatgttatatttttttatagttgatagagattctaatataccgggtataattgatggacaaatgttatacaccactaaacccaactgtaagtgcactctagcgaattatttaatgtaaataagtttgtgaaaataagtacattcttagtattagtaaatgagtctcgtattcttagtattagtaaatgagtctcgtatagttgcttacaacatatggtggaaacaaatttggcgctaaagtataaatctttatcaaaatataaataatgatatggtgttttgcatattctcatggtggtatgtctctttagctatagtttttattaagtagtgtgaaatgattaaccccactcatttgaaatacatcatattatatatattccattaaaatttgagaagtacttattactaacttcatatgaaaaaaatgcattttcatcacctcctcctttatgtccctctgtccttgaatgcagggtgcagtacttgcaataccatcctaaatattgcatgggtatgtacatggttgtgttaaggtggtgtctgtgaaaggccaccataggcagtgtgactaaagtgacatacttaccatataatcatttgtgagtgtactgataataaactaagtgttaaaattatactctaggatggtttttaggggtatggctacatcgatgcggaacctatatgtttcaaggcagtacatacaaaagccttcgttcgcagatacagtcgacttcatccattagagagacattcatgtttattttaaacagagttatcgtattattcggtagatatggtatatttagactatttatatatagatgcaaaaataagtgatgaacaccgggttatgcaggtcgatgaattttttagtgtattaaaaatgtattatttgttttagtggtactaatacagttttatttattaaaagttgacctaattcttaaaacaatgatagtaagtagtgatgacaaacgaccagtttatatatgaccaggacaaaggtatttttatttaaatctaagagacattattatcacgttagaagtatattaaaatctaccgtctattttatggtaaatatatctcttatttttcttattgtagggtaatctaaattctcttacagtgtgtgtctctctctatatatatatgattccttttagcattattttttttaataacaaataagatgcctgtgcatatgtgtgaatttcctttccgatttatatttcataaatgttctccggtttatatccagtcattatatagtttgaaacacaaactataatacatgcccgcgcgaatgcgcgggctaccttcctagtttaaaaaaaaggctgcatatatccgattggatccagaggccgggtaaaaaataccattgtctaaaaaaatgcttaaacaagcatttagtagctagtaaccattttttttattttagagccctgacaagcaaacaatagtaatacatatacgtgtacactccctccatcttataatttcgcaccatgtccatcgcccccttctcaaaaaaaaaaaaagcttaaacaagcatttagtagctagtaaccagttttttttattttagagccctgacaagcaaacaatagtattatatatacgtgtatactccctccatcttataatttcgcaccatgtccatcgccctctcaatggctcacctcccatcactgctgccgcctcccgtggacaggctcgccatcccttggccctctccccgccagtgagctcctcggggagagggggagaggtgaaaggccaattacatgtgggtcccacatgttctttaatattttttttctaactaggatgtcatgccatccaaaacaattatccatagtgtcattgggtctaacttaaatggttttgtcaagcttgaggtgaagttttttgtattataatttacagatgtcaattaaacttgatataaagatgagggataaaaagtagacttactccgtataaattataggagagtacgaattaccccccgaactatcgcggtcggctgaattccccccgaacctgaaaacagacatcactcaccctgaactttcaatgccggacgaattactccccttgacccaatccagagtggttttgtcctacgtggcgtacgcgtggcaatccagtcagcattttctttctttaatggcagggtccacatgtcatatatactctctctcctcttcccctcttccacacattctctctccctctctctctcgtctccgtcgtcgagcggcgggtggcggcgtgggacgcagaggcaggagcggacacggaggcggcagtggcgagggatgcagaggcggcggcggcggcagggcgggatgcggacccactccctccggcggagccacctgttccaagcagccgcagcacatggacgagcaccaccaccaccagccgatggcgccgcatggtggcctggtggggaggcgctcgagggcgacctgaaatggcccaatgggctgtcgttcttcaccgcgctcaccgcccggaccgaggatgtgaagctcctgtttggcgacggcggcggcggcgcggatgacgggagcaagatggcggcagcggcagcggcggcgcaggacgtggggcacggcggcgtggagaatgtggaggagtacctgagcctggagagcaccaagttcaagaggagcttcacgttgccagcgaggatgagctcgtccaccacgtcgacgccccgtcggtgtgtcaacggcaccggtgccaccgtcgcagcagcagtagcaaagggatggagtacaggtgcccacacgagggccgcgtctactcggacctaatggagacgttcttggagtagcctaagctagcttgctaccacaccaagccgaacgacgaggaacaggaatccgagcgtgtcaacggcgatggaagctcgacggatgaggatctcgcggaggaggtagtcgctgagcacctcgacgccgccgccactgggcccgcgctgccgcccgccacggtggggaaagagaaggaggaggattgccgggttgtcccggcagatcccgacgccgccgggagggagcgggtccgcgtcccgcgcgccctgccgccgccccctctgcgtcccttgccaccgccgcctcgcatccgctcccgcctctgcgtcccgcgccgccgcccgccacgtcgacgacggagacgagagagagggagagagagtgtgtggaagaggggaagagaagagagactatatatgacatgtgggccccgccattaaaaaaaaagaaaatgctgactggattgtcacgcgtacgccacgtaggacaaaaacgctttggattgggtcgaggtgggtaattcgtccggtattaaaagtcagggtgagtgatgtctggtttttagcttcaggggggaattcagcctaccgcgatagttcggggggataattcgtactttttcctaaattatatcatgtcaacaatattttacatgctgggctcaaaattcatatgcttggatcggcccaatatgacggaagtcaggctcggcccactccagcctactccggcgccatggtggcactgccgcggcgacgaagacgacatcatcatggacgcggtggaggccgcgaacgccatcgccggcgtggcgagcttcaggcgaggatgtgtggccttcgtcggcttctgctgctcctcacttcctttctctggtttggcagcgtgattcgtgatttggggatatcaggaggatgaggtaggagaggtggtttcgcgccttgttgtttgatctattgtacaatttgatgtcgttccgttctcaaatttcgatgatagtactgatttaatctgtaccttttcttttattggttgccaaactattcattttgagatggatgtttagatctgaaagactgaaactgctggtatgttcatacttaatgaaccttgtgcaaatcattgagctgggttaccaagatttaaagagtcaattcatcatatctctctctcctgggttccttgatccctaggattttttttccttttttgggggggcttatgccttgcgacagtataatgttgtatgtacctggctctttttttctctcttcttaatacaatatggttggtcgatttttcggccgacccggctaaaaaaatatctctctctcctttctcctaaatgaggttgctcaactagcactacatttgtttacatttactcatcttttttaaaaaaaaatccatttttgtgtttgagaatatttgtcactttacctttttggaacaattttgtttttcatttacatatgatcccatgatatttccatatagtactgaaacatgtaagataaacaaaagaaaagaaagaagacgaacaaagtcctcccatttgtaggcagtttattggtcatctggacaaaggaagtcgatggaattgtcttgtcctagtgccatggttaatagtcaattaaacaaaacgaagggggtaattgacactgacagtgtggaataacgctggtgggttgcttggaaagttaggcatcgggcattgttggttaacaggactgtataatttgtctgatgcttctgcaacttttgctttcactagacgatgacgttactctaatcagccctttttattctttaaaaaaaaaagaagtctcgcaaagacttccttttccaaattgacttcaagagtcaatccattctttttcttccctttgtgaggtgcgatgaacagtgtgcatgcatcgttgttaatttgctacttttaacttttctgtctgttaagaatatttgcaactccatgtttttcaaggtggaaatttcagttttatgtttttatggggccataatatttaaccatttggtattaaaacaaagttaaaaagtattgcatttttcctttaaccaaagaaaatatttaaaacaagctcaatcccacttagggcccctttgaattgcaggaatggaaaaacggaggaataggaaaacgcaggattctaataggaatacaggtgtaaaacagaggattggaaaatacaggaaaaacacaggaatgaccgtttgattggaccacaggaaaaatacaggaatcggatgagagagatagactcagggcccctttgaatcgcagggtagaaaaaaacggaggaataggaaaaacacaggattctgacaggaattgaagtgtaaaacagaggattgcaaaacacaggaatggtcgtttgattggagcgcaggaaaaacgcaggaatcggatgagagagatagactcaaaggaaattttccaagaggttggagctcttgctaaatttcctccaaaatccacatgcaatatgccattccataggaatttcataggatttggaaagcttcaatcctttgaatcaaagggccaaataggaaaatttcctataggatttgaatcctatgaaattcctacataaatcctttaattcaaaggggccctcaaagaaatttttccaataagttggacctcttgctaactttcctccaaaatctctataggatcacccattccataggaattttaaaggatagtataggattcaatcctttgttttaaaagggttttataggaaatttttccataggattgaaatccttcaaatttcctatgcttttcctataaatcaaaggggcccttaggcttttttttttctgactggtagtagcattacatcatgctagaattaaagaagaggacaactgaaggggcaaagaaaaaattgatttccatcttgtcacaactaggccttgtttgaatctgcaatttagtttagcctttttttttttaggagaaatttggtttagctttttggcaacatgtaaaacgagataatccattagcacttagaaacttaagaattgggtttatttgattttttttaacaaacttctatgtaaaatgttcttaaaaacacacaccgtttagcagtttggtaagtgtgctaatggaaaatgagtaagttctattttggagttgaagaaaagaatgcagctggatggtatttgtctgcataccatggtcgtggtgcgtcaccaagtcactgttcattattattatttggttgacatactggcaacgcgtatctgtagccaaatctaactactactccctccatttcataatgtaagactttctagcattatccacgttcatatagatgttaatgaatttagatacacatatatgtttagatttattaacatcgatatgaatgtagccaatgctagaatgacttacattatgaaacgaagaaagtatatatattttgctattgccactccagctttgcattggtactactactactacactagccagctagttatacattgctactccagtgttgagatgatcatcccatctactcacatcatgctgtcggtggtggtcttgctgctgctagctgcagctctgcccatgagctgcagcaatgacactgacctcactgctctacttgctttcagagctcaggtgtctgatcctctcggcatccttcgtgttaactggacaaccggcacatccttctgcagctggatcggcgtctcctgcagccaccatcgtcggcgacggcgcgccgtcgctgccttggagctccccaacattcctctacatggcatggttacccctcatcttggtaatctctccttcctgtctttcatcaatctcaccaacacggggctagaaggccccatcccagatgatcttggaaggttaactcgtctcagggttcttgatctcagtagaaacagattgtcaggcagtgtaccatcatccataggaaatttgaccagaatccaagttcttgttctaagctacaacaacctgtcagggcacatcttaacagagctaggaaacctgcatgacattaggtacatgagtttcatcaagaatgacttgagtgggaacatacctgaaaacatattcaacaacacacctctgttaacctacataaactttgggaacaatagcttgtcaggatccataccagatggaatcggttcatcattgcccaatcttgaatacctatgcttgcatgtgaatcagctcgaggggccagtgcctccctccatattcaacaagtctagactgcaagagctgttcctatggggaaactacaagctcactggacctatacctgacaatggaagcttcagtcttcccatgttgagatggatcgatctccattggaacagtttcagaggccagattcctactggattggcagcatgtcgacatctcgagagaattaatctgatccacaattcattcacagatgttttgccaacatggttagctaagctaccaaagctaattgtcatcgccttgggcaacaacaacattttcggaccaatcccaaacgtgcttggtaatctcactgggcttcttcatctagagcttgcattctgtaatctaactggtgtaattccaccaggattggtacacatgagaaaactttcaagattgcatctctcacacaatcaactaactggcccatttcctgcttttgttggtaacctaactgaactatcttttctggttgtgaaatccaactcattgacaggatctgtaccagccacatttgggaatagcaaagccctgaacatagtgagcatcggatggaacttgcttcatggtgggcttgatttcttgccaactctttccaattgcagacaactccaaactctcgacatatcgaatagtttctttactggtaatctccctgactatatgggcaacttctctaatcagttggtaattttttttgcatttggcaaccagttaactggtggcatccctgcatctctgtcaaatctaagtgctctcaacttattggatctttcaaacaaccaaatgagcaatataattccagaatccatcatgatgttgaaaaaccttcggatgcttgacttctccggcaatagcttgtctggtcccataccaacagaaatctctgctctgaacagcttagaacgattgcttcttcacgacaataaattatccggtgttttaccacttggccttggtaatctcactaacctgcaatacatttcgctgtccaataaccagttcttttcagttataccaccaagcattttccaccttaactatcttcttgtaatcaatatgtctcacaattccttgactggtttattaccattaccagatgatattagcagcttgacacaaattaaccagattgatctatctgctaaccatttgttcggtagccttccggcttcactcgggaagcttcaaatgctaacctacttgaatttgtcatataacatgtttgatgactcaattccagactctttcaggaaactatcaaatatagccatactggacctgtcctccaacaatttatctggtagaattcccagctactttgccaatttgacctacctcacaaacgttaatttctccttcaataatctacaaggtcaggtaccagaaggaggtgtgttcttgaacattactatgcagtctttaatgggtaatcctgggctgtgtggtgcctctcgtttaggactttcaccatgcctgggaaattctcactcagctcatgcacacatcctaaagtttgtattccctgcaattgtggcagtaggacttgtagttgcaacttgcttgtacctactgagcagaaagaaaaatgcaaagcagagggaggtaataatggattctgcaatgatggttgatgctgtcagccacaagataatctcctactatgatattgtccgtgcaactgataatttcagtgagcagaatttgttgggatcaggaagctttggcaaggtttacaagggccagctgagtgacaatttggttgtcgcaataaaagtccttaacatgcagctagaagaagctacgaggagttttgattccgaatgccgagtactgcgcatggctcggcaccgcaacttgatgagaattctcaacacctgttccaatctggacttcagagcattgttgcttgagttcatgcctaatgggagcttacagaaacacctacactcggaagggatgccgcgccttgggttcctcaagagattggacactatgctggatgtgtctatggcaatggattacttacacaaccagcactatgaggttgtgctgcattgtgacttgaaacctagcaacgtgctatttgatgatgagatgacagcacatgttgccgatttcggcattgcgaaactgttgctaggtgatgagagctccatggtttcagtaagcatgcttggaacaattgggtacatggcacatggtaattaatttgactatctttattcctttatgcagcagctcctctgtcattacatccgttgattgatacttctgtagctaaacccagcttttgttttgcaataatttttgttgtcagagtattgttccatggctaaagcctcgaggaagacgatgtgttcagctacgggatcatgctactggaagttttcactgggaagatgccgacagatcccatgtttgctggagagctgagcctcagggagtgggttcatcaagcatttccactgaggcttactgatgttgtggacagcaatcttctgcaggactgtgacaaagattgtggtactaaccacaatgataatgcacatgaagatgctgcttctagcaggctgatcactgaccttcttgtaccaatatttgaggtgggcctaatgtgttgcagccatgcacctgatgaaaggccaactatgaaggatgttgttgtgaagttggagaggataaaaagggactatgctgattctacagggagccagaggactgaataatatctgtacaccttccgttccaaaaagaatcaaatcctgactataaatctacataagtgtttgtttagattcataactaggatttgatttattttttttaggacgaagggagtactagtttgagagttgtaatatatatgcagattggggagaagatattaaagtattcagcttgaagtgttctctttattactggtcattgtgttgatttagttgtccaagtagccgatgtactgtttttcactgatcaaaactatggttgattagtaaactgatttttctctgaaacttttaccatgatatgatttttgttttcctgtgcctactgcctaacatcactgactgacatccgattgtctgactatcagtgtttcagaacagagaacaccactggccatctccaggtttgcctcatctccaagaatacagactcttcactctacggactagtaacaagatttttagacatccccgcaaaaaaaaagaaagactttttttagatggttgtaagtatgcaacaatacgtatttgattacacaaacccatgcttaaacaagcatttagtagtaactttttttttattttagaagcctgacaatcatactagaattaactaggaggaaatatacctcaaaattacaaaactaaatcaagtaactaggtgtacatatggcaatagatggatgctacctcccttcagacaggccagacatggtgccatcgctcgccactgattggcaatattcaataggtgagtccacccattggtttcgcaccatgtccatcgccatcaactctggaaatggcaagtcatggttaagatactgcatgacatgccacatggttggccttgcaataggtgatgggtgtgagcaaagcaatcctagttttagagctaggcatgcctcatcatcatcatatccattttggagctttggatccattacctcaagaagtgatccctcgtgccaacgatcaatcacccaatctaccaacgtgaacttgtactcactattcattccgtgctcaatgggccttcgtccacaagcaacctcaagaacaaatatgccgaaggagaaaacatcggtggcgggtgaagccttacctgtgtttgccagctcaggggcaagataccctatggtgccaaccaggtgtgtggtttgcatgtcggtgccatgatcatataaccttgcaaggccaaaatcacctaagcgggcattcatctcttcgtcaagaagcacattgctggctttgacatctctatggatgacaacttgctcccactctccatgaaggtaccataaaccagatgcaacacccttgattattcgaaaccgttgattccaatctaaactaggacgggtactattacagtgcaaatatttatcaaggctaccatttggcatatagtcatagaccaagagaagttcacctttacgccggcaataaccaagtaactgcacgatgttgcgatgccgaaggcggccgatgctaacaatctctgcaataaattctcttataccttgtctcgattcatgggacaccctcttcacggcaatctgtagcttagattcaaaaagaaaacccttgtacacccttccaaaccctcctgtacctaataggtgcctattcttaaacccttcagtagcaaaatataggttcttaaatgagaacctatgtggtccaaaatcaatttcccaatcttcccgtagctcggcatacttaaaccaccttcgcacaaagaggaagacggccaagctcaccgcaacagcagatgtggcagttgctataggcacaattatcagcaataccttggaccgacgagaaccttttcgatctgtacctctacgaggtaagtcaggtagctgagctgtgaggaatgatggagctgatccattcatgctgaagctccagcctaagatgtagtgacttgtttctagtggcccagttgctgctgacaatccaacatatgcgacatctgtcagcaccattgagaggttataggacatcaacagtagtggcttggtaggtttggccattttgaatggagccaatgccacatcaatccgcattgcccgtgcatcataatcgatccaaatttgaatcgcctcaccactaatcaaactcatgttctggaatccaccggtgttatcatcatagtatcctgccgaagaagaattcactgagcgaagatcactgatgtcgatgccgatgtggttgctgtcgatgtccataaactcgttgtttcgtacggtgtcgatctcgacagcaaaaacatggttgctcatatttccattgtttttgtaattgaacaggcccaggtgttgcgccgcattcgcgtcggagaagttagagctcggggcgatcaagaaggccatgccgtccgtgccaacctcacggtaggcagagatgataccaaacacgatggacacggagaaggagtgcagcgtcgtaccgggcgattcgcgaaagcggaaaggagttggatggaaggcatggcctttcatcatgccggtgccattggtcagctggagcaatccccctggcagcaccatggctgctccatcgacggtgagactactgttgaggaagccgttgaacacaaactggccatcgtcgacagctgtagtgaaggatggaagaagaccgataccgagcttgatgacgatgatgatgaaaaatagtggaagaaagctcgaacggttcatgccagacatggctctatgaaaacctgagagagagatcattcagggaagaggtttaacaacagggggaagctgcatttgttgcagtgtgctgctatgtggttgcacttgctcttcagtcaatatagcttcatgtcaagtgtgtacgggtaaatagctagtctgctactagaaatgggagaggtgggcactctctttctcgaagaaagaaaagaagttcatgtcagagtctaaagctgtgctttgttttgtctaagtttgaattgaccgggtgtcccagttagcagtttttccacactgcacctgcaaattagtagcgcaaatgagaacatagaaaatctcctatgcagggtttaatagtaagctcccttcaatcacacagacacacacaaaaaattcatgcagccaaattatatgggcagtgatctaatctcaggattaattggacttccctagattttcctgatttctctttttgtaatgaactattgttaaagagtttttttactgtccaacgtaccacgcggtaccatagcggtaccaaatgctggccgttggatctggcctgatccaatggctggtgttgcgtggtaccgcacggtaccaaaaatgtcccttaggtggtcccgcatggagaagagagttggaagggtaaaagagtaacttcgtgtgcaatagatgggtctggattgggcggctcgaaccctagctatgctagatgatttttgccgccgccgccgtgttcctcttcctcgccgccgccggacttattcctcttccgccaccgccgaacttgttcctcttccgccgccggacttgttcctctcccgcgccgccgtccttcccttgttcctctccggcgctgccgtcgttctcttttttctctcgcgcgccgccaccggactttatcctctcccgcgccactggcgttgccttgttgctctgcgccgccccaggaacggactcgaacgccgcatccacccttgctcatcttttctctcccgatcctacccatcccggattcaacggtagatgtgttttggttctgcggggtaccagtaccgcccgatacaacctgttgggccgtagcaatcctctttgttaaacgttttggttgcatcttagttaatttcagtatggttttgtcacattgatgtaattgggagttcagtaatagcttcttttatattaaaaaataggtttgaccattttgggcacatcaaaaatgatatttgctgaaaaaatgattttgcagtattttacttaggtaatcgttaatgatatttgaagtttcaaacaacaaaaaaattgaacggatgaggtacttcgtgaaccccctatatgctctctacttctactcttatagcggtgtttaaaaatccatgcaaatgaacgtttcaattttgaaagattagtaactataaataattggatactattgcaagttggaattgaaggtctcaaaagtacgggtcacagtcacaacttacagaccataaaaaactattagtgtcatgcaattcacactgcagggtacacctaccaaataagagtcaacagaatttatatatttttagaaaatggattaaaacctagtctctgcatccacaaggattgaatggaaaatgacataaacaaaacaaaggggttgccggtggttgtcggtgtcggcgtgacacccacatcggcctattcaaggggtggacgctgttcttctccgtagctcccaggtgcttatgccgtaggttacagttttataccagcaaaagattttctttttacaagagatattcaatataatacaaagttacggtttttagagcaagttttgaacacgaactcgaaaactctcttaagaaatttcagctggacagggaatcatctttaaattatctagagggaagagggagaagtatagcggacttcttcaagatgagccatcgatagatgcatccttttttggtggcgacgatatccaaagtctaaactacggaaagagatcgagggattagccttttggtgttgggtggtgatgagaagggggtagatggcatggtttggagggatggctgttttggtcattgttccaaaaatccatatatatatatagtcaatataagttagctttagctatcattcttacttttgaaatattacaaaattttccatttttagtatatcaaaagcttttttaatagaaaaagcttggtagcattatatttatgtaactatttctttttttatacaagagaattacatgatcaaagttatgctctattgactcccaaaagtatgaaacaacatttttctttaattggatggagtaaattaactgtcctcctgtttggttcggctatatatttgggtggtagcatataattcttaattatagccgaatatgcgcaatctagatagaaggcccatcgaaatttcagaatttagggccttccgtaccatgagaagtgagaactaaaaacatggacaagcccacagatgttcaattaaacaacacaaagcccatttaactaaaaagaaaacaaaagggaaaagatggacaagacacaagatcacagatactaccttcgttttcatataatagatagtgggcactattcattttcaaactttgatcagtcttggctgtgtacatcctccttcagagccgggttttctaatccattttctaaaaaaagactttgatccctcgtccttttttttaaaaaaatacaaatattacaaaagatacaaactgtatttcatcttaaatataaccaagatgctctcattcgttgtagtataaccatttaagagtaattatcgatcaaagttgaaatagtaatagttatggttcagttattgaaaattggggtagctttttttaaagccaaattaacatgcacatcagcctgaactttcagatacaattgcctgatcaatcttctgagtacaggtctcccagttacaagtatggctccacagtcaaaacagactgcctgttcacctccgtgagactgaggacatatggatagactgaccagaggccatcgatcgccttcacgttagaatcggttcacccccatgaatagtggcagatggggacgaacgacggcttgaagatggaagaaggaactcgcagctgagctgttcatggctttatcagaacacaggaattttacaggatttttaaaggaaatgttcggttcctccaaaattaattcttgctaaaatttctccaatccgactaggcatttagtgtgaacaaaaacaaaaaaaaataggagcgagataactacaagtacataaataatgttacatacgttagatttccctcaacggtgctcaaaatttttctagcaactatcaactatgcaaataacaactagtactaacaaagaaaaacacatgttgagaggcctatttcctatgtgtgtaaattctatattataaaattataaaaatgttaagatatgaagtccaattatctaaaaaaaattaagtggagggctatgttgtctacttcgtattgtcccaacggaggcttcggttgattttgactaaagtccatgttaggtttgagcaaacttgcattgagagcttatcttcctccggagaggtcagttgatactgtaccaaagcttgtcgacggtggcggagaagacacgatgatatgctcctgcccttcatggcttaggagttgtgccaatacctcatctgggaatgatatatcgccatccaagaattgcatgacttgcctcatgttgggccttgcactaggcaaggaatgtgagcatagcagccctagctttagtgctaggcatgcctcatcaatattgtattcattttgaagcctcttgtcgacgacatcaataagtgattcattgcgccaatgtagaagcaccaaatcaaccaacatgatagggcaatcttgctcttcactttgcataatgggtcttcgtccacatgtcacctcaagaaggaacatgccaaatgcaaacacatcggtgagaacagaggccctgcccatgcgtgctagctctggagctatgtatcccatggtgccaaccacatgtgtagtttgtgggtcactgccatggtcatataatcttgcaaggccaaagtcgcctagccgaccattcatctctgcatcaacaagcacgttgcttgccttgatatctcggtggacaacaactttctcccaatcctcatggagatagagtaggccagatgcaactcctttgatgatgtggaacctttgagaccaatctaggttttgttggttatcatggttgtgcaagtatttatcaaggcttccatttggcatatgatcgtacaccaatagaagctctcctttacgtcgacagtagccatgtagttgcacaatattcttgtgacgaaggcggccaatactaacaacctcagcaatgaactccctcattccttgccttgattcatgtgacactcttttcactgcaacttccgactttgattttgtaagcactcccttgtacactctcccaaatcctccgatgccaagcaagtgtttgtctttgaacccttccgtagcatggaataggtccttgtaagagaaccggtgaggaccaaattcaacttcccaatcttcgcgcagctcagcatacctcatttgccgtcgtctaagtacaactatgccactaacaatagcaagtactaatgttgcagtagctacaggaaggatgattatcaataacttggattgtggctttgggcctaaacgaggcagctttggtagtttcttgacatcgatgaccggagctggttggttcataccaaaactacaaccaagcacgtagtgatgtgtatcaagaatacccgttgaggatgaaaaaccaacatatgattgattcttgagaacctgtgataggtcataagtggttgtaagcaatgcccttgctggtttggccatatgaagaggggccaaggtcacactgattaacttcctctcgccattgtagtccacccatacttgcattgcatcgaaagaagcaagagttaggttgcagaaggtaccattcttgtcatcataatagccagcgttgtaggaatccacggacctaagatcattgatgtcgatgccaacatggttgtcattgatgtcttgcatatcgttgtttagaacggtgtcaagctcaacggcaaagatatggttgcttgtgttgccgttgttcttcttgttgaggaggccaagaaactggttggagaaggctcttgagaagttcttggtcggggagacgaagaaggtgaggccctgcgcgctcactccgggggcgatagaacggatggcaaacacgaaagagcggagaaggatcgcaccctcgtaccattggaaccatgctcgtggaagcgcagtggtgttgggtggatcgcatgacctttggactgtgccatgccattggtgagctggaggaggccatttggggtgaccatggccataccgttgacgaggatgtcggtgccagagaagccagagtagaggaatcgctcctcttctccagcagcagcgaagaacttatggctgagagcaaggaagagaaagaatgttttggttatgattttgatgcccacccattgctctggaaaacggatgaagctagtttgcttcaagccatg

SEQ ID NO: 23956 - DNA, 10185 bp, Oryza sativa
attcctgcagcccgaagctagtttgcttcaagccatggtgcaggtggtttgttgcctgcagttgcagtctataattaaggcagaatatatatacagtagaagttgcactattttattccagttctgaaccgtacctgagctgtttatgactgttaattactcgatcaacgctgaagaatatggtcatgcaagtacattagttcagtcctttcaaaatcagtgaccatggctaatcatacacgtttatgtcctcctcataatctaactcaacgtgggaacacgccattggattaaaattaagttatctttgcatcattaagtcataattttctagttcgagttgagcttgagctatgatctagcacgagttgctcaactctgactggtcatcacaaatataacaaattacttagcattctagaaaaaaaatgaatggaacaaacaagagactatgtatcgatggttcagtctattcagaattataacgacatccatccaatcatatttctccaaactaatccttaattcacagaaggaacaagtcttttcagcatataatttgtcaaaacattttgctcccaaatagttttgatacttcataaggtgattcagtcacagtagtgtttcttttctttttagtgattaccaggtatattggacatgtgcaattagtcgaaaaaagaacagtagtttcgtagtcaaagattcctatagaatagagaaacggttttcctaagaccatctctgggggtttggcttatcaataatttggagaccattcaatggtcaacttcatagcatgtggggctgctaagcttatcgagagcaaataaagttacaaaattaaggatattattctacagtcaataattgataaagaaaaggaaaagaaagaagacgtcgaaaatggaatgtccaaggacaataatatggatgaccaagttgacaatttcacgcaccataatatccgcatactcatccactttccttcctcgcccttctcattcgttcctcttcgcttcagccgtcctccttccttgaagggtatattggtcatatatcatatgatttatttacgattttagtgataagtgtgtatttatcaatttgtgcactatatagattaaatcaacaccttgatttcacacaaataccccttcctatccaaaatgcaagtcattgagagtattgacaaggtctataaagcaggcaatttgatctgagtaccaatttctagaaaactataggctttgatcggttgaactatagttgattagccttagaaaaatgagcgaagcaactgaaaaacagttaatgaataaaacttttatgtatgtttctattaggagatttattccggtccaacaaaaaatacctcgagataacggtaccttacggtactaaatcgtttccgatcgttggatctagctgagcagaatgggcattgttagattcaatgatcggaaaggatttagtaccgtaagttaccgctacctcgaggtactttttgttgaaccagagcaaatatcttctattagagatttaaaagccacggttcaaaaatagactacattaaaaaaaatcaaaatcaactctaaagctaagttttataattaaaattttagcagtggctacatgttatgaaagtatttttcctgatgaatacaacaacaacaacattacgtctccagtctacacaacattgatggtcaaacaaaacagtttgccaacacattctaaaaccatattttgggttgaaggtaaaaactaaaaaaaaaaaggccttttcctctcttttaatttttttggtcttgtgaaccaaagcaacaagccggggcccaaaccattgttgacggtgaatttcgacagtggagaccactccagatctagggaatgaaccttagctaagaaaagaaaaacagatcagccttaattaacagagacagataatgcagacacatgatatgtagacatgagcctgatcgactgtccaattaatctgcaggcccagactgatgaaaataagcactagtgtaatccaaagtgcatctcagggtgtgtttagtttacgtcaaaattgaaagtttggttgaaattggaacgatgtgatagaaaaattgaaagtttgtgtatgtaggaaagttttgatgtgatggaaaagttggaagtttgaagaaatagtttggatctaaactaggcctcattgtagtaatgtactatgctctgctccgagaaattccgaaacagatctcatttggcaggaggaagaaattggcagagagaagaagaagaatggggaacagtaggtgactgtgagtgaatgtgtgatggactcgcagtaaagtgaagtaaagaaaagcagatatgaatatgatcttgctgtcaaagaagaaattgaattgaaagaaagtaggagtagcagtattagtacagtgcagtgggggactgatggtggggggtgagctagctaggtagcttagctgtgtgcagattgtcggcatccggggagaatcccccacaaccacctttgctctttcttggatcatgtcatcctggactcaatcaatcaagtggtcatgttcatctcccagctctctctctctctctcaattctcacgtcctttttgttgtacgtgtcgatgtgttcatggcttttgctcctttaatctggcactacacttccagcctgtcttgccctcctctcctgatgatgatttcagtggtacagttttatatgctcaccatttttgacaatgttgcagatccatctgttatgctagcaaagtagcaagtcagtattaggttttactcgctttgtcgactctttcttttttcccgagggaacaggcaaggagttcatgcaattcattatagaagaagagaattgatctagtttataaggaaaaccagacccaaaaaccttacaacagtatggttaatttgtgaaaaccaacgaaaactctagcattgacagactaaacctaaaaactaaggacagccgtccattaaggaaaaaactcctaaaacgatgccctcaagaaggacacgccgaccgaacggcgacattgtccgatcctacgaatctaggattttcacccggagaaaccccttgatgtggagttgaatgagggctccaatagcaatgccttcaagaaggtgaacggtgcatgagagcgtcaccgttgttagcatcagcaagccgagtaaggctttcaccttggagtctcatccaaacaaagtaaccgcaatggaagccaccaaatgccacttgcacatcgaaggtatctgttatatgcacacaaccacctgcacattgttgacgacctgctcagccaccacgccggaccggcggagcttgccggcgccacccgaactccaccaccgtcggtttgcactggcctcacgccaggacctgcggagctgcaggagaggtgccggatctgggcctacgcggccagatccgaccgtccccgcgcggccctcgtcgtcgaaccgggagaggagacgccgctagcccgaggacgaaggccactggcgctgggtggaggaggcaagccgccggacaccccagatctggagaaaaggagggagggagagaagagaaaggatgaagaaggagacgggaagaggtagggagccgccgccgtcgccagcactaccatcaccggcggcctcgctggcggcggcaacacaagcgagaagcggccggggagcccccgcgcgcacaggctggcacagctagggcgagcgacatggaagtcacaggaacatcatggggattcggagatcctgacgctcccctctataatcatgacaaaattctttttcttaaaaaaaatagtatacgctaaatttcgggtgactgaagtttccccaaatctcattgaattgaaatataacatcgtcttcaacctttagatgatggagagagagaccatgggaatagggtggtttctcggggattagtgggatggatgggaagaaggcgaatcagcagtgggcaagaggcgccgttgccgccacgggagctatggggctagatcaggaaagtggtgggcgaggttagcgacgaggatgtcttggtggtgcgagctatcggaaacatggaagacgagcgaggtaggggaatatttgccacactatttggggaggagaatatgagaggggtgagaggggggaggggtgggaagagggaagcgataggcacaggcagcgctcattgttagcagtgggactaggaagtagcgaattggggatagggagatgttgtcgtagtgcgagtggctcaatctggtcgacgcattgtggaatcgggggagagagggtagaggggaagatagggtttcatgtgctgcatgaatctcggtgcaatctaagccgtccaaacgtgactaatttttttttgatactttcaggttacttgaaactaaacagttccattaaaaaaaactaaaaattgtggcgttcctattcttcactaatctgcttttatctctcttttgctgatgctaactagcgctttaattaataatttcagctgatcatcaggctcaactactgctagaagacagtcctatcagcaaaaacaaattggtactggtattagtaagctgagggttgtcacgtacgacacgcacacgcgcactctgccaacactaccaacacaaataaattcagcagctactctccacaatccacattactccagcagcacacacactggtactgcactgcactactgctgctctgcctgatcacacacactcacctctcaccactcaccacatgaggtttatcaatgctgcactcactcacctccatgacacctggaaacaccagccacctgcctcaccaattggcctcttcatttcactcctctcactcccagtagctgcaaaaccaaacaccctatcttcttcttcctcaactactactcctgttcttgctactgcctagctcagctactctgcttgcccccaacctatccaacctactaacattgtagtacactacacacaagcctagcttagcttaggttgcagctgtgtgaggtggggatccagatcagctttgctgttggagagatccatccatccatatagctagctgtaactacatacagttgttcattcagattcaggcattcagccactgcctgatttaggtgagggaagaagaaggttcaagcaactgcacaccagatggtccatctcttgccatgcacccatgctcacttgcccctgcctctcttcttctccatcctcctcctcatcttctccatggaggtggcacattcagatgcaagtaagataccaagatccctctctctttttgctttctttctagcattagcttctcactcaaccatatttgtacttcttcatatgcatagggaggttgccactgaagcttctagaagttggcaacatcaaggtaatcaatcaaacaaccaaccaaatgagttcttgcttctgccacattgttttcctttcaatcaatctgagtttgcatatgtgtgtgatgttgagtaggaggagcctgatgaaaccattggagagaagatggagatggagatggaagggaggaggctgataggatcaaggccaccaaggtgtgagagggtgtgcatgtcctgtggccactgtgaggcagtgcaagtgcccattgtgccacaggtgattcagaagacacaaaccaaagctgctgctgctgctgctgccgagcaagaacagcatgtggtggtgagtgctactgccatcagtgctgcagtgttcacctacagggtgaatggcctctcaaactacaagccattgagctggaaatgcaagtgtggtggcatcatccttgatccataatgttccaactcatggcagatcacttcaacattgtgcaaaaatgtaaacaacttgctcctctgcttgttcatctgaatttttctttctttgttgttctactactagctagtagctacttcctccttttgatttctatctaggccagagattgaaaatgtggggagatggagatgaaaagctgcatgtttgttgtacatttaggcagcaattttgtgaaaatgaatgaatgaatgaatgcctgatttaggcattgaatgcattttgatttggccctgacttggaggcacaggatattaaattgttgtgtgcattcaagccaatgaaatgagccatgaggcatggtagggacaaacatctgctctgctctctctctctctctctctctctaattgtgtgagtgtgagagaacagcagacagtacaccagaccagtgttaggtagttgtcattgctacagtgaaataaatatatatatacatatatgttttcttattcaatattaatcagaaggcatcatatttgttcaacaaatgcaataatattactacaaacagcatataaaaataattcaaactgaggataaagcctaggaaacactctcaattgttggtgtacttgaagaaaaggcgcgtgtccacaaaatgctgattatacaacaagttagtactcctatccagggtttacctttcagtttccaaagtgaaaaccgctcccttccggtttatcaaaaccaactaaaaacaggtaaaaaacgatgactttctattaacattgcacgaaaccagctaaaactaatcgatttccacgaattgacaaccaacagtttcacgaaaaccgactggttttgttaacttgctcattcatagggaggattgaaggaaatgcattgacaaagaaattaaaagaaaaaaaaatagaaaggtagaataagaaaagttttgtgatgattggacctttctgcagcaagcaatggcggaccactagaaaagcaggaggcaggccagggaggcagagagagagagcttgaccagagccatggctgctagcccggtggatgggatgatgcagatttgcacatcatgcagaggcagatcgaacaggtgtgtgtccatccatcgtccatgcatgtgacaatgtgagcagcaacatttagggtttgttttgggagcttctagcagctgcagcttctccaaacagtctagctttttacccaagttctaagaatctgtagttgtagaatctggaaaatgaactagaagacagaagctgggtttcccagcttacccagttctccagattctcaccagctagcttctcgctgcttctcagaattttaaactccccaaacaggcacttagctagagtagatgcagatagagagatagtaggagtagatagatgcatgcattgatctggtctggtctggtcaggtgtgctctccctttcatggcacggctggactggtcactgccatcggcccatcgctacatgctgcaccatgccattccaatgttcattacttcagatatataggagcatttctaggcatttgatattttgattcacatgcataagtatttttggagcactactttcttaattcaatcaccttaaattttaaaatgtagtcggttggtcgaacgctgattatgggtaaaaacgtttatatccgtccttattgattgaacgagaaataaaatgtaatggaataaccttaaattcaacttcaaaattaagttttaaatttaatttttgtcagtggcttgtaggattctctataccattgcatcattgtacatgatttttgtaaactactatagtaaattcttagaggcatcacaataatatctgcaaaaactacgagatatgattaattacatcggaagcgtagcctatgcacacgggctctcacatgtacacactgtgtataccaactaaaaattatcacaaaaaattctagaaaaattcatacatgtactttcgtactccttccgttttaggttataaaacgttttgactttagtcaaagtcaaactgttttaagtttgaccaagtttgtagaataaagtagtaacatttttaatccaaggcaaatttattatgaaaatatattcaattattgatttgatgaaactaatgtagtattataaatattattatattatctataaacttagtcaaacttaaaacagtttgactttgatcaaaattaaaatgtcttataacctgaaacggaaggagtattacatctacatgcaaagtcgcatctccaaaatcattttacatagagagtaaaaaaaaacaaaatcctgacagaattacaacctcaaaattgtaagatttttttaggctaaaatataataaatttgaggttacgattttattcctaggtgtaatacaattgaaagtatatgtatgaattttttctaaattttttggtgacatttgttagttggtgtgcatgtgtgtacatgtgagatcttgtgtgcatatataggatatgttgtctaattatatcatgggcggagtactatttaaaaatagtttatttttaaaaaatggattttcttttagatgcggttacttaagaccactgtctctggaaatataaacaaccgtatttcaataaaaataatcataacattttcatatgaagttaaatgggataaattttatatgaaaactttagccctagacgagttgtattactttgaagtcgaaaggcttttcatttcaaattgtttaggggtcaaatattcgctacaagttcctagtctcttctgaattttattttttttcttttgtatttttcaagcaacctaggatagagataatctatatcaaagttatatagaagttttatagctcagcaaggttcggagaggtgaattaagaagagataatctattctataccactgagtttgtgtgagttcaattatttgccatcgacattgtatctttctataatataccggccactttatcaattgttctacaatacgtcactaggttggacattcttttcaaaaatacccaaaatacccttatgaacatacaaggttaacaattgatttatctcactagaaattccaaaaaaatatgaaaacttttatgtggcctctttacacaacatggaaatttttataggagtttcaagttttttcatttctttttttaaattataacttatatgttatattgtatataaaaatattttttattattgtttttaatataaatcatatttcacacactacataagatatttttatgctatcatctcctttataagcgatttatctcatataccacgtaaaaatattttttgtaaaaatataaatataccaaaaaaaatttaaaacttgtatacaaacttccatgttgtgtaaggaggccacataaaaattttcatatttttttgaaacttctaatgagataaatcaattgtttatcttgtatgtctctaagggtattttaggtatttttgaaaagaaggtccagcccaatggcatatcatagaacaattgctaaagtcgtcggtatattatagaaagagataatgttgatgacaaatagttgaactcgaacaaactcgatggtatagaatagattctctcaattaaggaatagggaacatcctcctttagtcaagtgatccataagtgagttaaggaggttacggcccatttgattcagattattgagcggattattatcgtgaaatatctaattaattaccaggcaacttaaaattttaataaataaacttaacaaacaacttaaattaagtggtaagtaatgcaatacaagaaaatatatctttttaaaaaatatatcttttaatgtatgaagcaaataatccatttcaatgatcccgtaaataatccgaaaagaacaggacaccacacatggagagagagaggtccaagagaccaagagcgtatatcatgttcaaaatcgcgtgacttgtggcatagaccatggatttagtgattttgtttctctgagaagaagctataagcagcttattgtccctatgggtttagtgatttgtgctcaacttacaattagagcaaggataataatgggctataagcaagctatatgcttatatgaaagagaaagataaagaaaagtgggtagtgttggctcttatacaagagccagcttcacataagctccaagaaatatgaattaaattcatagagtgagaaagagagagaatggaaaaaataaagttaaacttatagctaatttattatacaagttaactctaacattaacttatagcaagtagtgagctattgtattaaacttgctcttacatgg

SEQ ID NO: 23957 - DNA, 6508 bp, Oryza sativa
taaacatcactctgtcatctttgtttgtttgcctacctaatcccttctttcttctgtatagttggtatgcacttaactcattcattgctataaagctgatcccacagtaagccacgtcatcaaaattaagtaggccgttggattttgatctgaacgatcagtattccctagctggctggctcacaaaactggcggctatatcttcctctcgcaggatctgtttcttccatccctaggtaatggcgtaatgttactctagcggctgcttccttcctttcttcagagtatggtttgctagagcaatcacaggttactactcgccttcgattcctcactttgagtgctactgccacatcttggtcttcattcatcttttcttgactatgtgaattgaagagttaacccttctaattttaatatagctgtacttacaaattctctaactaggagtatgtatcagcattttctctacaggatgaagctggtatcctggtagtcaactagattgtgccaaaatagccaaacaaggcagatcgatcggatggtaagtccatttctatcctacacacatttactactgttaatttcacatttgcttcaggatgatttttcatatacattatatttgatctgagaaattgcaggatgcatgtacatgaccatattatctacaaatttatcctaattagtcgttgattaagagaagattcagaccaaccgtaagtttcttgacaggaagcgaatgcgctaaataggaattcaaagatcagtatttcctttttaaaataaccttcagttccaactatttatttcgtgtgctgatgtttgatctgtatgcataaagataaaatctttgttgacttttaataaaacttatggttagctcttttatgtagtgcacacatcttttcaaagttatttgtctacacaactatcccgcagcaaagcgcggggtgtccactagttaatttgagagtggcccgagggtaagaattccagttattagtaatatagataactagtttgttgatattccacgctttgctgcaggatatgtggatgaatacatgttatatgttatacattatggaagtggtagatatatatatatatttaaataatataaaaattatgagaagataatgatttgacattgtctgcatattgagttctaaaaatacaaaaaaattatagataatatttatatttgcattatatttaaaatactatgtataataattatgtggcacacttacatatgatttaaaatactctagataataattgctagtgtgtgatgatgggtagacttgtatgatgagctaatctactgtagctacaagctagtactacttaaataaatatttaatgtttgacggttttatgttcttcaaaattaatttgactttgaccataattttacattaaaaatttatgtttttgtaatagtcattttcatgcaaaacaatatgctatttttatggttttagaataagtatgttagaaattattaatggtgtttttaaaatcttaactggattttattattatacatgtcgaatatatatatatatatatatatatatatatatatatatatatatatatatatatatatatatataaaagactattctacacccggagtatagaatagctattctataccccccttctaagggccaaatctatctcccacattagtctaaggctagtcaaagtgcttccacgtcggtcaaacctcaggtcaaatccgcctgtgacttctcccatcacccaccctttttcagctctcgtctcgcagagacggtgcagtaacgtgacggtcattgtgtagtaacgcgtagtttacttgcagtaacaacggtaaaatatagttaaaatatagtcatgacggatctacttttaacaagtacttttttttctagcatcatggcgcaaacggttttaaaaaataatgcatattttgcgagatattgctcttcaaaggttagcattttgaagtttaatcctccacatgtagtaacactatagcattattgttactaccatttgatccgtgttactgcgagagtgcagtaactactacaacttttgcagtaaaagtgtgttattgcaattgcttggtaatgttaccacaagaacgtaataacaaccaataaattttacatagagaaaaaacaaatggtttgctttatgatgaggaggacatgtgagaggcgaggggtggtgagtgtttgcttgaatcgggaatattaggagtgcgatgggaggccacgaaccaccaccaattttgcttaactagtcaaagtgaatccatgatgtgtaatctcgttcaaactcccaagcggatgcaacattcatcttgtgaaaattgtgcagtaacgttagtgcccgcgtacagcaacaatatatgtgttttgcagtttactgcaattccatgatgatgttactaagaaattgtaacggaattgatttgcttctttcatggaggtagaaataatctaccttgtttttgtttgaatagcgtactaaacaatatgtgatagcatattagaatgaaaatgatactatacaaactgtccaatcttggtcaaaccctcaagcggatgctacatatatctagttagaattgtgcagtaatatagtgctaaatagcagtaataacttgtgttttgtgtagtaacctagcatgttactttaattccgtgatgatggttactacgaaattgtaccatgtatcttacacgtgctaaatttaatttactatgtgtttttgtttgaacaatgtattgaatggtacggacgagggaggagagtgcacacaaggcgggtgaggagacatgcgtggtagggcaaaaaaaggatgtgttttgacatgataggttaaagcatcacatgctaaccgtatacttattactgcacaaaagtataagtgttactacatgataggtgcatgttactacttccaagtagttatgttactacttccaagtagctatgttactgcacgataattgtagcgttactatgtcaattttacgagatgaagatcgaataggtaggccataggtaaagtctgtaggtggctttgagcgaggtctaattgatgtatgagtgttttgaataattttatacatttggtaaaaccatgttactgcatgtatatgccattgttactgtaaattatacattttgttactgcatgtggagggctaaagttcaaaatgttctttgaaaagcaatatctcacaagatatatattatttaaaaccgtttccaccatgatgctatggtgttactgcatgtggagggttaaacttcaaaatgcatctacgtactcccctcctcaagaaaccgttcttcctctctcttctcaagaaaaccggtatcctccctccaatatagtgttactgcatgtatatgacgttactgcacttttgacagtaatattgtggtgaattatagtaaattaggaattgaaacaaaaattatatgtgttaaaagtcttatatgccaaccatatacttgttactacgtaaaagtaaaagagttactacacgacagatacatgttaccacgtttatgcagtaacactatccaaaaatgcagtaagacactttgttactacaaaacttatagtctttactatactttttacagtaacatcgtgatagtaacacttatgatatagtattcatatagtattattacttgtgaagagttaaattttaaaagactaatctttgaagataatatctctccaccctttgccccgcgagtaaactgagccaattccacatattcttgtagtaacgttatcaagtaattgcagtagcacactatgttactgtgaaacttataatcgttactacatcttgtagtaacgacatgatgtgattgcagtaacgcaaaacaggcagtaataacacttttgatatagtattactgcttgtggagagttaatttttcaaaacaaatctttgaagggtaatatctctcacatcatttactaattttaaaaactgtttgcaccatgatgttcaaaaaaaaagtgcttatcaaaagtagatccatcatggctatattatgactaaattttaattttgttactgcaagtaaaacacggtgttactgcacgatgaacaagacgttactacgtcgttctgagacgagagctaagaagagagggggtggtggggaaagtcaccggcgggtttgaccgagatttgaccgacgtgggagacctttgaccggcctttgactgaggtgggaggtgggttttgggcccttagggggaggggaggtgggttggagggaggggggtatagaaaagctattctatacccgagtgtagaatagttttatatatatatatatatatatatatatatatatataatcaccaaagtaaattatcaggatttattttttcttttaaagggcaagatattttattattatgtatgagaggcggccgttcgatatttctcccatagatcggacgctcgattcgtagtttcttcctgcatggacacgtacctgcggacgagactaccgatcgggcgcccgatgaggagtggaaaaatcgggcgcccacatcatgctgacgtcagcatgacgcatgcatgcaaaaatactttaaactattttttctcttaaattatttatccaaatcatgatccgattacaccattaaattcgttgcaattaaatctttaaaacaagaccatacatggatatattctgatgaaaaaataattagcttattattgaattatttttaaatgttgcacagtgttccatcgagtatatcggaattgtctcactaagtagatcgaaaatgtttcaatagtttaaattggacgatgtttcaccttatataaaaacaatgtttcagcaaatagcgaaagaatgtttcaactcactgcaacatttgatctatacatagtgaaacattataagtacactaggtgaaacattttgtgtggcgctgtttcaccttatataaaaaataaatgtttcagcaaatagcgaaagaatgtttcaattcactgcaacatttaatccatacatagtgaaacattataagtacactaggtgaaacattttttgtggaacaaaaattaaaacgaattcccttaatagagggtttctacaatatgtgtgtcagggttatggataccacatacctaatagtagttgactaaatctcggcaggacccatcacataccatgtcctttacggaaacaaccttcagatattgagggagttccggataaggaaagacaactagagttctatatggaaatgacaaggactactcggattgtatccatattggtttctctagttctaatttgacaaggggacacctatgggtataaatacgagacctcctaggaggagaggacgaccacctcaatcaacacccaccatagacgacgcggaacaatagatcaagacagaagatcgacatacaagccaacatacaccaagacaagacgccggatatcgacttcagagataggcacggctagtcccctacggtgtctcaagatactgataggagagacattgcgctgtctctgatcacgccgggcacgaactcgaggaggaatactaccctgttgtcgactatgagtcagaccttcagaccgccatatcgacaacaattagataggctatcccaaatattgtattggtgtgattatgatgaataagagcaatatcggcttcggccaacaggatgtagggttattacctgataatttaggggcccgaacctgtataaaaatccatgtctttgtctcttttacctcagtctcgcgtatatcctagtgccaacgatccccatactatgcaaataccgcaatcgcgacatcaaacgtcgacaatatggttgatttgttgcaaaagaatgttttaattcactacaatattagatctatacataatgaaacattatgagtgtactaggtgaaacattttttatggaataaaaataaaacgaattcccttaatagagggtttgtaaaatatgtgtgtgatttgtttcaacggattaggtgtgtggagttacgtggcaggtggacagagccatatggtggggccagggggacacgtgcgcttagcgccagaaattttccctcccccggccgatagcgagcaattccgcgtacatgccaggaagccgtgtatgtgtttccttcgcgtgggcaagtgcatgtactactggtcactaacaatgctcatttaatttcgcttttgacctcaaattaatcatctgaacagcatgaaggcccgttgcaggaataatcctatttattctctcacctactcacccacccaggccacacgccgtaaacactgaaacacaccaattcttcagagttttttcgctctgaactttcttcagcaaacaggcctgcataagatagctagctagctactactacatatacactatatggtttttggctgatcgatttgctatcatcctaactg

SEQ ID NO: 23958 - DNA, 3625 bp, Oryza sativa
ctggccaatggatcatcatatgcatacacaaaaggccatgctttcttcccttctcccatccaatcgcgcaactccacagatggctccatcttctccttctcggcaacctttatcttcgctatgcttcacacgcttcctttggaggagggcgatgggattgccttcttcctagctgcacacaccaacttcaccggaacaggtatttctggcgactttggtcttcctgctgaagatgacaatggcaaatcgttggaccatatcctgtccatagagctagataccttacacaatgaaagatttggggacatcgatgacaaccatgttggcatcaacatcaacagcttgaactcctcccagtcctctccagccggctactacacagatgaaccctactctattttgcacccgctgcggctcaagagtggtgaggagatgcaagtatggatagattacgaccaccggcgcatgcagctcaatgtcaccttagctccagtccccatggccaagcccaagcgccctctcttatctgcaactcataatctctcaaaactgttgttggaccacatgtatgttggcttctcttcatcgtcgtcagcggccttgtatattagtggtcatgctcatggtcattttattgccggcttctgcttcaggctagatggaaaacctgcatcactgcaatactccaagctacccaagataaacacatctgatctacctgatcatgtcacctatggtactggaagggggagctcgatttattggccagattttttgacacttccattgatatatgcctcagctcttggtggtgcaatatcgatgcctgttatcctctacctaattgtgagaagatgtcgcaggtaccaggagttacatgaagattgggaggtcgagtttggcccgcataggttctcattcaaggagttgttcaaagctaccaatggctttgttgacaagcagttgctcggagtaggagggttcgggaaggtgtacaaaggagtgcttccatcatccaaattggaggttggtgtcaaggtgatgtcccatgattcaaaacaagggatgaaggagttcgtcgcggaggttgtaagcatgggccgacttcgacatcggaacctagtacagttacttggatattgccgtcgcaagggtgaacttctactagtatatgagtacatgccaaatggcagtcttgataagtacttgtatgaccaggataaaccctcgccgaattggattcaaaggtttgagatcatcaagggtgttgcatcaggtcttctctacctacacgaagaatgggagcaggtcgtcatccaccgtgatatcaaggcaagcaacgtcctcctcgacagtgagatgaatggtcgactaggcgattttggcctagcacgattacacgaccatggagttgatgcacacacgacatgtgtggcagggaccagaggctacatctcccctgaactagcgaggctgggcaaggcgaccaaggcaaccgacgtgttcgcgttcggtgcattcatcctcgaggtcgcctgtggccgtcgcccgataggcatgaactcatcaggagaattgcaagtgttggtggacttcgtgctcagattctggcagcgagatctgatcctgtgcatgttggataccaggttgggaggagagtttgtgacggaggaggcagagctagtgctcaagcttgggcttctctgctcgcacccgtcgccagcttcaaggccaagcatgaggcttgtgatgcaatatttgtgcggcgatgtgctgttaccggcgatgccggagagttaccggagcatccggagtttcagtgagatgcaggttgaaggtgatcagcttgatgagaatcccttattaagacagtatctgtcggtgcaaacgagtataaccggtctctctggtgggagatgatactgtcaagtgtcaacaactagagtttaattagccgataccaaggagaagagaaatcttgatatggattaaattaagaagagatttaggtaatttgagccagagcagacccgaacagaggtttttagttcagtgaacacacgggaagatcggcctcgatatatatattttgtgattttattattttgcggtttcatttagacttaaagatacgctttatttgtgcgtgtaactacttttataccgagcaggacacaatatgctagccagtccgaattccatcgaaacaggaatggaagctacggctgtgtttagttccacgtcaaaattggaagtttgaagaaattggaatgatgtgacggaaaagttggaagtttgtatgtgtaggaaagttcgatgtgacggaaaagttgaaacggaaaagttgaaagtttgatgaaaaaagttggaatctaaacagggcctgagtagtgatgtgtatgcaccatgcatttatttctctatgtaggtgatgagctcctagtctatgcatcaaacgagaaatgtactcgtgtactccctccgtccaagtatttgacaccgttaattttttaaaatatgtttgatcgtttgtcttattcaaaaaatttaagtaattattaattattttcttatcatttgattcattgttaaatatacttttatgtatacatatagttttacatatttcacaaaagtttttgaataagacgaacggtcaaacatattttaaaaaatcaacggcgtcaaatatttagggacggagggagtatatataagcaatatgtatcatacatgtacaatactatacagtgtgtaagcgcctggtatagctgtttgttcattttccatgcaacttcatatacatatatatatatatatatatatatacactcatcatacagctccttgtcattggagctagccggcacacatttttgttgaggtttgctgcacagcatataaaaatgaactgcaccggtaaactgaaaaacggacatatcttgttggttcgttggttggcaagtgtgcgtagcctgctaaaacggcccagcctagagcccacgtactatatgacgggcttagtagatgaagcccactaacttgaaaagcctagttcaccggcggaaaaagtgcaccgaaggtccctcaacttatcatcgggatacaaaaacatcctcgagccgcaaaactagatacgcggggtcccttaactatacaaaaccggtcacccgagatccttgggtggttttagccccggttttggtctacgtggcggctgagtcagtgtgggacccatgtgggccccacatgtcagtgtgatacacgtcatctctctttccacttttttttctcttcttttttttactccatccaggcgttcctcgacaagcttgccgacgacctgggcgtcgtgctgcacgccatgcttgccaagaaggaggagctgaccgcggtcggcaacaacgggtccgatccctgcaagaggctgcggatcggggccgacacgggggcggtggcgtggggacccggcggcgacgcggccgagatggcgcagagcagaggcatcgtgccgttcccgtgctctgctggcggcgctgccatcggagtcgtgctgggtgccgcccatggacgaggacgactactcgtcgctgtccccgtggatgatcctgtcgaccaccaagtc

SEQ ID NO: 23959 - DNA, 2188 bp, Oryza sativa
aggagggcggctgtctgccgaggagaaggccgatgtcggggccaccgccacggcagtccgctccatcgacgggcgcacggccatcgccgcggcgtcgggcggggtagcggccatgggcaaccccaccgccgccccttcgccaccccgtcctccaggggcctgctgctggggcggccggcgaggccgacgcggagctcgtggccgcgcaggaggtggccgtggaggttgcggcaagcgctgcgggtcgtcccgtcatcccgatggctggcgagggagggagaagcggggcacaccgtcgatgtggtggcggcggaggaggaggacgccgggcaccgctccgtggctggatccggccgcggaggaggaggagacgaggaggacaccgacaaccactatggcaacgccgacgaccaccatgctcaccagccgccgcgcgctcgcacgccgcctccgccgcccgccgctcagccctgctcgccgccgcccgttcttgctactcccctgccgcaaagagaagtaaaaaagaagagaaaaaaagaaaggggaaagagagagatgacgtggcacgctgacacgtgggtcccacgctgactcagccgccacgtaaaccaaaaccgtggtcaaaaccaccgaaggatctcggggtgatcggttttgtatagttaagataccccgtgtatctggttttgcggttcgaggacgtattttatcccgatgataagttgagggaccttcggtacactttttccttcaccggccggccacgccggacaagctacaggtgcggcatgggctgtaaagcgcatggagaggcccaactctctaacagttacgaataaattactttgagtttggtcgaagtcggttatagacaaatataataatatttatattactaaattaattttattaaattaataattaaatatgtttttataataaattaatcttaggtcgaaagtattactatttattttataaactttattatacttgaagcagtttgattttaaccaaagttaaaacattttataacttgaaacggagggtgtaatgtatttgttgattatcactggattttcaaagaaaaaggaaatcaattcattattctattatccatcaagaaattaaaacgaaagcagtcagcagcttagtcaaagggaaacgtacaaactaatgtccaatttttgaatcaatccaactcagaaataaccacacacttggcattaatcaaagggaaacaatcagaagcagcagacacagaaaggtagcgaacacaaagagccagccaacaaagccatgcaaagaaattaaacacgcattaaccagcacttaaataaacttaaacagcagatgaagaagccgcagtctcgttgtcggcggcggcggcggcgggcctggagacgatgccggcgtggttgagcagcgcccagagcagcgtgatgagctcgccgccgcgtgggcgtccaggttgtcggacggcgccaggtacaggatgatctccgaccaaaactccgcaagaaccccccacgccttattcccttcctcctcctcctcctgttggttttggaccaacgccaccagttgctccgcgagctgcgcgccattccttaacaccttgtgcctgcagcctgcgctgagcaatcggaccagcttctcgtactccggtggagcacgaccggcggcgagagcacggcgagcgtctgccttgacggccttgtacaggtccttgctccagccatcgtcgtcggggagcagctcgggacagcaggccaccaggtaggcgcagtagcctgacaggtgagtggcaacaaccctgttgctgctgtcagagcttgagcttgcagttgtacttggatttggatacttcacctcaaggatggtggtggcgatgtggcacaccaggaggacgtcggttgtggctgtcacatcctcccagagcagctggctgtcgctgccctgcagatgcagagacgccgtgcatgctttggtcagctgcaggctccccttgctgctcctgagcttggcgacgatggcggacttcacttggtcgggcaccttgacgatcttggttttctccggcagcggcgaccactttgctgttggacgatgcatgtccaggattgagcagaggttgatgttgtccttccatgggttattcaccagcttgcaactgcatcgcaataat

SEQ ID NO: 23960 - DNA, 741 bp, Oryza sativa
cctcccaatcttcatatagttcagcatacctctttcgcctccacactaatgctgtgactgctgctcccacaagtaggatgactgtggtgatgactatcggtaggactatcttcaaagttttagaccggacttttgggccaaatcgaggtaactttggtaacttgatgatatctattgtcggagcaggactgttcattccaaagctccagccaagaacataattcaatgcaccgacattattagcaccggaagagaagccaatatatgatacaccttcatctaaaattgttgagatgttgaggattgctgacagcgttggtctcaaaggtttggttagcttgagaggagctatggtcacattcatctgtgtggcctctccatcatagtccacccatatttgcactgccttgccgccaacaaggggcaagtcattgaaaatgccgttcttgtcatcatagaagccagcaggatgggtctctagcggtctgctgaaactactgttgatagaaatgctgatgtcgttctcgttgttctccagaaaccttttgtcttggcaacttaaaaaattaactgcaagattgctctccctctgatcattcttgaggcccttgctcggaaatatcatgaaagccatgctgtcgggacatctaatagaaggagccatgaagagcacaaagttgactgagaaggactgtaatggtaccttcagaaattgccatggagtcgggtagagggcgtagc

SEQ ID NO: 23961 - DNA, 1150 bp, Oryza sativa
  unsure (1)..(1150): unsure at all n locations
tcccccaattttttaatattactattttcttatcatttgattcattgttaaatatacttttatgtatacatatagttttacatatttcacaaaagtttttgaataagacgaacggtcaaacatattttaaaaaatcaacggcgtcaaatatttagggacggagggagtatatataagcaatatgtatcatacatgtacaatactatacagtgtgtaagcgcctggtatagctgtttgttcattttccatgcaacttcatatacatatatatatatatatatatatatacactcatcatacagctccttgtcattggagctagccggcacacatttttgttgaggtttgctgcacagcatataaaaatgaactgcaccggtaaactgaaaaacggacatatcttgttggttcgttggttggcaagtgtgcgtagcctgctaaaacggcccagcctagagcccacgtactatatgacgggcttagtagatgaagcccactaacttgaaaagcctagttcaccggcggaaaaagtgcaccgaaggtccctcaacttatcatcgggatacaaaaacatcctcgagccgcaaaactagatacgcggggtcccttaactatacaaaaccggtcacccgagatccttgggtggttttagccccggttatggtctacgtggcggctgagtcagtgtgggacccatgtgggccccacatgtcagtgtgatacacgtcatctctctttccacttttttttctcttcttttttttactccatccnnncttttctcttctagcttgccgacgacctgggcgtcgtgctgcacgccatgcttgtttttttgaggagctgaccgcggtcggcaacaacgggtccgatccctgcaagaggctgcggatcggggccgacacgggggcggtggcctcgggacccggcggcgacgcggccgatatggcgcagagcagaggcatcgtgccgttcccgtgctctgctggcggcgctgccatcggagtcgtgctgggtgccgcccatggacgaggacgactactcgtcgctgtccccgtggatgatcctgtcgaccaccaagtccgtcaagtacatcgacacggcgcactacgcggtgccgggcggcgcccgcgtggttgagttggtgacc

SEQ ID NO: 23962 - DNA, 707 bp, Oryza sativa
tggatccccccaactttttccgtttcaacttttccgtcacatcgaactttcctacacatacaaacttccaacttttccgtcacatcattccaatttcttcaaacttccaattttgacgtggaactaaacacagccgtagcttccattcctgtttcgatggaattcggactggctagcatattgtgtcctgctcggtataaaagtagttacacgcacaaataaagcgtatctttaagtctaaatgaaaccgcaaaataataaaatcacaaaatatatatatcgaggccgatcttcccgtgtgttcactgaactaaaaacctctgttcgggtctgctctggctcaaattacctaaatctcttcttaatttaatccatatcaagatttctcttctccttggtatcggctaattaaactctagttgttgacacttgacagtatcatctcccaccagagagaccggttatactcgtttgcaccgacagatactgtcttaataagggattctcatcaagctgatcaccttcaacctgcatctcactgaaactccggatgctccggtaactctccggcatcgccggtaacagcacatcgccgcacaaatattgcatcacaagcctcatgcttggccttgaagctggcgacgggtgcgagcagagaagcccaagcttgagcactagctctgcctcctccgtcacaaactctcctt

SEQ ID NO: 23963 - DNA, 754 bp, Oryza sativa
aggttcgcgcccctaaattatcaggtaatatccctacatcctgttggccgaagccgatattgctcttattcatcataatcacaccaatacaatatttgggatagcctatctaattgttgtcgatatggcggtctgaaggtctgactcatagtcgacaacagggtagtattcctcctcgagttcgtgcccggcgtgatcagagacagcgcaatgtctctcctatcagtatcttgagacaccgtaggggactagccgtgcctatctctgaagtcgatatccggcgtcttgtcttggtgtatgttggcttgtatgtcgatcttctgtcttgatctattgttccgcgtcgtctatggtgggtgttgattgaggtggtcgtcctctcctcctaggaggtctcgtatttatacccataggtgtccccttgtcaaattagaactagagaaaccaatatggatacaatccgagtagtccttgtcatttccatatagaactctagttgtctttccttatccggaactccctcaatatctgaaggttgtttccgtaaaggacatggtatgtgatgggtcctgccgagatttagtcaactactattaggtatgtggtatccataaccctgacacacatattgtagaaaccctctattaagggaattcgttttaatttttgttccacaaaaaatgtttcacctagtgtacttataatgtttcactatgtatggattaaatgttgcagtgaattgaaacattctttc

SEQ ID NO: 23964 - DNA, 733 bp, Oryza sativa
aaagcattgtattcggcttgattatttgtgcaataatattccaaacgaaccgatacctcataacacatgccattaggtgaaattaaaacgacccctatgccttgaccttctttgcaagaagaaccatcaaaataaatcttccaaggtataacttcaactaagcaaacctctccctcataagcaacatctatatgatggtccactataaaatcacatacaatttggccctttataatttttaatgattcataagtcaaatcatattctatcaaagcatatgcccacttgccaattctcccatttagaattggcctttgcaacatgtgtttaataacatcggcttgacaagtaactatgcatgtactagacaacaaataatgcctcaacttggtacaagcatagtataagcatagacaaagtctctctataaaaacataccttgtttcggcatccaaaagacggcggctcaaatatgtaatgatatattccttgccatcttcctcttgcgtcaaaacgggaccaatgactttgtcctcggaggcaatatataaccgaaaaggctttccggctttaggcgctcgcacaacaggtggagtagataaatacttcttcaactcttcaaacgcctcttgttgttttgccccccaagtgaaatcggcttcttttttcaaacgaagtatagaaaaaaaagcatcgattttacccgctaggttagaaataaacctcctcaaat

SEQ ID NO: 23965 - DNA, 13326 bp, Oryza sativa
ttaattggaagccgaggctcaacaagctcacggctaagacccggcatctcatggtattcccatgcaaagcaatcaacatactctttaagtaactcgattaccttaaccttataatcggctttcatgtttttgtttacaaaagtcggccttggtttaattccatcacctatgtctacttcctctaatggatcggccgatgtaaacccttgtccaagcttctctacctcatcaaaatctctaacagtttctccaatatcgttctttgtagaccgatattcttgcaccctttttttaaccactctaaactagcctctttactcattatacaagtttatatggcttagccgtgctacactagccggctttacagagataggtacaaatttgccatcggagatactaataaaatcatagctagaaaaatccctccccgataagtattagatattcccatggcgccactcaaaagtagcatcggccatcgcaacctctgccgatgtatccgcttgcacaatttcaacatcatcgccgtcccattggattaaacattgatgcaaggtagaaggcacacaacaattggcatgaatcgaacaacgacccaaaataacattgtagttaccttgcacatcgacgatgaagaaagcggttggtagcgtcttgtttcccacggtgagctccgctgaaacgatacccctcgcctccgttggttaaccgttgaagccattgagaatcatgttagtcttcttcaactcatcatcctcgtgccccaacttcttgaataacgagtacgacatcaagttcacagcagcacctatatccaatagcatcctagagaccggcttcccatcaacatggcctttgaggtagagaagcttcatgtgacggtttgattcatcgggcttctaaaaaaccgtgtctttaggacctaatgagaattgagcaacctcggcttcatccatagcacaaaactccataggcaacatacacaccatgttgatatccatgtcttcctatggagacgattttccttcgtcaaccgattgttcttccttctcctcaacatcaatcggttttgccttctctatggacttaggcctccataccggtggtggtcgcaactcattgaactttttatccctttgttctttcgcctttttctctcttagttcttgggtccgaagacgttgcaaccttctcttttgtgtagccgttaaatctttaggcatccacctaggatttggctctgttccaggaggtaaataatgtcctctattaaccttgctcgaagacgatgaaaccctcacatcgccctttgtagccctctcatcaaaccggcgctggagcccagtcagaccggtcgtagaccaccggtcagaccggtcgtagaccaccggtcagaccggccagacgcgccggtcagaccggcctgaagcctcggtcggaccgctgtctagtcggcggtcagaccggcctgattgcccggtcagaccggctacatggccgtggtcagaccggccgactgcgatgagctggtaccggcttcggattttttgtttggggacttttcaactccatctccagaaggtataggcacatcatgggatcctattttgatagtaatcacctccgaagtcctttcctccaccttggtgcgctttccttccctcttttcttcattaacccgatttttaccataaaattggcttttgtttggtgaagataagcgctcatggattggcctccgtggtcgtccccacccttggttgaattgcattggaggcatatggttgtacattggcggcgttgccccccatgacatgaagtaaggataagaataacccggcggcggcattggataagaacccaatgacatgtcttgtggatgaaagtatggaggtgaacgcaaccgtcttagtgaatgaccaaatcgccccttaggaggtgatcttggtcttttccatttgtcgtgattcctctcaccaccttgcttctcatacttctccaaaagcatatcaaaggtcactttggttttcctaggagccttagaagtcgaagcttcacccttattctccttccaaacaccaacctccggcttctttggcaccatcatcttaggccttggctcaccaatgaccacttcctttcccttagtagattcggcttgctccggccgaatcaacaccttcttattattgaaattaattgtatttactggaaaaggatcatgatcaagcttcatcttggagccatcggtgaatttcaatcgtccttcatctatggccgattgaacctgtcgttgaaacacattgcaatcattagtagagtgagaatgagaatcatgccacttacaatatgcccgacgttttaactcttcttgtgatggtatgacatggcctttaggtaatctaatttgtttctcttgtaaaagataatcaaaaatcttatcacacttggccacatcaaaactatacttaacttcactttgccgatctttacgaggagtcggcattaaattagaacaaacaaaaggtttatttttgttggtccatgaccattcggcaacataaatatcatgatcaccctcctcttcactatcactagcatcagagtaatcaactacattaacattaggctttttgttgaatggtctagcaaattttttattatccttaacccggcattcctgagccagagccctttgcataagttgactaacatcaagaaattattggccatctagtttctctctaagaggagcaacaaaaccattaaaagcaagcccggccaaatctctatcagttatattcaaagtataacatcggtttctaacatctctaaatctcttaatataatcaacaacagatttattatatttttgtcgcgtcccaaaacgactctaaaatacatcctctaaattatgcctagaataattaaaatccgtgtgaaagcctccaacaattaaaatgtgcaaagttaaaagtcaaataaggcttggaggatttttgtatatttcctaaaagcctaaaatgcgtaaataaattttactggaattttcagagcacaaataataattattaagaaataaacaaagttaaaatgattttataaaaagaaaaaccctaaaaagtcccctttccctccccctctccctcttgggccggttcggcccagctccctccctctccctcctcctccccgcggcccatccggcctctccctgcgcgcgcgccgctgacgggcgggcccgcccaccaacctcgctgacgggtggggcccacccgtcatccccttcctcctgccgctcccgccgcctcgcccgcgccctagcgccgccgccgccgcgaatcccgccgcctcccgccgtccccgcgcgcaataaagtggggggaattattccccgggatcccatccccctttccccccatttttccctccctctctccctcggattcatttggaaacctctcccctaacctcgccggcgccattaatggcggccaggtctcccgcgcccatttccccctcctccggccgccctctctcactcccaaccctatataaaccctccccgagctccccaccgccgtttccgccactcaccgccctcttcccccgccggaatcgagctcgcgccgtcgctctctctctccgccgtcgccgccgagctccggtccaccgccgtcgtcgccccggaccacctcccacctcggcgccgcctccttcggcttcgccgcatcctcaccgacctcgtccacctctccgtttcggtcgccgaccgccggagcaccgtcgaccccgtccacccgagccgcgccgccgccttcctccgctccggtcgccgtttccatcgtcaccgtcgacccggggtgagccgtggaccgccgcttcgtttccccctttccctcccttccctcggccgccgctccgccgtgcctatggccgccgccggcgaccataggggcgcgggcgcgccacctcccgccggccgcaccgccgaggccgtcttcaggcacgcctagcggctgccgcgtggggcccggccgtcagccgcccgcgccctcgggtgcggctgacgcgtggggcccacggcgccggccggtgtgagccgggtgcacccggtccaccgtgggccgtgagactgccgcgtgggtcccactcccgtggacccggtccgcgcgccccctcccccggctgacgcaataaatccatttttaaattaaaatttaaatgaagaaattcgcaaatatccatttaaagagcatataaacttcaaatggccataacttggccatttgaactcggaattggaccgttcaagtctctaatttttccttaagaagtcaagaacccatttttgtgctttgttcctgcttgttatatggagtttattagagtaaaagccttttcttttccgttggtcgtgtagacgctgcagcttcggaagatccgctcttcgtggaagttgaagccgacgtttgggaaagcgagcaaggcaagtcacatcatccttgagcatattgaatcccagtttataaagttattttgatttaaattattgcattgtcgctttacttaaattcccgcattatcactgttttatttagccatgcctacttacctttgttatgaccttattattgctattgttattatttccttgttcaccctagaataaacaaaaccccaactagtggacactctactcatggtaccactagtatgattttaggtagatgcttcgctaattaattaggcaacattaggtggttttacaactctagactttgggaatattcatatcacctggacactatggaatggttggattattgtggaattggattcacacctcccactctattcaaaatcctcaaaatggttttaggctgggctcggggtgcatggttttgatagtagcacctcggccatataaggaccggtcttcgggcctctgttgcaaagcactaccgtacttccacatgtctagtgggtaaggcttagtttgtggctcagtctggttataaacaaaagtacacggatggagatggacgaagtcggcggtcgatggacatctctaggacaaatgaaggctacacgagctgcggcccggtagtcgagatgtcatggcacagtaccggtgtcctgctgctaggggctcagtcctgcctacctgtcccgggggttccggccgtaggtggggttgggtcggtactcttgtctatggctaggatgggttggaaactatgtcatgtcttccgtccatatgccgtggtggtatgtggcacgtggttacacgtgaggaagacgtgtcttatgggtaaagatgtacacctctgatcagagtaaaacctattcgaatagccgcgccctcggttaggggcaagccgagcaatgtacccaagttagcgttttaattcttaaaaacctgcttaacaactaaaatgtggaatggttggcctgggttggcttgggacgagctgggacccagggtcgggttgccagttcggtctgaatcatcgtaggccttgggttaaggcaggttcgtgtgggttcacggccttgattaataatattgtatagctctaggatcatgtttacaaaataactttgagcaactaagtgtcttttaatgctgtttactgcaaatcctaaccccctatattatggcttccttgtacccccttgcatttattctgcacttgtgggtgtgtcttgttgagtacagtggttgtactcagtcttgctcaatttttcccaaacccagaagaggaggccctggaagatgaaggctttggtgtctagctcgtgcctgtcgtcaagcgcctgtggtcgtcgccctagtcttccgttgtttcccgtttgtctttgtgtgtgctgggccttcgccgcccatgtaataaattaactatttacgcttccgcttgataaactctgaaatgtatcaacttttggtgtaccttgcctcctgggacaaggaataatacacgcacgtaaggaacgcccattgggttaattccggtcgtgacaatttttgcttaaccgatgttaaatcacataacctaagctcagtttctccagtatagaaataatcatgaaattgttcctctaattgagcccaagtatgaattgaatttgccggtaaagaagtaaaccatataaaagcattaccggataaagataaagaaaacaagcgcaatttaaaagtatcactattagcctcaccacattgcgctaaaaattgacctatatgctcccatgtggtcttaccatcctcaccactaaattttgtaaattcgggaactctataatttctagggaacgacacattatcataataatccggatatggttttttgtaaggcctatcacgattcctagtttcgatcccgaatttagtcctcataatatcactaatcatgttctccatgttattaggtccttgtggatttggtggtgggtttggtggcctaataggtttggtttgtggcgcaatatgattatattggccttgactagtatcgggaggatatcctctagaaacatcattgtaggcattagggatatgtgggggaatttgaggactagtggtggcagtagatacagggggatcaaatgttctaaagtggtacgaataactagcattagtcattggatcaattccctgtatcggcacaattgcgccggtctgaccggcccagggcccggtctgaccggcgtcatgttgcatggtcggaccagcctgagggccggtctgaccggtgggataatacccggtcggaccggccatctggccggtcggaccgacggcataatacccggtctgaccggccgtctggccggtctgaccgacggctgtgtcgcggtctgaccggccgtcaggcccgatcgaaccggtcacgaacgccgctccgttggttttggaccctattggatctataggaggttgatcagcagtggtataggctttatcttttaatgtgtaatcatccataaaagagcctagcctactccttaaaaacccatcaactttttccttaaacatcacatctaatctatctttaaaattagccatagatgaatctattgtatttgcaatttgttggtcgatagattgtgatacctcgtcattacttaccacgtcgggagcgagcttaggacgtggcccgggcttgatgatcacgccttgacgagtcctagtagtcaacctcatcaacgcctcccgtgtgagctcggtgatgtattcctggacatctttgcgatcctctccttcaaagtcatctaatgtgaccggtatcacatgagatggctccacctccgtcttagatgatggcttcgtcatggcgaagtcgaagttgagttgacgatgaacggatctcttccccattggagtcgccaaaaatcgtgttggcaacttttttgacaagttgacaagcacgatcgtagcaccttaagccttgcggtgattctaaagtcgccaaccacctcgatctagcaaagagctaaacctagatgggttttgataactaaaccggctagcggagccgatttctagataactacccgtctcgtgggcaaacggaaggttttcaagacaaacctacaaagagatgtcgcactctcgcagcggtagcggacggtttacggcgcaaaccgacaaagatggacaaactaagagaaaactaaaagcaatataaaaagaatgattcgattgattgatagtagattgattttaacaatgaaccagccttgtcccttatataggggttggtcttgccctctacaggcccttctccatgtccaactcggggtaaaaaccaaaggaaacccgaaacatgccttccaaagcaaggaaacctcgaaacccgacgcaacagaatcggactcgggcctgtcggtcagaccggccacataccgccggtctgaccggccttcaaccggcggtctgaccgcccaacacacggcggtcagaccggcctacctcgaaggaaaccggtagacttccaaattttggcaatatttcctattttaagcctaggtgccaaatttgggtgtaaacaaatacttccgtacgtcggttggcaaaaccatccgggcataaaactaggtgccactgccaggttcccaaacttgtaccatacaatcaaatcaattcttgacattgttatactcactggctcactggtagagagaatctttaccaccggttaaaaacccctttattttttttatttttggttgttgcagccgaaactaataaatcgtgactaaacatctcgatctaaaatacatactaaatcaaaaaaaatatatgggatatggattttgaactcaatatctctcaccttagccctcatacgtcctatctactacacacatctaatttagatggagatgctttctttctagctaaagaggtatatttagtaactgttggtgttccaacagtactaaaaatatctttagtacagattagtgttaccaaacagtactaaagatgcattttaaagatgcattttagtatagttagtaacacacaccacaaccaaagatgtttgtaggaacttgacttttataaccgatattaaagtatctctaactgatatatttgtgttttgggccctacggtaaaatatatcgtttctttggtagtgacccagctcttggggatgaaatacccaaaaggttcacgaaaagcatccatttaattacctctttgctaatcagaatgcttagcaaatcattttattaaaatgtttgctacaaagcggtgatggtttttttccggggatgtttttttttcctgtcaaccaaaaagtacttatgaaaaaattgaaaatataaattatatgcgtgggtgatatatcactttacaaatgcacgtcttttccttaaaatcacactagattaaatcaaacatattacaagcaaatgaagaagaaaattttaactgtaaatagtacaagtattagcaagagtaatttatttttttcttcgatctatggatcaaatttaacttgcatgtttgtatagtaatatatctatattaatgagaaaattaacaccatttcactcttctaaattatttcattgaagtacttagcccataaactagtttttagctcattctacaccctaaactattgaaaatgttttacatactttacacacagatgctatttcttttttttctttctatataagtcataatttacactcaacttttggtaggacgatagatgcattacaaagtacctctcgacttatttttagaattattctcactatttacataggttggaggcagatgttaaattctggattgaaattttagttctgtgttggcccacctggcagaatattctttccagcattttttttcaggtcagaagaaaacaatgtttaaattcttaaaatttatgtccgagactggagttctgtttccgccattacgcgtaatattaaggccctctttggcacaactctgaatccaaaatttctcggagctggatattcctaggttcacaaattcatggatctagatctatgattacattgataacatttagataaagtttttgtgcatattgcagatgaaacttaaatttttaaagcaactgtaattgaatgtataaacttcaagtctattatgggtctaaaatctggagtagtcccaaacaggacctaaatccctgtgaaattaatatgctgtaatttgaaatgttgtaagctaaaacatgaactcaagaacactcattccatatgattttgagaagagagatttcttcaaggaaattagttaactactaattaactagattcacttggagattgtggaataggagagttttaggaaatacagctgtgtcagaagcaactgggatcccacatattcccgcatatgatagtgatcctcatgtggtgatataatatatagttgtacaaacaattgatatttatagatcagtgcgttacttttagtccctttagtttgtttctattaggtggctagcaaaagcacagtgcatacctattactagcttagaatagcgcaaatgatttaaaatgttgatcatcatgctagcatgcactccagcatattagccttttggtgaatgaaattgtagaagcgcatgcaataacataacgatcggcagtatatttgccggaaatgttaaaaccgaaacctagctattgtgcgttttccacccaaaacgcgcatccatggcacaccatcggctagaaccggtacctttgttgagagatagggtccgctttaaataaaaaccgttacctataatatgttttaggtcctggtttttcaagaaccgataactatatttatattgtaggtttgtttttataaaaaaaatggcacttgttaagaaaaccgacagactgagtagaataagccgaatcacgacttgtttccacctatatctctcccttttgatcgcccctcactcactctttttattacccccctctctcccccttatcctctccgcctcctccctatccctctctctccaccgcaccacccggcggtagcgccctcccctcccctctcattgcttgtgttgttgatgttcttgtgttattagtgttcttgcattttcttggattaaatgtaattaaaagtgtaatcagatctggttggggtgaaggggacttattcgatgcatgcatcgagccggtctcttttttttttcattcctaggaccttaaaccggcacatttgagagaactcaaaaaggttcctgttgccaaattcggcacccatatgtggttggcaaccgacacatatccttttctgtagtagtgcctataaatccttgatggggtaccagcattgttaattaaacacacaattattcaagtggtgtacatcttgtttactgctgtccaagcactggtagcttgaaactgatatccaagcttgataagggtaccattcagacgtatagttcacgagtgacgattaaccaggaaatcaatctaacgccataaaattcagactcgaaggggtaggtaagtctcgtacgcgtgggtttacgtaattagttcatttagctttgagtactctgcatctcttgattgggtaggaaagtcttgattgtttaggttaatctctagagggctgctacaaaacgggatcccattgtaatggaatagacatattaactattctcttgcacgagtatcacaggtatcaggtcctatatatcacaaaggattccttgtggctcccgcagctattgtgactaattttccctaaactcaagaggcatctttaacctgggagaaggccaatataatgttatgtttggcatatcactcataaatattaagattatcatccctgttagtgtcaggggagaattttgagaagtttgtcaagactaatgcttagtacaaatttagtgcctatgcacatttgccgccataatttaaaaggtagcacaaaaaaattgcgtggcgtgcaaacatagtgggatggacatcacacatttcatatgcgccacttgtccatttcatatgattcttctcccattaggctacggtcattttcagagttgtaatactaagacaaagtggaccataattgacttggttcatcattccacaaatcaataagaaatatagaagactaagaggcaaactatgtaagatcctattaatcttgtcatttgatggaaaagatgaagctttactaaggggttgtagcaactccaaatttaataataataaagctcactttcctctcaaggggaaataaaattgcctctatgtcctatgtatgctactcttgaaattttcttctgtaagttctttgcaagcaatagggacatgcttaatgtcctgatttaagaaagtagttaaataagaagattaatggcattattttgggttgaatcattatgagacattgtcgaaattatggcattatttttcggccacatttctaggggagaatatacgtctcattaaggtcgagacacttcacccttagaaatttctgacatctattattacttagataaagctaaagtaaatcaagtgattcaagttcataaggtattatgcttccattacataaataataaaataagtgggagctcatcaagagctctaataagagaagattattctacctcatttatgactcatagctccattatgtggatgttataattttgtgacttgcacaattaaatatacataacatagcttgagggttttgttatggaaagacaagtcacatatggggtgcatacttaagaaatccatttgtggacttaatcaagcattgatgatgttttaaattctgctgcatcattagtgaactaagcttaaataagaatgaggacaataattattctataatgatggaagtaagacgtcattgaaattgtgtcattgtcgcttatgtcacatacctaggggagtttggaacgtctaatgagatagagatattctttcccttagattttaatggcattgtttagctttaagtgaaaatttcactaagttaagaaattagccaacaaatgattatttatggctatgtttacccataagcgacctccgatttcctttaagaaatgtaagacactaatgctaaaatcaaatgaagttatgagatctgattatggtggtaaacactaaataaagcttgttcaccttataagacattaaaaataagcattcatccaaatggttttccaaccatctaagaataaattgagatggatgaacaaaataagacattaaagtgttcatctaaatggtttttgaaccatacaagaataattgagattgatgaacaaaataaagaattttgtagaagtttctgaatgagtcaaaatactgggccatttaagtgggttaataaaattaagcctgactctaatggaaatttcgaacaattcaagtgaggtggacaagtgcatgaaaattaaaggtgggaatttcattcaccggtactctatactaatgacattttattgtcaagcaatgcatattgctgttagaaaccgacaaaatttttccctgagttattttggtctgaaggagtactggcttatatcaataagtcatatattgacataaagaaataatttgagagaatttagttatagttagtcaagctaaaattaaattataaagataatcatttatgattcagcagagagaagcttgagattagctcaaatctggatgcatacagatttggcatatatttttactgggaatcttggcagtatttaattaaatccagactagaccactggtattaagaatgttttgcattatttgcatgacaat

SEQ ID NO: 23966 - DNA, 13587 bp, Oryza sativa
ctaacactttgatatagttgtgaaagatatgtcctgggatcgaattattattaagctaagcttttgctcatggatccatactttaaaggctcataaagttaagattaattaagatatgttctggccaatacatgtataaataagagcctaactaagatcctagatgagggggacttaattttcaatcaacacccactaagttaagcttgagtttatttggatactatagtgaactgtatgtcttgttgtctcggtgacgcataatgttgttgaaaacacatcgcttggggagctattttatttgataaactcgtcagctagtctcaaaatcaaggggagaatgttggttaattttatcggctaatgccggttagttaggataaggataaaatcccaccgattttcctatcctaacaagaaataaactaagagataaatctgttttgtgtgatcggtacaaaatagattcgaattttagattgagaaaacccccgagccccaccagtgtcgcttatataaagaaagagaaggagggaggctgagtgactacttaactctctccaagcataaaccctaattcaatcgtccgatcgattagacactagaaggggttcgtgaggtatctcagtacagaagaaacaaagaagaagaaagaagagaagcaatggcttcatctcacgtcagttagatcaattaatttccgcataagcagaagatgaccatgtttaggctaagattcaattaattagttggattaaagctagggccaccatcatgccgtgcaatcaccgccgctagcttcgccaccgcgggagctacctcggccaccacttcgccctcatagaccgacagccaaatcattacctccaccgcgaaattcaatcgccgtctcttccactgtctctagctgctccccgacggcgaggcaaggctcgtccggtcgtgcttccaccgccaacggctttgccgcgctgtgcagcacctcggccgcctcctcgccttcgacatccatcgccggagtccgcttttgccgccgcctcgtgcctctccttcctcgtctaatccctccattctctttattagatcgagggcaagcccgtccgcctcttccagggcgccgcccatcaccggagcgctgctgccttccttcgccctgagctctgccagccacctccctccatctccgtgcccctcggtgagcacccatctcctttttctcggttccttccgccgctccccgtgccgccactcacagccggtgttgccgccggtggtcgtcaggctggcgccgccaccgcccagtcgggttggctagcgagccaacccacccttccgccgtgcaccgccactgtggactcggtccacggtcgactagcacctttggctccgctgactagtggggcctgccctttgtggatgtggtccacacctctccccttgctgacatcagcaatcggcttttccctttgtaaaataattattaattgcgtcataaatcgataataattccagaaatccatttaaatggctcaaaatttctaaaattcatatatagttcatatgaataacgaattgagccattcaacttgcaaaattcatctaaaattgatccctgttgacggtcgttatagaccaatttcgaccgctaatataactaaaataatagagaattggttatgctcataatgcatattttgttttgaaataatttagttccacttgtacttggagaataatttgttgcatgtactgagcaaataaaatgagaagaaatgaggaaaactcactcctaagcaagcatatggataagatgggcccacatgataggtgtaaccgtcctgaaaactgcatcaactaccataaccatcatgaggacccacctgtcagccactctactgtacttgggggcctgctgggccgacccaggttcggccgaacccctggcagctgtggctccggctggccctacacatggtcatccaggatcacttgccaatgacggttcaggggcagaaaggacattttgccttctccataaccgtcataccgaccctataaaaggaggagctcacttcacttctcaacacagtcaagcaagctcaagatttctctctacactttatttagtagtttttgtgctaactaaagtagaatagaatagttttcggagtcctcggagtcttcgaaagagttcgggtatggctctagtatcttttctatcggcttttgtaagacttccagcattaatgaaatattcttctttatatactttcggtactttgtttagtctgagtatcggctttactttacatttgtgtcgtattaattgtatggttagcttcccagagtggtatttattaatgtaaacgaggtacttagattaataagtatcattatctgggcatatatgctacggatctgtagaggtgggccgctgatgatgatagctcagtacaggtcttcctccacgatagtatatattcctaagacaaattcctccgtatttagccccggttggacggccatgacaggttgtcgtaaggaattcggcaacccagggtggtctctcgaaacaccaggagggcactattaggggatattggccacatgattgtatactagcaattgtagactaaagattgagtgtatattagaagtataggaattgagttcttttctatttctccttctacttagtttaggatcattattagagggaatctaaaagcgactacttagtttaggatcattattagagggaatctaaaagcttcgcttcgtgtcactctacccatatgctgaattaacccctactaggctttgatgaaggcaagtaatatatatgtatataatcattagcatggttctctctttcaatatcttcccttagaattaaataaatacgataccctggaatactcccgggtgaaatgctataatggtatatccgtatgcttgtggattttttctgtaaccaaccaggactaaagatctatttttgtcccggttgtttaacaaccaggaagaaaaacgtccacccacacgcgcgcaccaagtctccggcgcttctctctgcatcctgtgcatgcacagcccctctctctctccatctcccatccttatcaatttttcttctcctcccttatctccatcctgtgcatgcatcctctccatccttctccttccatactccccttgctcttctctcaccctctctccagctcccctcccctcccctccctctctccctcctcccctccactccctctccccctccacccctcccctcccctccggcaggccgcgacagaagcagaggcggccggcggcgggatggaggctgagtgtgggccggtggcagccgggcgcgagccaacggtagggaggccggccggcgggatgcaggaagagcgcgggccggcaacggccgggcgagggccagtgggatggaggccggccggcggtggcccggcgcgggccggaggcctcgccctcccctccccagatccggacggagaagaagctgcgggatgggggtgatttgatttttttgagtttttttatctttttttttatgatttgtggatgttgtgatttgtgaatgttttgaatgaatatgtgaatcgatattgtgaatgaatctgcgatgttgtgaatgagtctgtgaatcgttgttgtgaatgaatctgtgaatcaatattgtgaacgtatttgtgatgttgtgaatgaatctatgaatggatattgtgaatgaatttgtgatgtatttgtgatgaatctgtgaatcgtctgtgaatgaaaagatatgaaaggaggaaaaataaaagaaaaagccgaaggagaaaaaaaaattagtcctcccggttggtaacactaaccgggactaaagatgcaaccgtcttttgtcccggttggtgttaccaaccgggactaaggatccatctttagtaccgcttatttcaagcgggactaaagatgggcatctttagtcccggattcctcctcccggttggaaacttaggagtaaaggggttaccaactgggagtacaaatggtttctccaccagtgtgtaagtattttacgatttatttacatttggatctgtatattaatttatcattttgtaccctagctgattcctagacagggatttaatacacaaaatagtctgaaaatttaggctaaatttctggacgtaacatgaaaatagccaaattggcctcactagtcagacctcttagaaacctgtagcctgaccgaagttcattgtccacttttaccatctaaacacgtgcggtgagaccgtcttttgcctgaatgttctgaaccacttctatatttaatctaaatttgacctattgtcaaatttggatgtcagcccatacaaattgcattccttagatttgaactttgaaataaccaatggttgatagttgacagtgtctcgagatcgatttttactgtagtgcacgaatcttggtgtattcctagccatttaaaagtcaatatgtgtacattttcatgtagctgaaaactagacaatcccacagctggaaaatattttgtcagccagacgatgctcggcaggtgatgttggaagcgcgatgccgccaaaacaaggtgaggaagaagacgagagtacctacagaacagagctcaaattgaatgataaggaactcgataacacatcgggtgtaaattaaacagcatttgccatccagctgaaaccactacaagaaaacataatgttttcggcggccatacgatttcttcggtcaaaaatgggctgccaatattagtctttaaccctcgtttcctgattaagtgattatacccctatatatactcccttcggactgataatattagtcgttttgaataagggtaaagtcaaactttaaaatctttaactataaataatttttaaaatatttatcttgcaaatatgaaaactatatgtatagattagtcttaaaaagtacttcaataaaatcacatatttattgatatttcaatataaattataatagaaaatagttgtaaaagttatttttggagaccgtgctcttgtccaaaacgaaaagtattatcaacgaaaagtattatcaacccggagggagtacatctaaaactaaataataagatctggcctagacaagcatatatatttccatccatacacataaaatatcatactaatattcatttgtagtaaattcatgcgaatcaaattagcgaagtcgacggaggacgacgacgaccctaacgtatgtaatattatagtgaactttagtttcttgcattatatattatcaacaacaacaaaattagcatcacgaaaatactttcctatatgaatcaaatgatttgacaggcataatattaaataatacaatttacaagtatccacttttttaaaaataaaatgttctgttttattttggggcggagcgggggtatattgacggagatagtaacgcatgaaattgagaaaacgacggcagataaaccaagtctttggcggctgacggagatagtacctcgtgacttgctcaatgtgcctgcatgtgacggcagcgggtaaatgttgttaactaataacatgcgccaaaagctagtttcgttcaactatatatggcaacttttctgttaaatttccaaggatcccagatcgaagtcggcccaatcagctggcaacttcaagaatacatgaaaaagaaatgttgatttggcagagtgccaccaaatgtagtttcgttcaactatatatggctacttttcgctgaaaaattaaatgtccatactaattaaagctgctaatattgaatttcttcttcctcagatatatatatttcacatctatagcttgcgattatcgaagtctaagtaatgtaattgttcacgtttaaaactttgctaattacttgttttaattaactaacctttgcatccattcgaaatttcattaatcttacagaaacttttgtcccgggctcccggcacggtaattccttgtgcatacattgataacgctgcaaatacaaagtgagttacactggaaaacaaaatatcgagatggagtcctaaacaatttgctgcagttaaaaatacactagtacgaaatacgaaatatgatacgccagcatgttagtaggaaaagaactcttcaggctttttctttttgccatccctgtgatcaatgcgaaatacgccagcatgttcattgaggatccagaggatggttgtgagctcgccgccacaggcgagctgcttggcatgggaatcccttgtgcatcggaccgacgcaaacatcagaagacgcacccatgccatgaagatatgttccagcatttccgacatagagaagtcctccttgtcccattttttcagttcaggaatcaactgcttaagtcttttatacctatcgaagccaggggattcggagctgaaggttttgggcgtcgtaatgttggacttttctcctgggattttcattacccgacttagcagcgccaaggcgaagctagttccgtcagagagaattatattctggtcgaaaagagcacttgcgagttctggcctcgacttgtgggtactatatcctggcctccagttgctgatattcatcggcctcatgggtttgggctgtttctccttgtctattaggagttgggcgagattcttctttccttccacgctgttattaacagaagattgtaattggttgcccttaatttcgttcagtgctttgagggcaccttcgtacaggctgcgtagcttaaggcctggtagcatgcttgggcgcaccacgacgaggaacaccatgtaattcgacagtgccttgatcgcccgtacatgccgcaacgatgatgcatattcaccactgatcaagaggaagatgtctgtggtgatgtgcaagataaggatggtctcttggaatgcaggtgcaaagtccagagcctcttctagttcccgatgcattgctgcttgcggttccgccaacaccgccgctacttgttctggtaattccaatgcgggcaccatgggcggctgcttgtcaggaataataggcgggtacgctgacttgagacattcccatatactttcgaacataaggttcctaacatctgatgactgatagcataacatatgaaagcccaacgagttgtggtatctgtactccatccaacggtcatccagtgaaactaattccaacactgatttccacatcttcaacttccatgttatgtcacgagtgcactcgtcaaacaagttgtattgcccaatgattcctagccacctcctatagctagttgttggatgatccttggaaaagaacctcgacggatccagggagacgatggaacggcgaatcatgcgccatttccctgagcacagaagggaatggtgaagccaggagcgtggcctatcatgcaagaaggaataggtccatgtcgaggccactgctctgaggagccatttgatatccaggatgacgatgccacccagtacgatataggtgatcaaaacgtcaggctgctgcagaccttccttgctctgagaccaaaacagcaagaacattgcagatgtgatgaaatgggaggagaaacggatggcatagccaccccatgtgtggaccatggctgccttggtgtacaagatgtcatacatgagggagagctccatgtccaccacatcgtacaacatctcattctcattccaggtttcagggcggacaatctcttgtttgtcgacatcatgctcgtaagccatattgtcgatgaaggcgcccttggtgatatggagcatgtcatgagccgccagcaggatttgctcgttattgtccatcttcctgcggcctatacgccttaagtttcggatgctattgcttagttttattggcttcttctgctcggcctccttttggcttgaacttcgcatcttctctagcttggcgcgccgcagagcgaatgctctctccccatacttgacaatgcccatgatgaacatgactgatgaggacacccggacaatcgtgccgccgctactgaagaatacattcttgtacagtatatagattgttcccaacacctgcatgaaaaaccctatcatgtcgcgccatgataggatgttgtcttccaaggagtaggaggtgatgttgtccggaccaccagcatggaacatcagcaatgcggcccagatcgtcaccagctgcaccgactgggacgacggtgtgctgccgccgatggaggacagcttgccaagcgcgaacgtcggggcccaattagccaactggtacgccagccacaggaccaacgtctccatgcctgtggctttacggcggcgaacatcggcgaggaagacgaggaggagttgtgccacgaagctggagagtattgccaaccggatcatccacgcattccagaagagctgcaagccaatcatccatccaggcatcgccgaccctgctatagtgaatgggtacatgttagtccacaaggacaaaagattaacgcaaattacatgttaagagatcaaggacaacaactgatccaggatatataaaactgaatgaatatccgttacacctcccagtataatcactgatcaactacgcacctgattgatatcccagtcaagcttggaagctacaaactgctatgatagcagggagttataacaagacgtagaacttgcgcccatctaggatttatgcctctgttgcatgcgctctacatttctatattattagcccaaaggtttaatgcatgtcacagtggatgccagcgtgatcaaaccttttcaatcatccgccttattctaagttacaaggagcgcactgcatgcatgtgcttttgtagccatgtaatagaaacaaactatgggaattaagtaaaggtaacgtacactcatctataattgttttgtacaactatatctgagcaccacatgagcatcactaccattccagggacatgcactctacatttctatattattagcccaaaggtttaatgcatgtcacagtgatcaaaccttttcaatcatccgccttattctaagttacaagcatatactagctaggtacgcactgcatgcatgtgcttttgtagccatgtaatagaaacaaactatgggaattaattaaaggtaacgcactctcatatataattgttttgtacaactatatctgagcaccacatgagcatcactaccattccagggaatgggatagatccccagttgcttctgctacatctggatttgctaaaagtgctatagctcttccacatgctccaaattaatgaccagttggttttgccacagctggatttactaaaagtgctatggctcttccacatgctccaaatgaatgtaggtagttactccctccattttaggctataaaaagttttgcctttggttaaagtcaaactgtttcaagttgattaagtttatatacaaatatagtaatatttataatactaaattagtttcatcaaatcaataattgaatatattttcataataaatttgtcttaggttgaaaattttactacttttttctacaagcttgatcaaacttaaagtagtttgactttgaccaaaatcaaaacgtcttataacctaaaacagagggagtaatttccattgaaagatgccatcttcataagatgacactacaccatgtcctaaaagcaccaacagaacatctgtcggcagaggccagctttcacgtcatcttatctgtcggaaaagacctttaccgatagaaagagtgtgtccctgagtagcctgtcgttaatggaatccaccgacagacagtatgacctagatatgttagctttcccgacagacctatctatagtgagatacaacaaacagtcagacaacaatatcaatcattgcagtataattagtattttgattatttgatagcatgggcgagaaccatttgtgtacttttgtcatccccaaataactctagaaccggatgtccatcaacctgcgccccatccggtgtccactccgcctagctgccttcgcctggccgcaactccgcaccaatctgtgcggatgcaccccaccgtgcctctctgccctcgaaaggccaccgaacgccagataggagatgaggaggaggtcgccgacgagctgctgtctaacggcgcgtggaagaaagctagtgaggcggcggcggcttgaagaatcaagaggagctaggctggatctagggtccaggtgacgagcagttatataccaacagatagtgggttggaaggtctttccaacagacagtttgacacgagattaacaatcagcgacagaaagtttgcccctagaaaaccatagagttcccgacagatggtatgtcacaagcttttaccgacagacagaaggttagatgttgattctctatttttacccacacacatctgtgggcaattctttgacatggtgtagtgtgataatagcaaagaaaatacaagtataagaaaatattgttcttgatttcatatacattgttttattaattatatcgtagcattttaagttatgccatcttaattgacaccaggctgtattcagtattgaaaaaaaaattgaaaacattacaagggggtcaagaaatagaactgaattttccacgcacaaaaaaaaagaaatctgaacatattttactccctccattccaaaatataaggcacaaccacccttaacccaaagaccaagaaataattattatcatcttgtagtttgtactaaatataatgcatgcatactaatattcatttgtagtaaattcatgcgaatcaaattagcgaagtcgactgaggacgacgacgaccctaacgtatgtagtgaagtcataatttatattatttgggttaacctgccctccgtcaaagggaagtccactagatgattcgtcttcttttgcttttatagttgtgtgtagataagtactagcctataactaaggggatgcctaacgtacaattattgtctgacaagttgggataaagaaatgagtaagcatgcccgtaattgaataattaaagctagctttcgtattaaatttattagtgatctccatgaaaccaccactggtggagaaatcgtttgtagtcccggttcgtaacccccctttatatatatatatatatatatatatatgcatgtatatagaatacatatatatatatgcgtatgtatatatgtataaatacatatattacacacatatttataatttaaagcacttaacattttaacattttatgtacatatatgttaccaaaatatatattaacactaaagtaaatgtacgtacatatataaatatatatatatatatatacatgcatgtatagtacaatccatttgctcgctagctatagctacgacttcgtcgcctgcgttacgtcagaagaggaaggaccgacgttacaaattgtcgatccgtcgtagtagaattcaccatcgggattaaggacttcttcgttgatgaaccccatcagttgttcttgaacagccgtgataaaatccttgtgtgggagtttttccctcatgtgaatacgctatcattcgaaaaataatgacatatcaatatatgaaattaataaacaacttaacaaatcaatacgcaatgaaattttgaatggtttatgtatacatacatcgagctctcgtttggtgtatatttggtttgataggcagtgggcatactcgcgtacgtagtagcgcataagttagttcccttgtcctgctttgcacactacatgagaaacgatgagagatttaatatactctttatattaactgtaactagagattcaattcaatataattttggatcatgcatgtactcactggaaaatgaaacctctgtccaagtttttctttccaagtcccgcggaccaattgacggaactgatcccaagccctacatgtgcagttgcaagctatgattaattaaatattacccaacatcaacataatagcaacagagtcccgcgactttggaatagatggcattatattacctgtctatcagttggaagaccttgtcaaaaaccttctcctctttattcattgagtcgtacacagtgactctgcatgcggccaagtcaaaaaagaacaggacccagtggaaactggaatatgcgtgagataagataaatatcagaatgtatatgttatatgtatgggaatgaaatttgttcgaacgacaataaaaattcactctgtgttgtacggcaatagtatgaacgtcttgtaatgctgctgtgttaggagatggacgagattgtcctctgtatctttctcgtacttgtcgagcatttcggtgttgattttccgagggtcgatgaacccagtatcgtaaaccccccgccgtcgggccctttgaatctccattctacaacaatgaaaggaaattattattgcttacatatatgccaggagctaattatttgtaacaccctaaaattcgaccaataaaaattaaattctaaaaatgcggaccttcgaaaactttataaataaattgcatcatgccgattttgttcaatgattttattggattttgatctcggagttcatcgattacaaatagaggaaaaattaattaggaattaaccctgaaattaggttggttaaagaaataaataaattataatttaaaataaagattaggtgtggattgaaataaataaaatattaccacgaccatatttgtatcaattaaatttaaatgcgatggaataagaattaaccctaattaaaaattcaaataaattatataaataaaatatgggtaatattagtctagggtgaattcattagttaagataacacaaatattgagtaaaatccatatatgcaaaaaattaggaatggtggaatcaaatttataaaagaaatagactaaaatgagaaaaataggaaaatgcactgttcatttcactctaggtgctcgacgtggtccccctaacccagccccctcctctgccgtcgtcatcaccgtcgccgtcacgccgcgtaccgtcgtgtccccgtgcatcgcatttcctagccctagcccctcctctgccaagctgcctcgcgccccgcgcgccgcgcgctgcctcgcctcccctctgccgtcgccgacgcgtcttgccgccaccgctgcgccgcgcaccatcgccatcgccgctgccgcgccacgccgccgtcgcatcgcctcgcgccgcgcgctcaccgccccgcgccccgtgccctgtcacgcgtcgccgtgccgctgtcccgtcgccgtcgtgtcgccgtcccgcgcctcgcgccgcgagccgccgcgcgccgtcgctgcctgtcgcgtcgccgttgtcaccgtcgccgtcgacgtcccgtcgccacgcgcgcgtcccatcgccgccacgtgccccgcgccccgccacgccgctctcccgccgcgtcgccgcccgtcgcgtcgccgctgtcgccgtcgacgtccagtcgccgcgcgcgcgtcccatcgccgcctcgcgccacgcgccgccgtgccgccgtcgcgtccccgccacatctctcttccctctcccctt

SEQ ID NO: 23967 - DNA, 6453 bp, Oryza sativa
ccgtcgttgtgccgccgcgccgccgccgcaaagccaatgcgccgtgccgcgacttgcgctgccgtcgccatcgtcgccgccgccgccgctggtgagccgtcttcacccccctctcgcgtccaccgccgtcaccgcccgggtgagcaagagccgggagagagagagagatagaaagaagccgagagggaggagagaaagagaaaagaaaggaaagggagaaaaagaatagaaaggaaaaagagaaaaagaaaagaaaagaaaagaggaaaaaaaacaaaagaaagaaaaggaaaaataaaaaaaaaggaatttgaaggaggttaaggaagtttagaaaatttaaataaatagaatttaattatagattaattatagtcgtagaattgcaaaacttaatatagttatagattatatttggtaatctctataagtaatcaattcacggtagaaattcggatttaattactagtaattttagccgtgtattatatttagtcgtttagtcatagactaaattaaatcgtacaatattatataattcgaggatttcgtccgatacttagccgcgatagaaatttttaacctattacatgcatataatattcgggttgattaaattaaagacttgtgctaataaaatatttatacccacgaaatagtttaggatggataaattaagatcagattagctctattccacaaacaaaaatagataatgtaagaaaccgacttccgcactcgatgtcttcttgaatttacttggatctttatttgaattctaaccggattcaaatcgtttcctcgcacgtaattttagagcccgagggagttgcggatccgagcaaggatcaagacccgcaggactacgagcaaggcaagtcatcattattccttgaacatgttgatcccaattgcgaaattgttttgcttacaaataaaattgcatgcaatgatgaacatcctacttgcgattatgccatgccttgattattgtttaccccttattccttcgtaaacatgtttacgtatgagtccctagtcaactatgacaaatgcttagaaatgctattctagaatcatgcatactcatatttatcaaatgctatatgcttgggcaattgcctttgggaaggtaattgagatgcggcatgtggagacatgagcaccacattgccatgatattgatgacatgatttgcgaaaggagaaataaaactaaacaactgttttcgactggggcggacggaggatttgggtggtatatggaaaaggctagtaccgtccccggtcaattaagcaccgagccatgaagttaagcatgaaacgacccccgcacaaccgcacttctcgtatgggtatagacctagcggagtagatagccgagcggaggcagtatccctgcatagatggttcacccctaagcgaggcaggtgcgctatggtgggacagccgttgaggtagggccgagaggcgtgccctacatcagtgtcgccattgtttggactgccatgagtgtgtgtgagagagaacttaacttgaaccataatttaatatgtgtgtgagacttctctttcctgggagagccagaactcctctcactgctagaaacatggaggcctagagtgcgtgaggatttaggttcatggagcgggtactgccaatgcaaggttatcgaaaagctttgccgtgacgagtctcatgtgttgggacgaggctcatgtgttgggcagtcgcggagtgcaggtaaagtgtacatccactgcagtgtgagtaaaccaaatctattcgaatagccgtgctcgcggttattgagcaccgggacatgtattacacttggctagactctaaattcttaacttgtatgggatgggatattgcataatgatttctatactgatggaggcacttcctgagaggcgggaaggtggacgtcctcagaaaactatgacgattcaatggcgggaagctatccttgggatcacaatggatggtggacagaaccgtcgttgtctaatgcgaacactagtattaaaatttgatcaatgcatgctaggtcttaggcttgtgaaaagaattacaaaacttgctttgtgcaaaagaaccatagccattccttgaataccctttatcatgtgcattgttgctgtggtggcttgctgggtacggttgatactcacccttgcaacatacaaacttaatcagaggtcggagatgaagcttcagaggacccctacgcttactaccaggagggtgatgaagacgatggcactcagtaggtcttagttacggtcgttgcctgtggcaatggcgtgccgctgccttaactccgctgccctatctacttctgtttttgggatgtattccagactgctcggtccgatgatttaaaactatgcctgcgggcttatgatgtaataattcgtactagacactcgtgtatgtgtatttggtatttcagctatgaattcgtgtgtaccagactacttgatccagcgaaatggtactgtttacatgattgattcctgttataaaaacgggggtccacattattgaacgaaacaaatcgaactcaaagatacttacaaaatccatgcgctcagaagagagacgtcgagggcgtcccgatggtacagatcgaagacatccttgaaatggatccatagaacatcttctccttgcaagaagtcggggtttctgatcttcgctccgaacatctctctaccattggcgcttatttctatgtaccattcatggaatttgtacatttgtgtcggtagggactgcagctgctcaggcctgacaagcggtttaccgagttcaaacttgtatgccacttccgccttcgggattggtgcacctccaaccaactgagccatggttagaccggtgtccgaaatgaaatccgttatgccaaagtcttcgccggtcaccaacggctcgaccacttggtgtggttgttctccaagctgaggaactggtttggatttcctgtaataggctttcctaagtgttcggtcatagtccgattgctttaaggcctccttgtttgcggtggacattcccttgaagaaattcttcacgctcgggtcgataggtatcttcttttcaggactccgaggcttgagttgcctcttcacttctcctgccacataagcgtcaagctcctcttgactgcaaccgtacggcggctccttgtttttggtggtgtcaactttggccttcttcgttgcccttgtgctggcaggaggtggagcttggcgagaccttgtcttgggaggtgcaggcggacacggtggaggaggaggcggaggagccggaggagatggtgcaggaggaggtggcggaggagccagaggagatggtgcaggaggagatgtctaccgtcattattgctttccttccgagagtcccctttccctgtagtctcccttcatggcgtgattcaggtaccccgattgggcgaaggtcttcaataaattctacgtagaattcaatgacctcctctgttccataccccttggcgatgcttgcctctggacgagcacggttacgaacatacttcttcagaacgcccatgtacctctcgaaaggaaacatgttgtgtaggaacacaggcccgagaataccgatctcgttcactaggtgacaaagcagatgcgtcattatattgaaaaatgaaggtggaaatatcaactcaaagctgacaagacattgcaccacatcattctgaagggcttctaacctatccggatcgatgaccttctgcgaaattgcgttcatgaaagaacatagcttttttattgttgcccggacattgtctgggaggataccccttattataactggtagcagctgtgtcatcaacacgtgatagtcatgagactttaggtttgtgaatttcttctccttcatccttattattcgctttatattcgtggagtatccagacggtaccttgatgccctccaagcattgaaacatactttccttctctgccttgccaagagtgtagctggctggactcaagtaatggcttcctttctcctctggttccgggtgaaggtcgccgcgttgttccatatgcttcagattattacgtgcttccagtgtatctttcgactttccatatacacctaggaagccaagaaggtttacgcaaaggttcttagtgaggtgcatcacgtcgattgcgtggcggatgtccaagaattcccagttgggtaactcccaaaatatggagttttttttccacatcgccgcgtgaccatcttcgctttctataggctggctgccaggcccctttccaaacactactttaagatctttaaccatagcaaacactgttttcccgctgcgatgtttaggcttcgtacggtggtccaccgtatgttcaaaatgcttgcctttcttctgtaccgggtggtttgctgcaaggaattgacgatgacccatgtacacaaccttcctacagtgcataagatacgtacttgctgtttcatccatacagtgcgtgcaagctttgtaccccttgttggactgcccggataggttgctaagtgcaggccaatcgttgatggttacgaacagcaacgctcgtaggttaaacttctactgtttgtcctcgtcccacatggggacacattccgtcttccacaacaatttaaaatcttcgaccagtggtcttaggtacacatcgatgttgttaccaggttgcttggggccttgaataataatcggcatcattatgtacttcctcttcatgcatagccaaggggggaggttgtagatacacatcgtaacaggccaagtgctatggccgctgcttatctctccaaaaggattcatgccatccgtacttaaaccaaaccgtatgtttcgtgcgtcctttccaaagtctttaaattttctatcgatgtttcgccactacgaaccatctgcggggtgtctcagcatcccgtcctgttgacgttcttcagcgtgccaacgcatcattctagcattccccttattcctgaacaaacgccttagccgtggtattatagggaaataccacatcaccttagcaggaattctcttcttcgttagctgcccgtcaacctcacctggatcatctcctctaatcttgtatcgtagtgctttacaaacagggcatgcttctaggctatcgtactcctcaccgtgatataggatgcaatcatttggacatgcgtgaatcttctgaacttccagtcctagagggcagactatcttcttagcctcgtacgttgtctcgggcaatttgtttccctccggaagaatgttcttgacgagtttcaataaatcgccaatgccttgtcactaataccattttttgccttccattgcaagaactccagagtggtatccaacttgttgtgcccctgctcgcaacctgggtacaatgacgttctgtggtcctctaacatcttgtccaatttatgggcccccttttcactttcgcagtcctttttgttatcttgcaacatctgaccaagatcatccgcaacgtcgttataatcagcatctatgtcctcctcgcctgtttgatttccttcaaatccagcgtactgagcaaagtctggaatattgtcgtcttccacttcatcttcttccatttcaaccccttgctctccgtgggatgtccaacaattatagcttggcatgaaccccgactcaaacaagtgaaaatgaatagtcctggatgcagaatactccttctgattcttacacttattgcatggacaacaaataagacccttctgcttgttagcttcggccactcttaaaaaaataatgcacgccgtcaataaactctttggaccaccggtcagcgtacatctattgccgatccatctacatgaaatgaaaaaaaatcgtacacaaataatcattcgtacaataatgacagtcatacaataatgataaaataatcacaaactctttcaataatcatacaataatgacatatcattattcatacaaaaattataaaatattccaccaaataattcttatttattattttttaagttttaaattcttttaattttcaatttagtttgatttcttttatttaaaattaactttcactatattttcctactcaactattttataaaaccttatttagcaaataaacaaaatttgtatatattctttcttttccacacaaattttctctctcatcaacttacaacaaaattttggaggcaaaaaagtgtgcaaaacatagctccaaatgtaatatgaccaaaaaaaacattggaggataaagttgctaaccttttaggcacctccgatttgtatataatcaccaaagtaaattcactataaattttggcatgacctcccctcttttttgaagaaattttgaagcttgctcgggctggaggaggaagaagatatatataaaggggtgggactttagtcccggttg

SEQ ID NO: 23968 - DNA, 9528 bp, Oryza sativa
  unsure (1)..(9528): unsure at all n locations
tctttagtaccggttggtaacaccaaccgggactaaagattccgggggggcctgacaagccctgacagcatttgaaccaggactaaagataatttttagtgccggttggtattaccaaccgggactaaagatcagatatgcccgttaccctttttaaccgggactaaagatcaggtttttgtttcaaccgggactatcgtggaattcggtcgaccgacgaaagatggtttctccagcagtgcttgctcaatgtgccagcatgtgacggcagctggttaatgttgttaactaacatgcgccaaaagctacaagtctgttaaatttccaaggttattcccagatcgaactcggcccaatcagctcgcagcttcaagaatacagtacatgaaaaagaaatgatgatttggcagagtgccaccaaatgtagtttcgtcctactatatatggcaacttttctgttaaatttccaaggatcccagatcgaagtcggcccaatcagctggcaacttcaagaatacatgaaaaagaaatgttgatttggcagagtgccaccaaatgtagtttcgttcaactatatatggctacttttcgctgaaaaattaaatgtccatactaattaaagctgctaatattgaatttcttcttcctcagatatatatatttcacatctatagcttgcgattatcaaagtctaagtaatgtaattgttcacgtttaaaactttgctaattacttgttttaattaactaacctttgcatccattcgaaatttcattaatcttacagaaacttttgtcccgggctcccggcacggtaattccttgtgcatacattgataacgctgcaaatacaaagtgagttacactggaaaacaaaagatcgagatggggtcctaaacaatttgctgcagttaaaaatacatgacaatacgctagcatgttaattagtaggaaaaaaaactcttgaggtttattgttgttgccatccctgtgaatgcgaaatacgccagcatgttcattgaggatccagaggattgttgtgagctcgctgccacaggcgagctgcttggcatcggaatcccttgtgcatcggaccgacgcaaacatcagaagacgcacccgtgccatgaagatatgttccagcatgtccgacatagagaagtcctcattgtcccgttctttcaatactggaatcaattccttataccggatccgaaggttttcggtgtagtaatgctgatcctttctctgtatcggtttctcattacccgacttagcgggcaccaaggtgaagctagttctgtcagagagaattatattctggtagaaaagatcacttgcgaattctggcctcgacttgtgggtactatatcctggcctccnnnnnnnnnnnnnnnnnnnnatcattggtttgggctgttcctccttgtctattaggagttgggcgagattcttctttcctccatgcacttaacagaagattgtaattggttgcccttaatttcgttcagagctttgagggcaccttcgtacaggctgcgtagcttaaggcctggtagcatgcttgggcgcaccacgacgaggaacaccatgtaatttgacagcgccttgatctcccgtacatgtcacgacgatgatgcatattcaccactgatcaagaggaagatgtctgtggtgatgtgcaatataaggatggtcctttggaatgcaggtgcgaagtccagagcctcttctagtacccgatgtattgctggttgcggtttcaccaccgacaccgccgctgctggtagttccccttccaatgcaggcgccatgggcagcaccttgtcataaataggtgggtacgctgacttgatacattcccatatacattcgaacaaaaggttcctgacatctgatgaccggtagcataacatatgaaagcccatcgagttgtggtatctgtactccatccaatggtcatccagtgaaactaattccaacattgatttgaatgtcttcgacttccatgtcatgtcacgagtgcactcgtcaaacaagttgtattgcccactgattcctagccacctcctgtagctagttgttggatccttggaaaagaacctcgatggatctagagagaggatggaacggtgaatcatgcgccatttccctaagcacagaagggaatggtgaagacaggagcgtggcctatcatccaagaaggaataggtccatgtcgaggccactgctctgagaagccatttgatatccaggatgacggtgccacccagtacgatatatgtgatcaaaacgtcaggctgctgcggaccttccctgctctgagaccaaaacagcaagaacattgcagatgtgacgaaatgggaggtgaaacagatggcataaccaccccatgtgtggaccttgactgcctgtcacgcccggaaattcactagtaatttccgaactaatttgtgcataaaatcctcgtccaggaatcagccgaggtacacaaaccgacaatttaatataccaatccatcttaataataacgttacatacttacaaagaaaagaaaacagcagcggaattaacggtctagcgatggcttcagctccattcccacaggcagctcaactggggtataagccaaacgtcttctccttctgggtcctttatcttcaactgcggtttgatgattattgcaagaatgagcatatgacatactcaacaagccacacagcaagtatgcaagtgcacaaggataccaaaggatggcataatataggctcatttgcaaaagcagcatttagcaaagatttaagagtagtaaaacagtagagtaattaatcaccacttttaatcaacactgaacagcacacccatgctgctcaggcccaaccaaacctgaacaaccaaccccggtcgtacagatcaaacctccaaactaggaattatccattccaaaccaggagtcaaattaattctcacattattaacattgatgagtagtgtgaaactaatcacgaaaaacattgctcaactcgcccataaccgcgggcacggctattcgaatagttttactctggccagaggtgtaccactgtacccacaagacacgattccacacatgttgccatgccccgaaataccaccacggcattgcaaagggggaaatcgtgacaataccctttccacaacacaactcaaaacagtgcaccattcctggatcataatcacccccttataaacaaggcacggactccccagcgacccccgtggacttctcgccacttctcagtctggcgcactataatgaatcaccctatacaaaagataaaaccgttgcccacgctggcttgtggttggcacggttaatgtctcacaacagtagctcgcgaactggtccttaattgtcatgagcacaaccatcaaaaccatatgctcacaacccaccttaaccagattttaattatcaattaattaacatcacacgattaatcatcgtgagctaccattaaatataaccataattaataagaattatataatttagatttaacccctttagttagcttatgtttctaagcatggctaagcaaacatatatatagcatttagctgaaccaatccaatatataaggttcatgctaatcaatttattacccaaggtatcaaggaatagggcattcaatgcaaattggccataacaaaggaataagttcacaccacccggtgacattcgaaaataaatgcacagttgaaataaatagagaatttaaatataggatcaacatgctcaaaggattgtgtttaggatctgtgtgacttgccttgcaataatcgatcttcaattaaccttcttgatcacttccaacgcactcacgaaccttcgcaacgacggaaacaacaagctaacacgcaaaacgaagaaaaagactaataaaaaccaaataaacaatacatataaagtaaacaaacatgtagatcatgattttagatgaattatgagacttgaacggccttattctgactccaaatgaatttattatgaattttacaagattaaatctaattaaagcccatttaaaaagaattaaataaatttaattcaatttatggacaattttaatatgtagatctttattttagaaaaatttagcaacttgaaccacctgaaacggagctacggttatttagttatgattttccgaagatttaatctattaaaagaaattggaaaagaggaatcatgacgtcatgctgacgtcatcatcgtcggcatgacacgggcgacgacctcgccggcgatagagagatcggccaggctatgcaagggcacctacgcgtagaggacgacgagacgaatccgatggtgctcacctatgcgtccaacgacgaccgacgacggccgacgacgagaggaggcgacggcggcggcttggacctcgccggcggcgagatacggcggtcggcggcgacggggaggaggcggccgggcttccccaccaccgtgcgtatgcaaaggcggcgacagcaagcggcggcgacagcaagcggcggcgacggtggacgcggcggcgcggcgtggccgaaggatggccggcgacggcggcgggttgggcgacgaggcggcggcgctacggagcactagagaccacgggagagggggcaaacgaaagagggcgacgaggtggtcctatttatagccttggattgaagagatcggactcctcccgcaagaaatcgatccgagaaaatcaaaactcggttttggagataaactcgaaaacgagtttgattcggataaaatacccaacgatttgctccgattcttgaggggaaagatagaggaggatgtggggataaaaacccctcaaaaatccagaagaaacggggccggattggagcggatttgagaggagaagggggcggctcgggctcgactaggccggccggccggaggttgaagaagcaaccgacatgtgggtcccacatgtcggtgacccgaggaggagggggtgggcggcgtcggctgggccggcttgggccggttcggccgcgcgaggaagagaagagttgggccgaaatcggcccaacgacttaggggaggatttaaaaacttttccaattaaaataatttgtgaaatgatgtttcatttattaaaaatacttcccttgctcaaacaattcccataaaattctagaaaatagaggaacaagcaaagtatttaataaaattttatctagctcatttttatattgagatttaacaaattaaaattagatcttctcttttaagcttttaaaatcatttctaataattccttttaaacaacaatttataatttaaggattttaaacaagaaaagcacttaacaattataattagaccatttaatgattaatttaatatgtgggtaattactgaaatgctctttgtatgattaaaattaggaattgagctccgaaaaatccgagaatattccagagagtataattaaccatggagaatttaataaaaattaaatccatccatgctttatatttaggaaattttatttcccacatttaacttcacttgtaaactaatgaacatttaatataaattctattaataatttattaaataatttataaatcctaagacgaaaatcagggtgtgacactgccttggtgtacaagatgtcgtacgtgagggagagctccatgtccaccacatcgtacagcatctcattctcattccaggtttcagggcgaacaatctcttgtttgtcgacatcatgctcgtgcaccaaattgtcgatgaaggcgccctgatttttatcttacaccaattatttctatatattcgtggagcttaactttacctataagctattattatgaagatgctattaaaggatttgtaaatttatatttgcttaatatttggtgagaggtggtgttgttagacttgatccttatgtcttcatgaatacttcctaaaggtatttggaagtttgtatgtgtttaggtttgtgtccaactgggtaaagcttaaggtagaattgagttaatatgttttacttatcttttatattcatgagacctattatggaatgcattcaaaatccaaaaacacacaaaggactcatggcacatcagtacattatgcaaatgcaagcactcacgaagttttagctttatcagtaggttggtaaggaaaaggttttaaattattcacaaatttatttatgaaaactagtcataaatttggaaacacatttttattattttaacgaaatcaaaatttgaaaatcgaaatttgggtatgttacaatttctctcatagcaacatactcaccatacaaccaattacttccatgtcctggatagagactcccattttagtgcagtttatctcatgaaatattttcatatttaaaagcctaccaccggatcttccatgggtagctatatcctaacatctgaagcaattatattgccatatgttttagttcattttgtgctaatgttatatatgtgtgtgatggagtcaataaaatattaactttaagaataacacagaaaaaataatatatgctatggattgattgatattttgtgtttgcaggtaaggcatgtaaataggccctgtttgtgcatttgacaaaaaaaattctgggttgtgtgccccatcaagatcttattattctctttcaaaattgtcaatgtatcagtagacaaaccagcagatgtttaggtgttcggttataatctaaatgcctgtaatgcttattttggattgtaacattttttacagcatgtatattgtacattaaatctactgtaatatattgaacagaatttgtatgtgttgcatgtcatgagctcatttcgattctatccatgtccacacgcagcgtagcgcgtgtctcttgctagttagtactgatccataacggctagaatcactacacgatggtctaatttaccaaccgacttttgttggcaaaaggtcagtttagacaacacatcaactgtaggcaaatatgtataacaacgccaacgcactatgtgtcacaccccaatctggtaccgccgaacaacggcacctgactggagcgtgtcgtaggaaaaactgcgcgaaccgcttcctatgagaccgcgatatcggtaccagtccaggatatagcgcttatatccacggggacaataataaatcattgcaatccttaaattaaatagatgacttatttaccttaacttgagttgcaactctcgggaaactgacaatgcaatagatgacacgaaagcagcaatagcagaagcagaggcaactgagaccaacaaactaatacccaacaccacaggcaacagcaaggaaccaggatgaaaccctaatcttcacttcacttgaacttcaccttcggagcaggcaaaactatatatagagatcaagggtgagtacttacgtattcagcaagccaggggaacttaggtggttaatgcaagtttcaagggaaggctgctattttgcaatcggttttttaatacccaaaaaattcgaccaataaaagaaattctaaaaatgcggaccttcgaaaactttataaataaattgcatcatgccgattttgttcgatgattttattagattttgatctcggagttcatagaggaaaaattaattaggaattaaccctgaaattagcttggttaaagaaataaataaattataatttaaaataaagattaggtgtggattgaaataaataaaatattaccacgaccatatttgtatcaattaaatttaaatgcgatggaataagaattaaccctaattaaaaattcaaataaattatataaataaaatatgggtaatattagtctagggtgaattcattagttaagataacacaaatattgagtaaaatccatatatgcaaaaactaggaattgtggaatcaaatttataaaagaaatagactaaaatgagaaaaataggaaaatgcactgttcattgcactctaggtggtcgacgtggtccccctaacccagccccctcctctgccgtcgtcatcaccgtcgccgtcgcgccgcgcaccatcgtgttgccgcgcatctcgttccctagccctagcccctcctctaccaagctacctcgcgccccgtgcgccgcgcgccgctccgcctcccctctgccgtcgccgacgcgtcttgccgccactgtgacaaatgcttagaaatgctattctagaatcatgcatactcatatttatcaaatgctatatgcttgggcaattgcctttgggaaggtaattgagatgcggcatgtggagacatgagcaccacattgccatgatattgatgacatgatttgcgaaaggagaaataaaactaaacaactgttttcgactggggcggacggaggatttgggtggtatatggaaaaggctagtaccgtccccggtcaattaaggaccgagccatgaagttaagcatgaaacgacccccgtacaaccgcacttctcgtatgggtatagacctagtggattagatagccgagcggaggcagtatctctgcatagatggttcacccctgagtgaggcaggtgcgctacggtgggacagccgttgaggtagggccgagaggcgtgccctacatcggtgtcgccattgttaggactgccatgagtgtgtgtgagagagaacttaacttgaaccataatttaatatgtgtgtgagacttctctttcccgggagagccagaactcctctcactgctagaaacatggacgcctagagtgcatgaggatttaggttcatggagcgggtactgccattgcaaggttatcgaaaagctttgccgtgacgagtctcatgtgttgggacgaggctcatgtgttgggcagtcgtggagtgtgggtaaagtgtacatccactgcagtgtgaatatcctcttagcattaccggtaagccgagcaagcgtgatcagcgcttctcaaggatcatgaataaagatccaaattgcactcccatggctacgcatggttcttgaataatgtaaacagaacatccggaataatgaaacatgaataacgtcatgagtttgaatatgggtcgaaacacgaataagtagcataacgtcatagccatacaatcagtaataacaagcaattgaataataattatgcaagtaaagccaaacaaaacaactcagttttgtccatcacataagttcgtcttgtacttgccttaactcattcgatactccgactcaactcctccaacgttggaaccctccacacctgtggagcaaaactacacataaaccactatattcaactaacgatggttacaggggatatttactaaaatcgaaacctataacatataaaccttttaccgatttgtattaaataacctatagctgttccattactgttttatgagtaactcacaaaccgtctaacggaaactagcaaataatacaacttcggacatctagacaaaattgtctacaactttcatgctgagcacaaaaacagataaagcctctgaaaat

SEQ ID NO: 23969 - DNA, 2810 bp, Oryza sativa
aaaaaccggaaacagatcgtcttaaatataaattagaaacaactatagactaaaacggattacctagcagtactaatgtataaggaaaacgaagaatttggaaatattcaccaaattccccaaatttcccttctatcaaatttccccttctttccttccttcctgttcttctctgccttctctccctccttcctgttcgttgcaggccaacagcagcagcagcagaaacgaatatcggcagcaacagcaagccgtgcaccaccagcaaggaagagatcagatcggcaacagcagggttcggcagcagcagggaaattaacagaaacaacagtagctcacccacgaaccggctgcggacgacgacggctgtggcgaccggcgacggctgcaccagcggcggcgccggcgaagagaggaacagcagcggtggcggcagagcgcaggaggtgcggcggctagggctacaggagaatcgctcctgtttcttttttttttcgtttgttttttttttggtttgttatataaagagactaaataagatctaacggctcacatctattcaatcctcgggacttcgttcggactccgattactataaatttatagtctattttgcactactcggcgagctctaggcatccacggttcccgatcgcctatacgaacaatggtttaaaagttgaacttttacgcgtttgctctaatattccgcaagatatattaatttaaaactcggggtattacattcttccccccttcgatcgaattcgccctcaaattcgcccaatcatactctagaacacgggatattacattcctccgtccttcaatcgaattcgccctcgaattcgtccagttatacctcggacaagtatagaaaggaactcataggtaggacttatataactcaccagacgtgaataactctggatacttctcccgcatctgtgactcaagttcccatgtggcctctcgctcggtctggtgcgtccagagaaccttgacatacttgatagttctatgcctgagcaccctctcagattcctctaatattcttacaggatgagactcaaatgtcaaatcttgctcaatggtcatcggctctacggcaacatgatgttcagggtctctcaaatattttctcaacatggaaatatggaatacatcatgtacacctttcatggactctggtaactcaaggcgatacgctaggattccaactctttccactatcgagaatggaccaatatacttagggctgagtttgcctttcgttccaaatctcacaacacctttggttggagatacctttagaagtacttgatcgcccacttcaaactctaattctcgtcttctgacatcggcgtagctcttctgcctactttgagctgcaagcatgtgttgtcgtatttctactatccgttctgtggtctgttgtacccaatcgggtcctaaaatagttctctcccctatggaatcccaacacaatggggatcgacactttcttccataaagtgcctcatatggtgccatttgaatgctagcatggaaactattgttgtaagcaaattctacaagcggcaaatgatcctcccaactgcctttccatgaaaggatacatgatctcaacatatcctctaaagtttgaatagtccgctcagattgaccatcagtctgagggtgaaaagccgtactgaatttcaattgagtatcaaatgcctcttgcacagattcccagaacttagaagaaaacttagcatccctatcataaacaatcgagcgaggcacaccatgtaacctcactacctcgcgtgtatagatcggtgccaagtcactcgcagaataagtggtgcggataggaatgaaatgtgccaccttactcagacgatctacaaccacccagatggcgtcctttgctcatggagttcgaggtagcccaactacgaaatccatagcaatatcatcccaagtccatacaggaacttccaatgattgcaactttccagcaggactcttatgttcagcctttactcgctgacataccccacatgacgccacgtacttggccacatccactttcatcctcttccaccaatagatcttcttcagatcatgatacatcttgttctccccaggatgcacagtatatggtgttcggtgtgcttctcgcaaaatctcttccttgactttagctttttgtggaacacataaacgcccatggaatcgcacagctcccgaggaatccaaagtgaaatctccagtttttccttactttacacgtttcttaacttgttgcagcaaccgatcgtgttgttgggcctctagcactcgttggggtatggcggactcaagaatgactcgtgactcggtacttgccactccaacataacaataggagatatccatccgttcaaaatcagttatcaaacaacccatagttggaggaacgaccttatggcttagagcatctgcaaccacattcgccttacccggtgtgtattgaatgttaagatcatagtctttaatcaactctagccacctcctctgccttaagttcaaatccttctgagtgaagatatatttcagactcttatgatcagtgaaaatatcacaagattctccatacaggtagtgcctccaaattttgagagcaaagaccactgctgcaagctcaagatcatgagtggggtaattctgctcatgcttctttaactgcctagatgcataagctataacattgccctcttgcataagaacacaaccaaggcctactcgtgaagcatcggaatagacagtgaaacgtttaccag

SEQ ID NO: 23970 - DNA, 11733 bp, Oryza sativa
taccccgccatacccaaaaactcctcacatccttaacattagtcggcctttcccatccgacaacagttaaaactttgcttggatcaatcgagataccttgctgattaattacatgccctaggaaagccacttcaggaagccagaactcacacttcttcagtttagcatagaacttgttttctcgtagggtccctagtaccatcctcagatcacgctcatgctcctctacatctttggagtaaatcagaatatcatcaataaacaccaccacgaaattatctagaaaactatgcaacatgctattcatcgcctccataaaataggccggagcattggtcagcccaaaggacattactctatactcataatgcccatacctcgtggaaaatgcagtcttctcaatatcctcttctcgcactcgaatttggttataaccagattgcaagtcaattttagagaacaccttcgctccctttaactgatcaaacaaatcttcaatacgaggcaatgggtacttgttcttgattgtcgcagcatttaaggcccgatagtccacacacatacgccaactttcatccttcttctcagtaaaaataacaggtgcgccccatggcgacacactccatcggattaacttcttagataatagatcatctaattgtttcttcaactcttcttggaaaggacgagctaaccggtacggggctttggagataggttgtgtaccaggaacaagatcaatacggaactctacatcacgctcaggtggcatccctggcaattctgcgggaaaaacatcaggataatctcgcactacaggaacatcttcaatcactaaaggcttggatgacttctcggctaaggcccataataaccccgtctttacagcacgctgcccaggaaataaccttgacatcacgaaaagagaatgcggaggcgcgctcccttggaaaaccatatcctcgcctgatggagcttccaaggtaatagtcttccagaaacaagagattacagcacgatatcggttcaaccaatccatgcccaagatcacatcaaagagcggtaagggaatcacaattagatttgccacaaattcctccccatcaatagagattgcacaacctagacatactactgaactagagattataccccctagagagctgacttggacagatcgagagacctcttgactaaatagattagctctttttgcaaactcgattgaaacaaaagaaaatgtagcaccagaatcaaacagaactagggcatcatgcgaatcaacttaaagtgtacctgtaacgacatccgggcgaccaagggatgaagctgcaggcatgttgtagactccagccatagctggggtagtagaggctgagacctgctggtgaggtggagctgaagcagaaggatgcgccataggcggtgcaggcaactggagtggagcacgtggagcaaaagattgaggcatgggccaatactgtcctggtaatggtggtggtgggtaattatgtgtgaactgctggtaaggaagtggataagttgtcatcatctgaacggcaccacggggagtactagtggatgaacctgaacctcgaggatagctagctgtcgaagaggttgctgaataggagctcggcttttgccacttgatgatagaatttgggttacgcttacataccaactccatgtgtccagctttgccacacccacgacatgccctagtaaacccacactctgctgaatggtgattctttccacacttaaagcaaattagcccttgccctggaacagggcgaatcaactgagactccgttggacgtgaagctgcattaggctgagaaccccactgcctaggtttagatgatggttgagtgacctgattttgtttgtacttcttgaaaggtggtcgctgtgagttctcacccccttcctaatgagctctcttctgctcattaccagtgacattgccagaacgattcttctgcgcagtagtaatttggagctcaacctccatccctcgagcctcctcaactgcattgaggtatatagtaggcgggtttcttcccatcacttctctataccgagcattgagccctcgaaagaacttcctagccttctcacgctcatcacttgccacgctaggcacaaagcgtacaatactgctgaactcccgttcatactcatcaacagtcttgcttccctgttggatattgtttaactcatcactcatcttgtccctaaatgattctggataatacttagctctgaactgctgaagaaaaacttcccaagtaatagcaccacgatcagggttccacgcttcaacaactccatcccaccaaatgtccgcctaaccagtcaactgaaaaggcatgaaagtaaccttctcctcaggagtcattctagatcccctcatatacttctccatcttgcataaccagtctgcagcattaacgggagtaccagacccatcaaatgtgtctaagcgcatggatgtccatctagtgagtgtcatcccccgagcagctcgaggagcatcatcagagacagcagctgagtggctaccaccctccacctcttccatgtgctcatcctccatctggttcgaggatgctgcctcattatggagacctctaccacgacctcttccacggcctccagcacggcccctaccacgacctccacgattaggaataggggattcagcaaccgagttgttcccaacctctttattatcctgagtattttcaacttcttcattatggtggcccctaccacgacctctacctccgcctctcccgcgccctctgttagccaaccgaacactcactctaggcggcatacctatatcaaacacaagcatttacacgtcattagtttaacaataggttagacaatggcatgcaaggaaacacaatcatacacatatatatgcagcagaaacataaatgctaggaatgacccatgctcccattcctattgtgcaccagtgtgtcaagtttttttagatgtttatatataacccaagttctactcttattatttcctaccctaagagaaaatatatttttttaattggttaggaactctagttcaaaattttatgttgatttatatatctcattacccagtcacttcccatggacctaccgcccgctctgataccaactgtaacaccccaggtaaccacgtacctagaatgccacaccaaattacactcaaaaactaagtcctaaaattattagaaatttcggcagagtctcccctaaaaatacggacatcacgacaggcagttataagaaaggtcaataccgatataaaccacacaatccaaaccattctagctccacaaatcccacgtgaaaaataaggatcagaaccataaatgacctttacaagttctatgcaaaacttatgctgagcaaaaattatagtctaaaactaatttcaattgtgcgcaataataatgtgtagtccaagggtgctactcccgccccgtgccgatcgatgtcattaggtacctaaaaaccaaattaaacacaagagtgagtaaagaatactcagcaagtacaatcttgaactagtaaaacatacgcatgatttatgcattaagaaaccaacatgaagggttggatttactttatttttaaaccaaagaagtcaaaagatagtagttccctcccgggcaggtgtgaatatcctcttagcattaccggtaagccgagcaagcgtgatcagcgcttctcaaggatcatgaataaagatctaaattgcactcccatggctacgcatggttcttgaataatgtaaacagaacatccggaataatgaaacatgaataacgtcatgactttgaatatgggtcgaaacacgaataagtagcataacgtcatagccatacaatcagtaataacaagcaattgaataataattatgcaagtaaagccaaacaaaacaactcagttttgtccatcacataagtccgtcttgtacttgccttaactcattcgatactccgactcaactcctccaacgttggaaccctccacacctgtggagcaaaactacgcataaaccactatattcaactaacgatggttacaagggatatttactaaaatcaaaacctagaacatataaaccttttaccgatttgtattaaataacctatagctgttccattactgttttatgagtaactcacaaaccgtctaacggaaactagcaaataatacaacttcggacatctagacaaaattgtctacaactttcatgttgagcacaaaaacagattatgcctctgaaaatcccagattaaggaaaaatgaactgctgtcctgatttcaggacccggtcagcagtactgtttttgctgtttctcctaaaccgtttaccggaatcgagtgaaactagcaccgttggaaagatattgacaatgactacaaactttatttaggacaactaacctgattcctgatggtttaataccaaatttgaaaatacggtttctgcctagcgttcgatataaaataaattcgaaaaaaccggaaacagatcgtcttaaatataaattagaaacaactatagactaaaacggattacctagcagtactaatgtataaggaaaatgaagaatttggaaatattcaccaaattccccaaatttcccttcttctatcaaatttccccttctttccttccttcctgttcttctctgccttctctccctccttcctgttcgttgcaggccaacagcagcagcagcagaaacgaatatcggcagcaacagcaagccgtgcaccaccagcaaggaagagatcagatcggcaacagcagggttcggcagcagcagggaaattaacagaaacaacagtagctcaccaacgaccggctgcggacgacgacagctgtggcgaccggcgacggctgcaccagcggcggcgcaggcgaagagaggaacagcagcggcggcggcaaagcgcaggaggtgcggcggctagggctacaggagaatcgctcctgtttctttttttttcgtttgtttttttttggttggttatataaagagactaaataagatctaacggctcacatctattcaatcctcgggacttcgttcggactccgatgactataaatttatagtctatattgcactactcggcgagctctacgcatccacggttcccgatcgcttatacgaacaatggtttaaaagttgaacttttgcgcgtttgctctaatatttcgcgagatatattaatttaaaactcggggtattacattcttccccccttcgattgaattcgccctatcatgctctagaacacgggatattacagctatcaacccctcaacggagtattcctatctcttgtgtttgagtgcagtaccgaaacctctccaagatggaggtagtttcgcaataatgcacccggccacaaatttgtcgggtaagacacacttaaggagttcgagttccttagtcatggtttgtatttcatgagcctgttcgactacagaacggttgtcagccatattgtagtcatgaaactgctccatgatatacagatcattgctagcatcagtagcaccgaatttagtattttgtgcatcccatgactccttagcgtcggtcatatgcatatacacctcgaccagacgatcgccaagcatgctaagaatgcatcccacaaagagagtagtggcctcatcgaattctttctgctgatcagcattaagaacgcccataggcttgtcagtactcacccagaagcatttcatagctgtcagccacagagtgaccttgatctgccatctcttaaagtgcacaccggtaaatttatccggccccagtgcatcggcaaaaccagccatagtaaaatcgcagcgcctataataagcagtaaaacatgaacagatcaaatatgcgcaacatgtcgaacacgtaccgaggtggcggaaagaccggttgctcggcaggaactactcgcggttgcgagcgtcgacgaaggcgcgcagcatgcgagcggagaggaaggcgagccgtcgcggacgaacagggagcagttgcgcgaagcgcttcccaaaaaccttattgccgccttctcccggtgcaggatgtcgaaggcagaggttccggagacctgctctcccgatcgccggtgcatactggcgagcgggatggagtagtctacgagcgacggtgcaacacagaggaggaggcaaaccctagattgatttcgcatgtgttgcgtgaaggcggcggctcggtttatatagagataggtcgcttgatcagggcgcccgcacgatctccacttcgcgtaaccgaaccggataaatcgcgcgtaacttatccggactccacgccgttttcacgcaccggatttttcggaatgtttcctacggtttatatagagataggtcgcttgatcagggcgcccgcacgatctccacttcgcgtaaccgaaccggataaatcgcgcgtaacttatccggactccacgccgttttcacgcaccggatttttcggaatgtttcctacaacttatccggactccaggccaggcgaggcgagcgagcgcgcgcgtgtgttccccctcttctctccaccacacatgcttcaagtggctaggagggcatcctcccttttaaggaggtccctctctcctagaataagtaaggtggtactaaactccacatgcatgccatcccatgaggtgggcttttgtgattttccaaagaattaatcttcgagtgggctaaggcccgtccattaattccaacacatcatggggacgatgcggaggatgagagtttgggactgcattctgatggagatgattatcatcgctgtcctcaacaacctctctgccaaggtccagcttctatggataaggtttgttatgttcaccttgacaaccggaatcatcatgttgctcgtgttccattagataaagggctttgtaagatgaaaatctccaggtcttctttctcaggttctcgtgattctaaggattgtctgcaatgggagatgtgttgtgataagatctttaatagtcacaactttcggaggatgagcaggtacgtgatgcacccattgaattcatatattatgctttgtcttggtggaatccattagtatgtgttggtcgtccacatacttggcaatatataaaagaggttatggcttgccattttgttcctgaacattgtactatatcattgtattcacgcttgtagcaactcaaacaaggtgattttagagtggatgcttattataaggagatggaagttaatgagccgtgttttggtaacagagaatgatgaagctattatttattgatggtctcaatgatgatgtgagagatcatgttgagatatcatattatcatataaagagtacgatgcaagcagcaactaaaaagttgtcacactagccattcccgttattttcagtgagacagtgatggatgtgttggtggtaagtcggtctatttcaagctgactactccatctagggatgtatctaaacctgctgctatttcgatgagtaaatccacatctaaaattgaatctactactgcatttggttctaaatcgcgatgtgtgaagtgttatgcttgtgggagaacaggacactatatgagaggttgtcctaatctgaaaagggtgttgatgacttcagaaggttatatttttgagagtatattagaaaattcagaaaagggaatagcttgatcatactctaactacagtatattgatatattgatgatttatcaacggatgatggtattgaacagaagaatggtttatctatggttgcacgtgcaatacaatgagatagctcttacattgatgcaaagggcaacactgcaatatttttcagtcagagtgcaaaattcagcagaagatatgtaaattaataattgatggtggtagttttactaatgctatcagtttagatttagtgcataatttctctttgtctacgtggaggcttccaatgccgcgttataatcaatgtacgaatcaagagggcacacttaaacttactcataagttaagaactacattttctatcggaaactatgttgattaagtagaggaagaccgtgcagtttgatcataatgcagcactcgagggccgaagtaatcactattcttctatgcatcgttgtgttaaacatctgccgaaaccgttacatgatagttctatcaagttagtagtatttcctatcgtaaagaagaagaacttcttttgaaaagaagaagaaagaactatctcaaattaatctaaagccaaggatggatttgttccaagggagggaggataacgtgagcaagaaaaaactaatatgtttcgttggtgttttacccgtcgtcgtgcatcaaagcatggaacatggtcaaacttcgagaactgtggaacagaacccagtaaaaagcaaaccatgtaggctactaagtatatatgtgtcggttaatttattcttgttgagttagcttagcctggtttcgagttaactagccaagggtcattagtaaggttattagcgactagattatcaaagtaattagtatattttatttttttatttgttgagtccgaaaaagacttcatctgagcctgcctgatccctttattagggttgattgactgtgtaacagaagggttcttttggtgtcattctgttgagagttctccaggaaagctgatggtgatcccatatacgaattgagattattgccgttgccgtgaaggtgcgagaagaagctatatttccttgatcttgttacttggtaaatgttagtgccctctcttctgatcatgttagaaagcacgggtagaagattattttatctaggatttgatgttcaactattgtaagcgtagctctcgattatttgatttgtttgctgctgaattctatttatatagacaagtctgatttaattcgttgagttaatgatttcacgctgcctgacaattttaaaaagttaacttgtttatttgttattggtaccacggaagagggacatattcgggtactcgctgtcggtgctcatcatctatgttctttgcaactgtaaacaaatatgggcatgcatagaatctagtaggtaaagaagtcgtatatataaaaagtgctagaccaataaggtgagtatactgatagttggattaacccagttagaaggaaaagaatgtgtgttgctaatttattgacattggtccccatgctggtggttataaaatttttggccatcccctttgttaatgggtatgttcaatcttctaatacaatgcatgcacctagggatttgaattatatcttatgcttgatcatctacgaagaggctcttgcaaacattgaacaggtaatgaatgcccaacagaacattccctagatctgcgtgcagcttctcttttctgtcctgctcaagataacgatggcgagcacttgagcgctcaaacatgaggacgatggcctcgaccaaggtagagaacacaagcagcaccctgaacttgcataatgaaagttagcaggtggcacaaccagagcctattgtcctcctaggaataatctgtggtgttgtctgggccacccaggtgaagcaataggaatgttgtccaggatgcaatcagctggtgctcacctgagctgctgctcgtggtgatggatagccggccaagcatgcagattgcagtggagcagcagatacatagcaaagccagaggaggatccttcgcagtgtgtaacctttgcgccgacggatccatgacaagcggaggacgataacttgtagagcacagcctaggatgactagtatttggatatgccactctttccaaagctagctagctctgcagccatcgcacctcggcttaactgcaaacaacatcacattaatgaaatactgaatctagaaccggccagccttgcatcattagctaaaatgctcgtttttttttgtggagctaaaacacttgttgttccctgaaaggaaagaggaacattctagtagcaattttttttaaatcaaatcaaaataaagttttgtgagctctgagcgatgtttgaaaagagaatccaagcgctaaagataaatatttccttaaaatttgaaaactttgtcaatccataatttattaaaaattttctattaataaataaaaaggatagaatctaagttgaaaaatactgtcataatgttataagtttgttataatacaaatttaactatcaaagatttaaaagctaaatattttttggctggatatataaagtactccctccatttttatattgtaagatgtttttgttatgtcctaaatcatacttagggtaattgactaagtatatagtaaaatacaataacatctaaaccattaaattaggttaattaaaatccataattgaatatgttttgataatatatttattgggtattatagaggtcatccttatgtataatatatttttctcaaaatttcagttaagttcagagttgacttaaaacatactgtaactaccttatcgtgttatcaatatatttttagaaggtgtcgctctaaagtgttactaaatgacaacatatgtccaacgaaatatatatacagcagcttgcacgagagctggtaaagtggaaaccacacacccagtggcgcgccttcgggcgatcggcttgctaaagaacaccactggtctgctaccttcctggagcacagggcccatgtatgttctcgaagtcgctctcgacgatgaagtccatgttgaagtctggtagttgaagcactagggtggtcatttgggctagctgtagtgcatggaacgcagttccgccgcctcttcctagctgaagacctccttgcggagtagtgttgtgagttgcgtggcgatggagccaaagttgcggatgaagtgacggtagtagcctacaagccctaggaagccacgcaccgcccacgccatcttggggattagccaatcctagaaggcctggattttctggtggtccatcggcacacggagcttgagatgacatggccaaggcaggcaatggtggtgaggccgattttgcacttggagcgtgcgaggtgggaatgacgatcctgcagggtttggaccatgtcgagttgtagattaggatgtcataaaaaaccaacatgaaccgtcgaaggaacagaaggagtatgttgttcatgagcgtctggatggtggcagaggcattggtgcggctgaacgccatgaccaagaactcgaagagacccagatgcatgcaaaacatcattttgtggacattgtcggggtgcacgaccacctggtggtagccgaagcgcatgcatgttgagcttggtgaagaattttgtgctgcgcagttcatcgaaaagttcttgcgccatcgggatcaggaacttgtccttgatcatcttgtcgttcggcatgtggtagtcgacgcgaaatcaccatgaactatcacacttcttgatcatcatggccagcaaagagaactccgacgcacttggacggatcacaccttggaggagcatctcgttgcattgacgctccaaatcgtccttttggatgtgggtgtactggtacgggtgcacgacgacggcgaactccatgtgctctaggcggatgctgtggcacatgtgttgttctgatgttaggccttgtggttaggcaaagatgttgatgaagtcattgagtagtttgtt

SEQ ID NO: 23971 - DNA, 1927 bp, Oryza sativa
tgccgatgtgggcagaggacgatgtgtcggctggcgcgatcgccataggcacagccacaggcgccgcagggagtgcaagcgtggtggccggcccgcccgtgtgggaatgggataagtgtggacgcattgttcgtaggcccaggctagcatgatggcgtaatccagggagcgaaaccgacagagcgcgacatctatcttgagcgggttcacaaggcctgccatgaaaagttgaacgtgttgattctccgagagcgtagcgtcgcggtacaccagcgcaaggaagctattgatgtaatcctccaccatgccaatgcgctacaacgccatgagttcgctaaggggggcatctatcattgctgggccaaaacgggtgtgcaccaattggacaaatcgccgccaggatggggcgccggagttgagctcaagcctgtaataccacaactaggcatccccgattagatacaacaacacgtatcaaaccttgcgattctctagtgtttgttggccgcggaagaacctgtcgcagcggttgagccacgggagcgaatgacccttgccgtcgtacgtcgggaattccaatttggtgtggggcaggaagttgttgtcgatagcggtgtcaccatcagcaccggtgggatgtgccaggaaggtataactgtggaagtgcgtgtcattgtccccgggcggtgggcagccatcttgcaccatgtgcgacgccgagccagaggaggcgttcgtttggggaagtggcacgcgttgggaggcctctatgtgctcgatggcgaggttgagggcacacacttgctccgaatactctaactcattatctctgtgctaccccttctgttattgccgatctaaaaatcgacaaacatactcctcctggacctcctcgatgcattctggctcatagactcatcatgctggagataaagacggtaatgttcaatcaccaacatgatagctaagctcttattttcataagtaaacacaaaccctgatgtcgtggacccagtgcacgactcagaaaggcgataagatggtcgttttgcatcagcacagccgcaatatctttatgggatgcatctgtctcaaccacaaacaactgagaaagataaggcttagggcatagctattacaggagctggaatgagttcctgttttagggcttgaaaggcctctgccactactaaaataaaatgctttttaaacaaaattattttacccctttttagatgatgaaaagattataaatattttttttgcgggaaaaaagattataaataattaaagtctataaggatgaattaagtacgatatactatgttagaaaattatagaaacaatactgataaaaaataattgtggacaaatacttttgaagtgtggtaggtgttgtctcgttaatacaccatatttataaatgtcaaaaactcatcctacaatatgatacccaaaagacccgcataaatgtatcgacgagactacgggtcgggtgcctcataaaattgaaaaagttgagcgcccttctccgtgctgcaatatctatttggtgtagccgtctctgcatgcttgcatgctgcactccttgttctctcctctcactctctctctctcctgtcttctctctcatgcgtaggtttgacgcacatccatgcaatctcttttatcaatttttaaatgatatttctcctaaattattgatctaatttacaatccgattataccattatatttattgtaattaaatccttataacaatatcccgcatgatcatattatgagtaaaaatgattatatttttaagtaaaatacttttatatactatataaaacatcgaggtgcgatggttgaaacattacgtaatatttactgaaacattcatataatacaatgtgcaacattttcaaatgaatcaataaaacat

SEQ ID NO: 23972 - DNA, 1733 bp, Oryza sativa
gctaggtgtgatacttctagagcaaatggttgggcgcaacaagcagaggttataatgtaaaaagggggttatttctgatattagaagagccggtgcttgattttaaatttttgtgcgaaattggcaaagttggggaccagaggcggtctgaccggcgttgcacggccggtctgaccggtgaccaggggcggtctgaccggccgcatgccgccggtctgaccggcgtccctgagaggtctgatcggccctgtgtggccggtctgaccggttctaggcagggtgctggagggcacgtttcaagtaattttgaggccgaattaattgtgaattcggacgtttgtgcccaagatacagaagaggattggagaattcctttgattcaatatttgaaagatcccacacataaggttgatcgaaagattcgacggcaagcattcaaatatacattgcttgatggagatttatatcgccgaaacatagatggtgtcttgttgaagtgcttagatgaagatcaatctaaagtggctaagggagaagtacatgaaggaatttgtggaactcgtcaatcggaccacaagatgaattggttgcttagaagagcggggttttattggccgaggatgattgatgattgcttcaaatattatagaggatgcgaggcttgtcaacggttcggcaatgttcaattggcgcccgccgccgtattgaaccatataatcaaaccatggccgttccgaggatgggctttggatttcattggtcaaatttatccttcgtcatcaaaagggcataggttcgtgctagtcgctacggattacttcaccaagtgggccgaagccgtgtctttgaagaatatgactcatacggaggtaattgactttattttgaagcatattattcatagattcggtattccgcaaacattaactacggaccaaggtgcttcttttatgtctaaggaagtgaagagttttaccgaatcttatgatattaaattgttgagttcttcttcttactacgctcaggctaatggacaagccgagtcgagtaataagacattgttaaagctagtaaaaaagaagattgaggaacacctgaagaggtggcatgaggtgctttccgaagcgtagtgggcgcataggatatctaaacatggtgccactaaagtcactccttttgagttggtttatggttaagaagccgttttaccggtagaggtgaatcttggttctcttcgttatatcaagcaagatgatttgtcaagtgaagattacaagacattgatgggagacaaccttgatgaagttatcgacaagcgcttgaaggcgttggaagagatagagaaagagaagaagagggtggccaaggcgtacaacaagagggtgaaagcaaaattgtttcaagttggagacttggtttggaagacaattttgcctttgggtactcgatccaaggagttcggtaagtggtctcctagttggaaaggtccttattgagttagtggcattgttcgaggaaacgcatactttttggagacactacaaggggagcgttttcaacgagcaatcaatggaaaatacttgaagaaatacttcccgagtatttggcaagacgcttaggaggtactatggccggtaattggattatcgtcctaagaccaaaaacatgttctatgcttttagattcacgttgttcatcaaaaaggcaggggggcatgtgtttacacccaaatt

SEQ ID NO: 23973 - DNA, 11965 bp, Oryza sativa
aacgccaatgggtaaggcttaaggcaaagagccaacaaaaaccgcagaagagaagactgcattaagatcacaaacttcgtattgaaactaagcagcagaggaggtgcaaatcgacagggagctgcggcaatgccgcgacgatgcaaccttcggtctcctttggcgtgcagactgcttgacaaacctgtaatccccttcagtcgcctccacagaaactgcacaaattggagatttgatgttgagccgtagattttggtgtaggcttcaccgggctcaaccagaattcaccatggagttcgccgttgaatctgaggagcttgagctcaacccgaacaacaaaccctgcatggaagctgctacaaaaagaaactacgagaatgaaggaacccaaatctagccactcaaaggaagttaaaagttcaactaatggcgaaagaactattgtcttcttgggtcaacgggcaaggttggggaagaggagacctgcaaaagagggcttgaggaatatggcttgggagggctatcaaccactgaatcttgaggagatgggtggtggaggttgagctttgggtgtatcagaggtggggtcaacaatgacatcgtcacagcagagggcgacccgagccacaatggcatcgtcacagggggcggcgagctgcaagaacgccgccgccgtcccaatctacccgaaccacaagcggatcaaacctcctccacacgggcctcctctagcttggcctccttctcattctccacgctagtctttgaggtatgcaagagattgaatatccggcagctgtaacgccccgattttcgttcgggattaaaatcatttaataatgcattttctagaatttaaataaaaattaaatcaatttaatcaagtgaattattgaggaaattaaaatttcctttaaaaatcattggctgggaatattttgtaatattctttgtgccctaatatactctctgaaattttccgcgaattttcgcagctcaagaagtaattttaatagcacaaagttcatttaatcaattaaaatataaaaaaaaccaaataaatctctccttcctcccttgggcaattttcagctcaagccctccttctctctcccgcggcccgcgtgcttccttctctcgggtcggcccagctcgctccaccctccaaatctattccccccctctcaaaccggcctctgctcttctcaggacgacaggtgggacccgtgggccccacctgtcatccccaatccccagccatcccaagcccaaccacgccatgccgccataccgcccacgacgccgccgttttcacgacctctcgcttgcgcgctcgcatccaaaccgagagcaaccgcaacccctccacctcctccacactctccccacatttcccccaaaaatcgcaccgggcgagctccatttcacccacaatttcgcccacgtcgccggccgttgccgccccaaaaccgccactcctcgacctccctgttgctccctcgcgccataaagagcctccccgtgctctcctctcgcatttcccgtcttccccgcgccctctcccgctctcccctcgccaagccgagccgccgccgcccgccggagctccccagcatcgcgtcgtcgccgcttccgccgcctctgcgttgcgccaaagtcacctctggcttcaccactccacgccgcacaccggctgccccaccgcctccctacaccatcctcgcagcaccgtttccaccgtgcacccaaggccgccgccgcgttcgttgcctctagccgcgcgactccgcctctccggttgaccccactccgcgccgccgccacctatagcgtcgcagcgcctcaccacagctcagcgtccccctcactcgagctcccatcgccagtgcctcttatgtatgtatttacgctttatttatgtttggatctgtttatcacttgttgtattgtgtaccctggttggttctggacagggatttaatacatataatagtcttgaaatatgggttaaatttctgggcgtgacagcagcgtcagcaggactgctcctcctgccactcctcttcagacttcggatctaacttgtcaacctcgtcctcaaggttcaggccgacgctgacgtcagccgaaacctggccccaaccagcaccgtcaccatcaccaactccggcaaccatgggacctagccggcaaaaacttaacatgggaaaaaccctacttgcaggaagaacctgacaacaaggaactaatctaacaacactatactagtaggtaaaggtggatggacccctcctccaagcttcgccggtggcgaactgccggaatcgaaggtggaagaggggacagaggggaggattttggagatttactgtagcaaggggaaaggggaaaggggagaagatcaaccgttgttcctctcctccaatcctctctctcttcccagaggacacgggacacgaaattgtgtgggcctagagcagtagttttgacgaggaacaagtagcatattttggctttccgtgtttggtgaatcaaccaaatgtgctgaggtggaggggaatctacgagttggccggttgaggctgaatgatacctcagtgcactgtgaatggcctaacagcaaagagagaacatatgcaacatgaaagagagaagcacgctagctagcgcacgctgcacgtgttgttacagagaaaaagagactagagagtagagtaggagagcgttcgagtttttttcaacttgcattggatcagttgaaccgatctgaagtattctcctaagtgcacaggttacttggcaagtttttttttttaaaaaaaaaggcaattacatgataaagtgacaatatgagaatgtgcactcagcactcgatcagcagctcttgtaagaaccaagcatgcgtgcgtgcttgcttacgagatattgtcgaagtgctggtcatgcatggctcattgtattgtgtcccaactcagtcgatcgtgacaagcataacactcaccctgctaccctggaatcagcagtggtgcctcatcacagtcatagcgattgcccgccgccggcgcactggaggcgtcttcctctgtcgttgatgccaaagtagtgttgacgacgatcaagctgttaaggtcaggcaacggtccgtcacgctccaggacatccatagcttgccgcatagaaggtcggtgttgagtctgcaaagcagagcaccagagccccaatacgatgacacgctctatctccctcatatcaaggccaccacccatggttaaccttgtatccgccgcctcgacaacattgccaccgcttcggtataggtcccagatttgctccctgtgcctccttgcacaggcgatctcgagaagggcaatgccgaagctgtacacgtctgagctacgcttgaatgggaccttaccatgtttcagacactgtggatcaaggtacccttccgagcctatggcagttgtcagcaacgtcgcattgtcttggtttgccatcctcgataggccaaagtcggcgagcttggcgttgaaattttcatccaggagtacattgcatggtttgatgtctctatgcaggatatgtgggtcgcactcgtgatgtaggtagagcaggcccgatccaatgtccttggctattttgtacctgtttgatcatagttagatagctacatagattggccataaacattcttagttagttaatttaatgccaacagaaaccatactttcgaagcaacatattgtagttgattttaatgttgtatttgtcgattttttaagacaagccatggtaggattgtaatttatgatttgttaataaatttgttgagtggaagctgcattatttaactttgacaaatcggtgtgtatcctatttggaaaaaaaaagaaaaagatatgattacctaaaaagttttgcatatgatttacctagacattgtaatgttagcaaaaacacacaagataattgataaacgaacaaactgagtacaactccatacatattaatttagaactttaaaaattattatattatgaggcatacttaaatatgagtggttcctaaaatcttgcatgcattaagaagtgttcctctttaataaagaagagggcacgaaaagaaaaaagtcattagcacgtgattaattaaattttaatttctataaaattgaaaaatatatttatcttacattttaaaacaatttctatacatatataatattttcacacgaaacacgtttagtaatatgacaaacgtgctaacagaatgtaaggtgcagtatgtatttgaggaaaagaacaccaatcttaggtggctggtaataagatataagggacctaagtgaacttattcctatacttattacactagaaaaacggtttttacgaacacctctaattgattgcaggtaggctaatagaacttttgtttgtaataagatttggatggtgtctagtaacaattcatcagtgaaaatgaacctatttttcacatacaggtctctagtcaggtctagtaagagatccgtaggtgaaaaccatttcagagcacacgtcctttgccatttttttcttttttaggtcctcctcactcactccctttctccctcggcttctcgtcctactccctccacctccgcctcctctctcagcccctctcctctcctccatctatccctcctaatggccaaagcgaggcgagtagtaggcggatgcagggcaacgccaagattgaagcaccggtgggtgcagggcgtgccgtgataggagaactgggtcggcgtggggtgtgccgcgacgggagcaactggccggcgagggtcaacagcttgtcaagcggatccgtcacctccggccctgtcagggtagatccatcgctgacagcgaagggttggggtggcaagggcggagggcaaccacgaggatgatggagggctcaggggcggtggggtggtgcagtccaccgcagccagatccgacgccgacagcatagaggtgggggcgatggggcgtagggcgaccaggatgacggcggagggttgtgggatggaggggcggtccttcaaagctagatccaccactgccgatggagcggcgggaatgatagggtgccccaaagatcccatgcaggcggcctcgcgatggctggatcccatggctccagcacttggactggttgatccgcgtggcaccaatgatggcatctttggggcagtgttgtatttttcttattactagagatgggatatagggtttgttggaaatgggagctagggtttgtgcattatttttttttttgaaatttattttgccaatttaagttttgcagacgggcagcataatgtactcgcgtgcgaaaatccctttttcgcacacggttgtgtaaaaaagaaaaccttttctgctaacacaagcagttgctttgcccacgtgaaaaaatgtgttcggcacgcgtggaaaaattgtttctctagtagtgttaatttcaaatgtgaaaaataatagtttaaaaagggaacttaaagcaaagacgatttgaaaagatgaaaacaacagaatatatgttaggatgaatatagtatattttctaaaatgcgccgatgtcaccttgtttgccaagaaagtacttctgatgactcgcttttgtacaagtagtcgttgaggttgccgttcgtcatcaattcatagacaaggaagagctcattgttcttcttactccagaaacagctgcacatgaaacggagaatgttccagctgtgtccccgggagcaccaaccaaaaaacttgacgagattcttgtgcttggcttcgctgatagtgcggacttcggcgaagaagtccttgtgtccttcgctggactccctcacaattttcttcacagcaacttgatggtccagcagcttcaggtgtccgctgtacactgccccaaaggcgccctgcccaagcttgcgatcctccgagaaatggtcggtcgcagctgccaaattgcggtattcgaacctcctggcgccgcctgttcccttgtcgaagacatttcgaatccttttctgctcccaacaagagagtaagaaccacaaaactagcgcaaacactagagctcctccaatgatcagttcaaccagcaaccgtgctatattgtgtgtatctgcacatgcaaatcaatagcagtatataaatttcaatcaagctaaacatattggtaagtccaaaatttcagtgctatgtttatgtgcaatttcagttttcatttgatctgcaattctgttattgtctatggttttattttgttttattataagcttgattacaactacatcatcatctaattgtttatcaattgtaaatttatttcatgcttaagttagaataatttatgctcaactttaacctaagaagaatagagtttgtttatgaagagaatgtaggatatgattagagttatttgattttgatccaatggatgagaaaaaactagtgcaattttcaaaattttcattgaacaaaaatgtggataagaaataaacattaattcaaaaataggaaataaaggggaagcagaaaaagagtaagagataagaaaatgcacattgaaaaaaaaggagaaaaaaattctagctatatagcacaaggatcccatctaaatcaactaaaaccaccaataacttagagtaccaattaattgtttccccaaaaagaactaggacttctcatcaataccacaaaactgtgtattttttctctgaattcctcatttgcccttacctcatgttcctatttgtctttcttatcccagaatggagaaagtattttggtcctcgagtgaatattctgtcgcgggatcaaaaaccgttccaacatcattataaaaaattccaaaacaatttggcaacattcattcatggtcattttaagcctaaactcaattcactcattgagattaaaaaaaaggacaattccattttatctacagtactgcgcgcgcctctctatgataggccgatgcacccccatatacaaccaccatctcactgttgatctgggcgactccgtggttgggcgtgcgtggagctcacggtcggcatgctgcttaatagtggtcacacgcacgacaatagcggcatgctggtacaagcaggatttgaaattttgaaatcagcttttctgccgaggggaggggagagggggggggggcaaaagaaccgaaatttcgaaaatttcggatttttttcgtccaaaattttttgaaattttgactggttttaaatgaatttgaataagatttgataaaattcacaaaaaaatgcaaaaaaccgaaagtttcgggcgagatgtgagcattttttggggggggggggggtgccgaaattaccgaaatttcggaaattacagaaatttcaaaccctgtgtacaagtccagtagctatccgaggcctcatggccgggcaaccatgcagtggcgctgggctcggttgacatctcttcatgcagaaattataagctgcttaatagtcgccatagaagtctccatggatctagcatggatgtaatctggtggagaataggcttagttgctttttctattttgtaagtccttccaagaaatttagccatcttaaaggagcctcattgcaaaactgcctgtacttgtacttgatatgtatctaattatttacgatcaataaaatgtagttctaaaagaagacctggtggaaacctggactagaacgaaaaaacaaaaaacaatcgatttgttgtcaagtcaaaaaaaaaaggggctgaatttagaattttcgtaatattagtcaggatttcgtcggtttatcagcggtttccgtgaaattcgttcgtgagtggtttttgattcaatatcggaattatgaaccctgagcacgatgaagaaccaaacgaggatgcttgcggctagtccaagattaatgtcatcatgtcatattttttgtgttcttggattgaggtgaaatatctgttacccatggaattctctcgacaagaaattgagcctatatattactacctccatattttaatgtatgacgccgttggttttttatccaacgtttgatcattcgtcttattcaaaaaatttatgtaattatcatttattttattataacttgattcgtcgtcaaatgttctttaagcatgacataaatattttcatatttgcacaaaaattttgaataaaacgaatggtcaaacgttggtcgaaaagtcaacggcgtcatacattaaaatacggagggagaattatcacgtaccttggtgtattagcggaaggcttgaattgaaagaccaggacagtatctggcagatctccacgcatccggcggtggctgcagaaaaccccacagcaacctgcgggccgggcggaggtgtgcccttgagatgttctgtcaggtttgcactcaccacctgagcgtgggccgcggatgatggatggtcaagaaaccgaaggtaggcgaccagcatccctgtgctgctgttgaagacgatgtcggctatcattgtcccattaagggttacgttctttggcaagtatgtggtaatggcagaatccttgacagagttgatgtcgatggcgatgtggtcggtcttttccttcgggtcattgtcaaatccgatgccgatgtcgaactcgacggcgatgaaccgatcatccggggcgatattgctagtggtcgtcttatcagtgatgagtccgaggttgcccccggccgacctgtacggcactttagaagggaaactggcgaggaagaaagccatgccatcacctctgcatgtaccgttgccttcgatgggcctgatggcgaaggtgaagctcgtggagaagctggccaccttgctaatgcggccgttggctgctaattggtaaagctgcaccggatgagcatacgacatccggccaccgcgcctgcaaacctggtcgttccaggtgcaggtgagttctaccggcgccccagctttctgcggctcgatcgcgtcgtcctggaatacgagatcttggcggtacgtggatgggtggtcggctgagaagttgaagctgaacacaggtggcgctgctgctgctccagcgatgaggtgatcagaagcatcaagcagcatggagagtaagaagaggaggaggccgaggtagccagggcggaggagctgcgacattgctacagctagcaacaagagtacgaattcggcattaatgtgattgatggtctaattagctatggcggcttggccgagggtacgtacttttataaccatagacagatggaatcccacctactctcctgtcctaaaattagttaacttggtacaaaacgtgatacactctattattatggatctgaacaggtctagtagtattagaattaacgttatatcatatactccatccgtctcaaaaaatgagcatttttataactagaaagatagcccgcgcacatgcatgggcttttaatataatgttgtttgaatttttgttaagaatatttgcacgcgggtgatttttttttcttgaaatattctttgattctattctaaacctgtttgacgtagaacttgcgcccatctaggatttatgcatctgtggcatgcactctgcatttctactatattattagcacaaaggtttaatgcatgccatagtggatgccagcgtgatcaaaccttttcaatcatccgccttattctaagttacaaggatatactagctaggtacgcactgcatgcatgtgctttaatttgtagccatgtaatagaaataaactatgggaattaattaaaggtaacgcactctcatctataattgttttgtacaactatatctgagcaccacatgagcatcactaccattccagggaatgggatagatccccagttgcttctgctacatctggatttactaaaagtgctatagctcttccacatgctccaaatgaatgtaggtagttactccttccggttcaggttataagatagtttgactttggtcaaaatcaaactgtttcaagttgattaagtttatatataaatatagtaatattcataatactaaattagtttcatcaaatcaataattgaatatattttcataataaatttgtcttggccaaacttaaagtagtttgactttgaccaaaatcaaaacgtcctataacctaaaacggagggagtaatttccattgaaagatgccatcttcataagatggcctaatagcagagaaaacacaagtataagaaaatattgttattgatttcatatacattgttttattaattatctcgtagtattttaagttatgtcatcttaattgaccccaggctgtattcagtattaaaaaaaaattgaaaacattacaagggggtcaagaaatagaactgaactttccacatacacaaaaaaagaagaaatctgaacatattttactccctccattccaaaatatgaggcacaaccacccttaacccaaagacaaaaaaataattattatcatcttgtagtttggatcatcctactaaatataatgcatgcgtccaatagaattaaataacatgagagtggaggattttaaaaaagtaataatttaatggagaaaatgtcatagttaattgcatgcttgcatgcatgccttatactatggaacatttagaaaaagtggttgtggcttatattatggaatgaggaagtataattttgtagaaatctgaaatagggagccgttataaattaggttaattagatctatgccattaaattttttttggttttgaaatataccactactatttgcgtatttgtaacgatgccactgctgcttttttttaatttgagtggtgccactaagatacgtattttacatgtattgaacaaaaataccctcatcttctacctctcttctctatcttgtccctctctctcttcccgttgcttcttgctccgccgctcgctgctgctaccgccgccacttgccaccaagccgctcgctccgccgcttgccaccgagccgctcgcttcgccgctgctgcctgctgccgctcgccgccgccgccgctgccgctgtgccgcttctgccgccgcccgctgccgcgctgctgctccacagttgccatcgaacaggaagaagggagaagaaggggagaaagaagaagatgggcaattacgttttttttatccattgcaattacgttgtttttttaagccaacattcacctcccgtgcgttgaatgaaaaaaataaacacgggaacactcattctatttcgcgccaacggtaaaatgggatgcgccaaattgagctggacgtgcctcaaagatatccgttcgtgccaatgagaaaaataatattcgtggcaacagagttcgacgcgcacagacagaacgtaggtggatttcggtgtaaccgtgagtcctctctaagacacggtatgcgcttgatgattcccgagtttattgctctacgcacggtaaattacagtgtgacacccggtattcgcatgcacacgggagccttcccttcaccattagtgttggttgcaagccgcatggcatttccaagggctcgctttacataattttgcttaaagaccggctttacgctccccttctaagccaggatttcgtctagtctaccaggatagccattggcatcgcccgcatggttcgacaatgtcttgtaagttcgcctgtaatatacttgtgaaggtcgatgccaggaaccatcgttgggtgtttcaccatgaggaacaggaggtagttgtgttggatcgtaatgggctagccaaccttgcgtgaaacgatggtgccgccggggaggagatagtcatggaattgccaatgcggagagctccttcttcggagaagaagcctatgcggctaggtggccacaccactccctgactcctctttgccagaagccttcatggcagctgttgagagaggtgctcatgcacctc

SEQ ID NO: 23974 - DNA, 6824 bp, Oryza sativa
cttcccctccccctcccctccggcggcgccgccccctctccccctccccccagccggcggcttcccccgccaccggcgccgcttcccttcccatctccctcctttctcgccggctcggcgcggcaacggcggggttcggcggagacggcgccgtcccaacggcggcgacgacggcgtccgcggcggccgcgctccctctcccccctccttcccgtctcgtcggcttggcgcagcgacggcggggtgcggcggagacggcggcgacggccgtccctccccccctctctctccccgtcggcctcgacggcgacggcgccctcccaacggctgcgatggcgtcggcttcatccgcgtgcggattcggcagcggcggctccctccggcggcagtggtggcgtcggcggccgccctttttttttttttgcaattttttccatggctattgctaaccgaataggattgtgcatggacaaaagatggacgaaaattagatgtcatatagattttttttctagatcggacttctttttttttcgcacttttttacgtccggttattttggatcggaaaaacctggtttttttcgcccggtttttttttttcaccttttttgttggatcggactttttttcgtccggtttttttgatcggacaaacttggttttttctacccggttttttttcacccggtttttttgacggacgatggaagcacctcttattttttaagtagtagtagagtagatatagatatatatatatatatatatatatatatatatatatatatatatatatataactactatatggcgctataggcgccacgtattagatggcaccacacacacaaccaaccaccctgtcccacccccacgcgcactcaatttaaacagaccatgtagttaatttttaactcagtgacccaccaccccacccatccccacgccagttattttttaactgttagcgagatagccaatgtgtgtcttgtgatccaacggtgtttgcacaatgagttattttttaactcaacgtacagactttatatagtatatatattacggatttccatcgtagaaaccgtccacccactttttcctctccgtctccacattttatggatcgttgatggcttggcgacgaggaggagcggcggtggcggcggttcggggacaagcagaaccggcgtcgtggaggagcggcggtggcacgtcaggcctgatggcgtcgcatccatggcgggcgcggcatctgcgggcggggggtggatccggcacggcacggctgcgacaaatattcaagaacagcacataccattttgcttcagctatggaatgaaacaaaaatgagaaggaagtcagagataagtgcaagattgaactagctagttctgaatatttgttctgcttcaagcacaacatctccatgtgttctgaacttaaatactgagattcctgaagaacagattctggaagacgagtgcattccatctgaatacgcggtttgcagacgtcggctcggtgacgacacatgagtcagaagcaaatcaggattcgataacgttcatgctttccttgacttgacctataaagtaacgtccttattactcccgtcaatgaatatgtatatcgtcgtattaagaagatagtgcgctgcatcatgcacctaaccggcctgatgttctttttcaatacgggtgaatccgaagagaatgatgactctctgaatagtggatgaattattagatcggagggattgtggttagggaatcttttaaaacatagacactattttacaggatttttatagaaattaggaagcaatcactacttaaaaaaagcatttttgccaacgttgggtctctttttccgcagacgggtatgaccctcggagccaaatatctgttagaaatttaatcataattcggcatattttaatccaaaataacaagataataagcatgttatttacaatgagcatgcttaacatagcatgtaatcaacatgagcatgcttaacatagcataaccatcaacaatcacataataacgcaatgttgacattgcgatgaatattaacggtacaacttctaattgaaataatgtaagatggttataccccaaaaaaggtcctccgctggagtttaaggcagtattgcctctgttggtgttgacaggagcatccttctccttgtctccagcgttgtcgttgtctttagtgttcgatatgttagtgaagacaaagtagacgttgacgaacagtcagtagtcgcaccttgcgctccccaaaaacctgatcgcccacccgtccatgcaaacgtcgtagcagtgcgtggtttcggaggcctattctctcaaagcgtgtgcacacactcgtcgggatgggattaccgtagcagcaaaagccttggaaatggatgaaagtgtgtctcacttctccttaggaagataaaatccattctcattttataggaggaatggaagatgaagagtaagagtcatggaataggaagagaaatagagtaactaattctcatcaattacccatcaaccatcctctattacacaaccatcaaccaaccatcaattaggagtaattgatgtaggttaccaacggaataggaagagcaatagaccaactaattgtcatcaactagcaactagccatgaaccattcttcactccacaagtatcaaccatccatcaatcaggagtaattgatataagttaccaattcaccaatcaaatggattaattatcaaaactcttcatcccattgatatcccattaagagaatgaatacacatgaattcctagcataatgagccttggaattaatgatttaaatgaatcaattactcaattaaatctaacaatattcacttatgaaaatgtaaaccgaggtggattttcatcattcgattgcgaaaataaatttttccaagcgaaccgcttaagaggtccgcctgcgaaaatacctttatttctatgatttttgcaggcggaaacttatgtgctccgcctaaaaaaaatcatgcctacatgaaaaaaaaaactaagtcctatcttatcttctcatcttccatcttatcctctccccaccactcattccatcaactctctctctctctcgcggttccctccggctccctcccctccgcttccttccttccggtggaggcgcaagcgaagggcgtcaccattgccggatccaccgcccccatgccaccccactgctgccgacgccaccctcctctctaggcgcaccactgtcgatgcccatccactccatcggatctaggagggaagcaagaggagagggaggggagaggtcgtgctgcctcgtccgcgctctgccggcggtccccctccggccatgcagggagggcaggaaggggaggggaggggagatagaaggagagggaggggagtggccgcgcacgctgccgtcgagagggaggcagccatcaggtttataccatgttcgctaacggtatgtaaataggttcacctaatttgtcattgtttatagaatcaactgattaaaaagatagatcaggttagcttcgaacgtgagctataagcctgttgagctaatgaaatgtaaagcacatgcatagacgctgattaaatgtaaagcacatgcataaactacactaccactaagttcagatcttgtcccgtgttgttctttcagttgtagcttccaagctgtgcatatctcaggcctagtgtccgtcagtgatcaactgcaaggcgctgcatactagccagcagattccaagagcgttcggtacgccctgtctatttcacgtactatctggttttgtgtagtttttttcattgatattaattcttgctcaactaacacacatgtgttagcatcagacgatgcctggatggatggttcgcacggtgttcttgctcaattcgtgggtaatccggacgttggtagtattcagcttcgcagcgcatgtcaccatcgtcttcttggcaggagtccgccgtcataaggctatcggcttgccgatagccatcctgtgggcggcgaaccagctgggccggtcggccgcgacgtacgcgctcagcaagctcgccctcggcagcacgccgcaggagctgcagctggtgacgctctggggggcgttcctgctgctccatgccgctggtccggacaacatcaccgcctactccttggaggacaatgttctgtcgacgcgccagaaggtagaaatgatcttgcaggtatcaggagcagcatttgccatgtacaagaatatagtcatcagaagcgggtccggtacgatggtctgggtctcctctttcatgttcatcatgggcatttttaagtattgggagagggcgaaagctatgcagctcgccaacctagaaaacttgcgaagctcaatcaagaagaagaaggagacaaggagacgacgaagcttgagaaatattaggcgtccaagcagttcaaagcatgataatgacaaggaggcactgctggttgctcatggcctgctcgacatcaccaaaggcaccttcgtcgattcttcagtcaacgagttggtatcagagcgagttctcacccccttcctgatgagctctcttctgctcattactagtgacattgccagaacgattcttctgcgcagtagtaatttggagctcaacctccatccctcgagcctcctcaactgcattgaggtatatagtaggcgggtttcttcccatcacttctctataccgagcattgagccctcgaaagaacttcctagccttctcacgctcatcacttgccacgctaggcacaaagcgtacaatactgctgaactcccgttcatactcatcaacagtcttgctcccctgttggatattgtttaactcatcactcatcttgtccctaaatgaatctggataatacttagctctgaactgctgaagaaaaacttcccaaaaaatagcaccacgatcagggttccacgcttcaacaactccatcccaccaaatgtccgcctgaccagtcaactgaaaaggcatgaaagtaaccttctcctcaggagtcattcttgatcccctcatatacttctccatcttgcgtaaccagtctgcagcattaacgggagtaccagacccatcaaatgtgtctaagcgcatggatgtccatctagtgagtgtcatcccccgaacagctcgaggagcatcatcagagacagcagctgagtggctaccaccctcctcctcttccatgtgctcatcctccatctggttcgaggatgctgcctcattatggcgacctctaccacgacctcttccacggcctccagcacggcccctaccacgacctccacgattcggaataggggattcagcaaccgagttgttcccaacctcttcattatcctgagtattttcaacttcttcattatggtggcccctaccacgacctctacctccgcttctcccgcggcctctgttagccaaccaaacactcactctaggcggcatagctatatcaaacacaagcatttagacgtcattagtttaacaataggttagacaatggcatgcaaggaaacacaatcatacacatatatatgcagcagaaacataaatgctaggaatgaaccatgctcccattcctattgtgcaccagtgtgtcaagttcttttagatgtttatatataacccaagttctactcttattatttcctaccctaagagaaagtattttttttaattggttaggaactctagttcaaaattttatgttgatttatatatctcattacccagtcaattcccatggacctaccgcccgctctgataccaactgtaacaccccaggtaaccacgtacatagaatgccacaccaaaatacactcaaaaactaagtcctaaaattattagaaatttcggcagagtctcccctaaaaatacggacatcacgacaggcagttataagaaaggtcaataccgatataaaccacacaatccaaaccatcctagtgtagacccccgattttggaaatcggaaatcttctgtgtttatccgtaccaatccctggatcagtagttggtacacacatacatagttggatcacaacatatcacgaatgaatttagactaaaagagttaaatacttacattagggccaggtaggccaacaactatcagagaacaacagcggaagacaaaataatataagggcccggttaacatgccacaggcagtcgactggggaacgagacctagaacaagaccgcactccgatcatcttgtgggatacgcaagcgtaccgacaagggcttctcttcaacactctcctaaaagatatataaatagcaagggtgagtaccaaccgtactcagcaagccaccacaacaacaatgcatatgatagagggtatttcaaggaatggcttcaggttcttttggataaagctaattttacaattcttttcacaagcctaaaacctagcatagactgatcaaattttagtaccagtgttcactttaaacaacgacggttctgtccaccatccattgtgatcccaaggatagcttcccgccattgaatcgtcatggttttctgaggatgtccaccttccctcctctcgggaagtggctccatcagcataaaattcatcatgcaatatcccattccccacaagttaagaatttagagtctagccaagtgtaatacatgtcccggtgctcaataaccgcgagcacggctattcgaatagatttggtttactcacactgcagtggatgtacactttacccgcactccgcgactgcccaacacatgagcctcgtccca

SEQ ID NO: 23975 - DNA, 3668 bp, Oryza sativa
ctgcttccagtcgatgccggggagctccttggtagaggtggcgtgcggattttcggtgtcctgttcgctggtcgtcggccgcgctgttagtttgctgcagctgggttcctgggtgtgaggtggtctctggtcgagctgcagggtgattggctgttgaggcggagtcggagctgcttgtcttgcaagctcggcaacgatgaccctcaatgaacgtcccggcaacgcggcgagggtttggaagtggagcattttgagagagcctcgggtgaaaaccttgcctagtgctatcctaggttgatgatatcgacgcttgcgggcgccgtttcctccttggaggtattgtcatgctggctctctcttccttcaggtgaaaaccgggttcctttcggaatgggcgttaacagcatccttgatgttgctcccttgttgaaggcttcgctcagaaggtttatgctcaactagaggatgtttggtggttctggagacctcgtttgcattatgttgttgaagctgcttgccttttggtaagcttggtaacgacgacttttgtgaggtctctttagttgtttcttttccttttctgtataggtttttgctggttttctgtttaattaaccgtgcttgtttggtcttcgggcccggtttctcttattaactgggccaatcctcttcttctataaattccagcaggagaaactcctgtcgtcggttccttaaaaaataatatgtagcatattgatcaagataatttcacttcaatttgccactacacctaaaacaaaattacaaatgggacgcacaaaactacatttttttgaaaaaaaaataaaagtgacaaaaacaaaatacaaaactacaaaatacaaaatatgaactacttcattaatatgtagcaaaatttggccatcactgcactggcaagcaaataactatagtagctttttgcagaaacaagaaagaggaacaccttgagccttggcacgacggtgcgcccctgctatcgaagagctcctacagcgtgactgcgacgtctcgctgccctccaaaaacgtcgcaccgtgctcgtcgaggtcccttgtcatccaaccatacagctccacccgccgcgacgacacggagccacctaaaacaaacaaacatgaccaaataaaaaacttcagcgtttgttgtaattttttaaaataaaatttaaaaaattgacaaaattaaaaaacaataataatttcacattaatttgccagtacacctaaaacaaaattacaaaatggacgcaaaaaaccactagttttgaaaaaaaaaattaaaaactgacaaaaacacacacaaatatgacaaaaacaaaaggaacaaactaaattacaaaaaatataaaaactaacaaaaaaacaaaatacagattacaaaaattttaaaactgattaatatatagcaaaattttaaaaactaacaaaaacaaatatgaaatacaatgacaaaatacaaaatcatagttgctatcaagaagatagcgcatcgacttgatatgtagtaaaattataaaactgacaaaaacacctaaaaattcgctaacaaaattacaaatgggacacataaaaatatttcttaataaaaattacaaaaactgatagaagaacaaacaccattttgctaatacccagtaaaatttcctgacaaaactagcctctgttgactgagaaaggtgaaaccattttgcaggcaaaacaaaactaatgcccacagctagaattctactcacaaaactaacctctattgactgataaggtggtaccattttgaagacaaaacaatactaagattagatacttgattgcaaaactaacaaaacataacatttatggattattgcaataaagctccagtgaactatttgtaaacaaaatagttaaacatatctgtaaacaaaataatgtccccaatatgctagtgattgcatcaatttttcaaaacagatattatagatttgttcatgtccaccagatttaataaaaaattccactaattttatcatctaaagcgacaaagattaattcccaaaaggataaaatgctgaaataaaagatgtgcatatacatcggtccaaaccatgggattgtaaaaaaaaaagataatttatatcaggtcgaactgtgcctagggagacaaagcagcatggggaaaaggtacgcacaatccctaattaaattccatttgcatatgaaaattgagagcacaggcattcaagaaatagaggatatactataggaaaaaaagtacaaattactccaccgaactatcgtggtccactaaattaccccctaaaccataaaaccggatattcttcacccctaactatataagccggacgaattacccctcgacccaatctgcggtggttttggtttacgtggcgtatgcgtggcagtctagtcatcattctatttataaaaagaatgtgggacccacctgtcatccactattcctctctctcactcttccctctctcactctctgtctcactctttctttctctcttacgcgcacggcgccacggcggcgaggacggcggcacgcacggcagagcacccgcagcacgcggcggtgcgcggcctcggcgcgggcgaaggcgcggctcacgagcctgcacgccttccggtcgcgcggctccctcacccggtcgagcacctggccaagcaaatctagcgacagcgccgatgtatcgaggaggctccgacgacgacgacgacgacgactccaccggctggcaatccttgcacgcggcggcgcacgatccacctcgtcgccgcactggcagatcggtgggagagacctgttgcagatggcgttgtcgcagcaatcttcccacggcctcggggtgcagaaggggcccgggtcggctccccagtagacgtcgctgcagatgagcaggcccgacggcgacgacgcctcctcgacgtcgttgcagcactcccacggcctcttcttcgtcggcatcttgggcgactttgctccgtcgctggggaggtgtatcgatttcattgtaaccactattggatattgcattgcattatagatcaggccgatcaaatgtcactcaaattacggcgccggatgataatcatgagaacaacccggtgctctatcgttggatcgctgcaatggatgggaaaatcgtttgtaccttggagatcggggatagactgggaatgccggaagagaagcaactgctagtcgtcggtggcggaggcggtggagcggaggaaaccgaggaggctgcggagcccccgcgcgcggaggaagaagaagtcggccttggcatcgcgcagccccgtgcgcagcgccagcgtcacctctgacctcccggtacagacgccgccgcgccagcgcctccgcgagctccccgccgccgccgctgcctcccgcagacgaagatccctccgctcccgatttcgcacccgtgctacctccagccgccgccgccgccaccaccatctccttccggctcatccccgctggagacaccgacgacgacgcggaactcggcgtggatggggcggcgcgtcgaggacaagagcgcgcgcggcggagggaggtcgaggccttgagcctgcgaccgcgtgcgtgccgccatcctcgccgccgcctccggcccttgtccgcgtgcgtgcgcg

SEQ ID NO: 23976 - DNA, 23839 bp, Oryza sativa
gcggattgggttgaggggggtaattcgtccggtttacatggttaggggtgaagaatgttcggttttgtggttcaggaggggtaattcgatcgaccacggtagttcgggggggtaattcgtactttttcctatattataaatcacatactgcatctccattctatgcgccaaataggatgtattataaaaccatcgatatagctaaatcacttatatcattgcacggaaccagtagaaaaaacacagatctaataacaaggtgcgataatcacatcaacggttctgtcaaaaaaggattcacaccaacggcagcggtggaggagaccttgcttgcctcgtccctgccattggaaaatgccttgcctacctctgttgctgctgtaatcttgctgcggcggcgaggctccagacgccgccgtcgatggcaccgcggcgacgccgacgataatcgccgtctctcttctctgcgtgagtgggggagaaaaatggggactccaattttgaacagttactgggtgtttggctttggacttggacccgcgcagcatcgcagcatgtcagtccgaggcctatcttggattcagatctaacaaaagaaaaccggttcaagtccggttgcctggcgggcccgaaaccccagcaccaatcttgaagattcctacattcctacgatctcaaattcggctgataaaacacaaaaaatcagcaggccgttatatagcaaattcgtaagtttgtttttttaagtatctctacatatgtacttatccggttgcaggttccatctctaccacgtccgcatccgtacacacaatcatcacgtagtttgtgacgatcgacagctcaccgacgcgtcactagttaacactaaatcatacgtgcacactaattagattttgtgcctccaaataccgggtcgacatatcttcagacggataaaattaccacaagtgtttctactgttgatggaataatacgtcgcctagcagttagaactcgggacttaatctagaccaggtcccagggccctccttaccatcctaggtcttatattcctccttgggaagagtgtagagacctacaaaatttacatcgccgacctatataagaagagtaggaagccctcagagggcataaccacaatcagatcaatagatcaatacaccaggaggatacaatccaccaaaataaaagtaaggtatttcctctaatcaatggggcttgaacctgtctaaacctttgtctctgcgcatgtattcacttttagatctcgtgcatagctctataaattaacattgatagttggcattctaggtaggggttgtgtcaaagtatctcgtcgacaagcgcaatggaatcaacttcaagagtcgctggatatttcttccctcgaggcaagcttttcgcttcagtgacttcgatttctttgccgatgactacgtacagcaagctttctctcgccgactcggatccaaaaggcgagttctatgaaccactaccatcttcaaacccaattctcacatttggttattgttgacagtcgttagcaatcagtttcgaccgtcaatattaccaaaatagaggagaactagtgatgcttgcaatgcatatatctattagaataataatattccactagtattgggtatactaaccttttgcagggaatgacaataaagtgaaggagaatcgacatcaactcaaacgataaatcaatcggacgatgtcgagaaccagacttatgcatgaatgggccaagaacttagaattgacacgataaactgggccaaaattcacaagtctgcgaagagaagcaacagaggaggccggcagccgaaatttggctggatcgggccggccccaggtttggccgaaccagggggttcggctgaaccctccttagcgccacccgatccagggcttcgcctggacggtgtggattagcccccaatgacggttggagggcatttccgaccattccaaccgccacaaccgtcattgggaggctataaaaggagttgccattctcacttcactcacacacctcaagcaatagctctttcatttctctcaagtttagtttagtagtatctagctggtggaatagaaatagaataggagtcaggagtccggaagccttcgggaagagttcgggtaaggctctagcagctttcctttcctcttttgtaagctttgtacttttattagaatactcttctttatacatttatggtattgaaatattttccgagtatatgagtacctactttacattatgttcatgttatactgaatatacggctagcttatctgggagatgctttggtgcgggtataatgtttgcttatgcaattactctatcatgacgatgatattagagtatggtgtctagattacgagataacattatttggggttatatattgcggatgagaggtgggccgctgatggtgacagctcagtacgggtattcctccgtgcctatatataatcctaagttaattcccttggaagggtattcctccgtatttagccccggttgtatggtcgtgatgggctgtcgtaagaaactcggcagtcaggggtggcttctcgaagtaccaggagggcatcggatagagggtattagctagtataccagttaactagaatgtatgtatactatgtataattgtagtataggaatagatttcctttctcttttctttccacttagtttagatgacatattatgaggatgagtagttatgcttgtgtgtcactctacccttggattatcttaacccctgctagaatatgattatcacaagtaatatataaattattagctgagttctctctacatgatcttcccacgggataaaataaatacgatacccttgtaatactctcaggtgaaatgttacaatggtatatccgtgcgcttgcggataatctctgtaatcataatatactagaagtatttctgcgccattgctgggaattatatttctagtaatgtcgttaagaaataccaacaattatgaactcctccctagctttatagccatggtttgggaccaatccttctccagacttgaccatgaaaaatctataccaccatctgcgagagtttgagcaaccgtgctcgtgcatgatgatttcaggcatgacacaagaaactctaaataggaagttgttcccgttctctcatagagcgcaaaacaatggtatattatttccatagttagtacaaatggtaattgggaggagctaagagacaaatttttatcttggttttttccctttgtcccatgtcttcccctagagaagagagattctttactttcgacaaaatgagaaggagtctattggtatagcttgggctaggttctcgcttttagtgcgatctaacctagacttgtccattcctgatcatgtgttgctacaacacttctgtttgggtttagacaaggagtttgaccattatcttgacattacggctgaaggatcttttgcccatgaaacactagctagccgaaggaagggaaaccttatatcacatcttagaaaacacttccttcgttgccatatatgagcccctccaagaggtaagcacgtccagcaatgaggtgtccaagcctatacaaattgcatattactctgcgcatccataatacattttgcacatttgcccgtttctagtctaaaattcccattcttgctccttccttttcccatctcctcaacaactccaaaccagagtccccattccatagttcccatttgctcccaatcctaaggttaatgtgagaagtgatgtgagtgagggtgagctagcttggggcttctagctacgtcgtcttccttgtcgcggagacggccacaacggcgacgcctcccatgacccatcaggggcggctgctgtgtcgctgtcggcaacagctgctacaccgccctcaaggttttcgacaagactcagctactgtcgcacgcactgggagctgtctgtgctctactgcctcgcatgcccacaagcacagctgcaggcttgcaatgaggaagaagaaatttgttggttgtttgacttgtttccttgaaataaggtacatacactactagaaaatcgatttttcatggcgtttggaaaatatttttcatggcggccatgtggaaaaaccgccagcgcagaaaatcgtgggggtggggggtcaagggccgccagcggaaacacatcttcgccagcggtctacttaagaaggccgccagcgaagattggatatcttctctggcgtctctcttaagctcatgccaatgaaggtattgtatcttcgctggcggtaaggggatgcggcccgccagcgaagatgtaggtgtctttgctggcggccctcttaacataacgccagcgaagataccatatctccgctggcggtgtggtgacgtggaccgccagcgaagatacctatatcttcgctggcggcgtccttaagcctccgccacctcaaatcattttcaatggcagttcaaacgaaccgacatatgatgaccgccagggaaaatgcgctgaactatatgaaccagctacagtaacctcgagcaccattaggagcatgattttctctctcttaagaacacatatataggggggaaggttttgatcttgaatcttttgaaagatttattgtaccagaggttagttataatttgtcctactctttttgtcaactttttttttcatttttattggttgtatgttgagatttttcatcgcaaaaaatacttgacatggagaaagaaaattattttatatttgttatttggagctcaaaatggcaaactttgcaagaaatattgtgtatgatcgatgttccatatatatatatatatatctagttttcgataggtttatttttagcagatttatatattagttaactgcaaaagaatgagctagctaggaagagaagaagagaaagaagggtagtttggtaattcgtccgagggatgtatgttttatatatgcagatttttggctagctttaattatcttgttcaaaatatttaaactaactaaagttgtattattttttctgcaattaattaattaatgcatagatggtggatagggcatggatgaataaagagagatatcgtgcgtcgtacattgaaggagtcgacatatttatgaaaacagctaagaagaatgctgcatctaagaagaccaaagatattagatgtccatgcgtgcactgcaaaaatcagaaaagttggaacgatccatctgtaattgagcaacacttggtgacgcatggatttgttgaaagctacacaaactggtcacatcatggagagatcccagcaagcaagtgccgaactaggctacagtacgcgacgaagtgttgagctgggacgaggatgtcattgtagtagctgaagaagaagaagaagaagaagtgcatgcagtagaacccgttgatgattatgatgaacttgttggtggcaatggtcagcacaatacagttgatgatgccgatgatggtaatgtcagcgtagatgatggtaattttgcagatttggaagagatgttacgtcatgttgaacctgaggttgttgctgggtccgctcgtgggttggataactttgatgcattgaaaaaggcagcgaatgatcttttgtacgatgagacaaagggctgtgagaaggatttcacattgttgcggacggtgcttgagcttatgagattgaaggccagaaatggttggtccgacagtagttttaatgacttgttggttctgttgaagaaactttttccgcaacccaactccctgccaacaagcacatatgaagcgaagaagcttatatgccctttgtcactgggtgtgcgaaagatacacgcgtgtgttaaccactgtatcctatttcgtaaagagtacgaggatttggatagatgcccaacatgcaagagtagtcgatacaaaacaagccgtagccagtccgagggtctggatgttgcccttgacgatgtagaagagtttgatccatgcaaagacagtaacaaaaagaagattccccagcttgtcatgtggtaccttctggtgaaagatcgtctaaagcgtttgttctcaaacccgagggatgccgaattgatgcgctggcatcacgaaaagcgaaaaaaaggatgggatgattcgacatcctgcagatgcaagacagtggaaggaatttgacagaaagtatcataagtttgcagaggatccaagaaacgtaaggtttgcattgagcaccgatggaatgaatccattcggtgacttgagcagctcacacagcacgtggccagtactcctaaccatgtacaacctcccaacatggctgtgtcagaaaaggaagtatatcttgttgaccatccttgtacagggaccacgacaacctggcaatgacatggatgtttttggagcctttgctggaggatatgcgcgatttgtgggaacacgagatccaagtttgggacgaattcctgcgggagtacttcacgctacatgcaattatctttgtcactgtcaacgacttgcccgcactattttccctattgggacagatcaagggaaagacgggttgcgttatttgtgtggatggtaccgtgtacaggtatcttaagggatcgaagaagctagtgtacatgcggcaccgccgtttcttgagaaagaatcactcgtaccgctcccaagcagaatattttgacggtattgttgaggaaggtgatgccccagaaccatggaagggtgataaagtgttcagaatgacaaaaaacctgaaggttgtttttgggaaggtaaaaaagagggaaacaaataagcggaagagaaatgatgccgaagtgccagcaagccctagcgtgccattcaagaagcactccattttctttaagtaccttccgtactggaaagatttagacatacgccattctatcgatatcatgcacctagagaaaaatgtcttcgatagcaccattgggactatactggacataccaactaagaccaaggatgggctgaaatcacgtaaggacctcgtggatatgcaaataaggaaagagcttcatcatgtggatgaaggtaataatggaaaagtgtaccttccgcctgcttgctacaccttgacaagagaggagaaaattgcatagtgcaaatccctacatggggtgagagtgcctactggcttctcctcgaacattaagcgactagtgtcgatgaaggatctgtcgctttcaggctacaattcccatgactgtcatgtaatgctcacagtattcctcgccattgcaattagagtagttgaaccagttcacgtaaagctggtcatcactaagctgtgttatttcttcaattgcatatctcagaaagtaattgatcttgaagagttaggtcctctctgggctttcgctatacagacagtgtgcgagcttgagatgtgtttccctccatcatttttcgatatgatgcaacacctcatagttcatatcatgcctcaaataattgcacttgggcccctgtacctgcatcagatgtggtcttttgaacgatacatgtccattctaaaaggctacgtatggaaccgcgcccacccagagggatccatgatagagggttacacaaccgaggaggtcgttgagtgttgcattgattacctaaaagatgggaaagcaattggtttaccggtacctcgacatgaagcaagattatctgggaaaggaacaaaagggaagaaaagaatccacgacaatgactacaaaaaagtgaaagatgctcatttcactgtgctgcagcaactcgcaatagtggagccgtacatagagcaacacttgcatgaattacaagcaacaaatgtggggcgatctaatgcatggatcatgaagaaacacaagcatcactttactgaatggttcaagaacctcgatctaccagatggccataccatggaagaaagaacaattaaaatgctgactgacgggccatcaagtgtgtataccttgtggcaagcatatgatctgaatggatacacgttttacacaaaagcaaaagacaaaaggagtgcatgccaaaacagtggcattcgagtagaagcaatcgacacaactgggcaaaagagcacatactatggattcatagaaaaaatctgcgaactagactacgggccaaatatgcagattccactgttttggtgccaatgggtgaaacacccagctggcgtgtctgtggacaattttgggctgacaatagttgactttgacaacgtaggccacaaggatgacccatgggtgcttgccgatcgggtcgctcaagttttctatgtgacatacccatctcatttgaagaaagacatagttatttcgggaaaacaaaagattttaggagttgatgatgtcgaagatgtcgaggcatacaatcaatatgagaacatgacactattcacagatttttgaaacaagatattacgcgtcgaagaatcaattggtgaatcgccgaagccatacataagaaatgaaggtgtagggaaaagtgttagatgctaattcataatatatgtatatcttgttggacgtatcgatgaattttaatgtattataatgcgtgacaatgatggatgataaaattttgtatatggaatatggtgacatgataattgtaggatcaagaaatagtttggtataaatttatttgtatgcatgcattaaaaaaatatcaggcgcaaacattaaaaaaagtaatattttttttgataaattaatcatatatgtgtagaaataaataaaattattttttcagttgagaatgacatgtggggccaaagggttttcgctggcggccggctttgcccaccgccagcgaaaactgttttcgctagcggcccacataagctaccgccagcgaaaactgttttcgctagcggcccacataagcttgctgccagcgaaaacccttttcgctagcggcccacagaatcctccgccagcgaaaatgttttcgctagcggtcggtgcgttcctccaccagcgaagatgtcttcgcctataagtagctagcgcacgcggctgaaaatttcctatgtcacggagtcgcgcgaaccctaaaatttgtgccgccaggctgccaaaatttcgagcgccgccgccagcgataaaactagcaccggccaccgccgccgcttcctcctccattcgcaccatccacttttcggacatagctcctccattctctccacctcctcctctccgctgtctccaccgccgccgcaccagatcctcctcctctccaccggctcctcctactcgggccgccgtctccaccaccgccgccgccgccgccagatccaccttcacctctaacccgccgccaccaccgccaccaaatccagctacctctcctctgccgcctcgtcgacaccgctggtcttctctccgccaccgccaggaccgtcgtcgccgcctctgggacctcctctcggtcgccgcgccagtaccgtcatcgccgccaccgagatctcctcttcgctgcctcctcctctcgaccgggacctccacagtgagcccacgccccctgcctcctctcgtttactattggtcaccgattaaccccctctcctcctcctcagcgccgccgtgccaagaaaccgccgccgcgccgccgtgccgagaagccgtgcgccatgtgccggccgggactcgtcgtcgccgtgcgccgcctcctctgctcatcgtctcctctccaggtacccctctctctctgacgtcgatgaatggaatagtgcagtggatggatgaatgaatgaatggaatggatgaatgaatgatgaactttggatgaacgatgaattttggaatgggtggatgaatgatgaactttggatgaatgatgaattttggtatgattatgaatgaatgatgcagcagcagtccatggaattttggatgaacttttggatgaaatttttgatgaattctatgtgaattgaaaatgcatatgtataattgtgcgctttttttgtcattccgttcagattgttgcaactgttatttaaaacttgaatgtgtagctagtttgaaacttgaatgtggatttaagtgccattttgacatgtaaccattcatggagtgtatactgctttatatgttgttttgttcccttttgctagaactattgaattttgggggataatgtttacatttagctgaaaaaggatggattgatagattggcaacagtgtggttagctaggtagggtagctagctagaaatagtttgtctagctagctagttaggggttatgttcccttttcctataaataaagcatatacagggtttgaagtttagttcaaatggaagaattgaaagattggccgcatatttaatgtagttccgaggttatcaaaccatcacagaatacaaaatgcatggggaattttggtggatttgtcagtgtagtccaaggacggaaccaacctagacaccaaaattttccatgcattttgtattctgtcattctttgataattaaggaactttaggtttagggtttgaaatttagttcaaatggaagaattgatagattggccgcagatttaatgtagttctgaggttatcaaaccatcacagaatacaaaatgcatggggaattatggtggattggtcagtgtagtccatggacggaaccgacctagacaccataattctccatgcattttgtattctgtcattctttgataattaatgatctcaattaggtagtttgaaatggtcagggttggtggattgtaatattgatgtcgttaccaatctcattgattgctttaagcgatcaaggagtttgctagcgataaaaatatttatagttgtagtacaaaattagtatctaaattttgccttctttttggatttacaataataaaatgattccattttgcaactaacataaattcaccttcaagcgatatcaatggacaaacccacccaagagcaacccacgggtgacaagggcaaggaaactcagctagtcatggaggaagatatttgcatgcaagtagtcgcggaggaatcttcgttgtctagctcaagtgaaccaggcagtggatcgtatcactcgtcgagtgacccccatccttctcctgcaaagaagagaaagggcggtagcgacaatgaagttgactccgactacgttcctcccgaaccggtggtacgtagcatataatatatgtttagttccaatcatattaactgcgaactatggattttaattaaagtcacatgaattgcaaacaatagttgaatgctccacgtcgctccaaaaggaaagaccaagccgcaactaaacctgaagctgaagctacagctgtcgtgcgcacaacagcttcaagcaaacccaagaaaaggagggtcgagcgagggaagaacatgctgttgaaggaagtaagcgttctgacgcggatgagtgagataggggaacccctgtcaccggaatactcatgttcgaagtatagcaaccaatgtggggcggtggtcagggatatcgtggagatcacatggaaggattggaagaaagttccagagagtagaaagaacagctgttggacgtcgctgcaaagcaagtttgaatatccagaggggacagatgacgataaagccaaggattatgcgttgtagacaatggggaagctgtggcgaaactagaaaacggacctgaataagaaatatgtccagaagggactcacgccatttaaggctacggaaggataacacaggcccagtgggatgagttcgttgcccttaagacatcggcggaagaaaaggagaagagccagaagatggctgagctagcaagaaggaatgaatatccacatcatttgggctcgaccggttaccggcaagcggtgaagaaatgggcaaaacaagatgaagagatggagaaggctgggaaaccagttcctacgaaaaatcacaacccatgaagcaggaactgggtgcgtgcaagaacaccggtcttcacccctgagggggatgtagtattcaaggatcagaagctcaaggaagtagctgtcaagatgaagaacatcgtcatgcagcaacaggccgggacgttcgtgccagatagagaccgggacgagctgatctatgccttgggcaaaccggagcactctggctatgtacggggagtttcctcaaagactagctggaaggatggattcaaacaggatgcttatacctacaagaagtgtgatcgctacaaggaagagattgactctcaggctagggcagcagctcgtgacgaatgcaatatatactggagtcagaatatgatgcacggtgctgctgttttagagcctgagctgagctatcctttcgatgatgtaacggaggatactccgtgctagctcttgattccggtcggcagggcgggaaagaaaatactcgttgcaactgggaggttcataccaggccgcaggtttcattgccaagacattccggatgactacgtcaaggtagtggtccggacggtcattaggcttaccggatgcacgagctcgactttccaactactgagcagattgtgtaccttggagatgccgtcgaccaattcatactatggcacaagaatgatattgaactagggtcaacggatggaattgatcgtccaccaaggatatcggtgtcaccgtcgcgtccaccagtcgtagccagtccgagggatagtcctattgcttcacgccctagaccagagccactagttgcatcaccttcaggaccagagccaccagttgcatcacctcctagaccagagcctcctgttgcatcacctcggaatgaaaaggatgcagaagaacaatcggtgcttgcaaagcaacaatcacagctagcaatacaggaaatgtctcccgcacaaccatcagagcctgtacaagcagagcctacaaagctagcggcgggtgaaatagaagcggtgcctgagcagccaatgcccgaccaaccagagcaatcgcaatcagagccatcgcaaccagaggaacctaagggtgccgatgtgccagtgatggtaaggacgcacaagcacaaagcaaaaagtgcgtccaagaaacattatatggtaacggcattccgaggaagggacaaagatatcgtaaatgccgaatttgataacagaaaattaaaagggttcaagcagacctttgatgactatctcaactatatcaattccccagacgtgccacacgagtttgagaatggcaaaccattcatttacgactggcaactaagagaaggaccgtagcaactaagaagttggtacgattggtacattagggcaagcaccatgaaaggcatcgattcattcacagttgccgtgggggagaacatcttctggagcggtccttgtctactccaagcccatttctccgatatgcattccctctaccgtaggaagaggccggacgccaatttgattgccatctggtgtctgttgtcacgaccggaattgacccaacgggcgttccttacgtgcgtgtattattccttgtcccaggaggcaaggtacaccaaaagttgatacatttcagagtttatcaagcggaagcgtaaatagttaatttattacatgggcagcgaaggcccagcacatacaaagacaaacgagaaacagcggaagactagggcgacgaccacaggcgcttgacggcaggcacgagctagacaccaaagccttcatcttccagggactcctcttctgggtttggaaaaattgagcaagactgagtacaaccaccgtactcaacaagacacacccacaagtgcaggataaatgtaaaggagtacaagggggttatgatataaagggttagggtttgcagtaaacagcattaaaagacacttagttgctcaaagctattttgtaaacacgtttccagagctatacaatattattaatcaaggccgtgaacccaaacgagcctgccttaacccaaggcctctgatgattcagaccgaactggcaacccgaccctgggtcccagctcgtcccaagccaacccaggccaaccattccacattttagttgttaagcaggttttaagaattaaaacactaacttgggtacattgctcggcttgcccataaccgaggtgtacatctttacccataagacacatcttcctcacgtgtagccacgtgccacataccaccacggtatacggacggaagacgtgacatactttccgacccatcctagccatagacaagagtaccgacccaaccccacctatggccggaacccctgggacaggtaggcaggactgagcccctagcagcaggacactggccctgtgccatgacatctcgactaccgggccgcagctcgtgtagccttcatttgtcctagagatgtccatcgacctccgacttcgtccatctccatccgtgtacttttgtttataaccagactgagccacaaactaagccttacccactagacatgtggaagtacggtagtgctttgcaatagaggcccgaagaccggtccttatatggccgaggtgctactatcaaaaccatgcaccccgagcccagcctaaaaccattttggggattttgaatagagggggcggtgtgaatccaattccacaataatcaaaccattccataatgtccaggtgatgagaaaatcccacagtctagagttgtaaaaccacttaatgttgcctaattaaccagcgaagcatctacctaaaatcatactagtggtaccatgagtagagtgtccactagttggggttttgtttattctagggtgaacaaggaaataataacaataacaataataaggtcataacaaaggtaaataggcatggctagataaaacagtgataacacgggaatttaaataaagcgataatgcaataatttaaatcaaaataattttataaactgggattcaatatgttcaaggatgatgtgacttgccctgctcgctttcccaaacgtcggcttcaacctccacgaagagcggatcttccgaagctgcagcgtctacacgaccaacggaaaagaaaatgcttttactctaaaaaactccacataacaagctgaaacaaagcacaaaaatgggttcttgacttcataaggaaaaattagagacatgaacggtccaattccgagttcaaatggccaagttatggccatttgaagtttatatgctctttaaatgaatatttgcgaatttattcatttaaattttaattaaaaaaaggtttattgcgtcagccgaggggaggggcgcgcggaccgggtccacaggagtggggcccacgcggcagccccacggtccacggtggaccgggcacacccgggctcacaccggccggcgccgtgggtcccacgcgtcagctggacccgagggcgcgggcggctgacggccgggccccacgcggcagccgctcggtgcgcccgaaggcggccacgctggcgcagcgacgggaggcggcgcgcccgcgcccctatggtcgccggcggtggccataggcacggcggagcggcggccgagagaggggagggaaagggggaaacgaagcggctgtccacggctcaccccgggtcgacggcgacgacggaaacggcgaccggagcggaggaaggcggcggcgcggctcgggtggacggggtcgacggtgctccggcggtcggcgaccgaaacggagaggtggacgaggtcggcgaggatgcggctaagccgaaggaggcggcgccgaggtgggaggtggtcggggcgacgacggcggcggaccggagctcggcggcgacggcggagagagagagcgacggcgcgagctcgattccggcggggagagagggcggtgagtggcggaaacggtggtggggagctcggggagggtttatatagggttgggagtgagagagggcggccggagaggtggggaacgggcgtgggagacccggccgccattaatggcgccggcgaggttaggggagaggtttccaaacgaatccgagggagagagggagggaaaatggggggaaagggggaggggatcccggggaataattccccccactttattgcgcgcggggacggcgggaggtggcgggattcgcggcggcggcggcgctagggcgcgggcgaggcggcgggagcggcgggaggaaggggatgacgggtgggccccacccgtcagcgagggtggcgggcgggcccgcccgtcagcggcgcgcgcgcggggaggaggccgaatgggccgcggggagaggagagggagggggaaggagatgggccgagccggcccaagagggagagggagggaaaagggactttttagagcttttctttttataaaaccattttaactttgtttatttcttaataattattatttgtgctctgaaaattccactaaaatttatttacgcattttagacttttaggaaatatacaaaaatcctccaagccttatttgacttttaaccttgcacattttaattgttggaggctttcacacggattttaattattctaggcataatttagaggatgtattttagagtcgttttgggacgtgacatctgtaagtgctacacttgaacgtgttaatagatcactacacctatatgcgtagctcatttgatatccattgttggcaggatgaattacgtggaagccgaagcgatgaaaaagcctgtcgcctacctaaacccgtgcaggataagtaagccgaaccacacatacacggtagacgggaagaagctaccggaacacatcaaggcgatgactcccgaagagaggaaagcttacgtagcacaaaggcatcatgaaaaggtgctcgatgtcgctacgtacgtagctattgcgcttgaatctacgcaggacaaggagtgtgtttatgccccatgtgcctttgagtaagttgtaatatatatgcactgagagtatatacatataatcatggctcgactaacaatttcgtttgcagcgaccattggatagtctttcttctctatccaaagtacaatgaagtcatcatcttggattccctcgacaatgatagcaacacctatcaggaatttctaagaattcttgatctgtaagtaagatattagcatgacgtgttttaacctctgacgaatgtaaattaattatatctgcaaacagtgcttttaaaaggtattaccagcgaggcggacaacgcaaaaactcaagagaacgcatattcgtccgcaataagtggccggtaagtacatatggatgccaaacagtactagttaattttcataaatgcttgtgtgtttccatttaataacctaatataccttataatcattttgatgttgaaagtgtcacaagcaaccggtgggaacagtattatgcggatattactgctgtgagttcctaagggttaatgggaaatattgtgcgaattacaacgaggtaagtaattacttgttaaattagtcgctaacttgtattataatacacacttgttaaattagtcgctaacttgtattattgttaataattaatttccttaattctgtcatgatctgatgcagcttccaaaattccccaagtctgaaagacagctcgatgatacttccattcagaacattcaggcagacatgtgctacttcatccaccttgagtgcgcacatcagcttaggcgatttttcgacaatgaaggagtcttagccctgccggagaatgaatccctgtctaactggaccaggcgtataatatagctaggattttgtaattcattcaaaatacttgtaaatgttatgtcgtcggtcaaaattaatttatcaatgtacatatatatatatatatatatatatatatatatatataggtgtttccgaattactatatgtatattattctacttcatactcaatgtgtggctctaacatacgtgaaagagaacatactctatcgatagctcgattagttatatcaaccacgtgtgactctgaaacacgcgcacgaacaaaagaaaaaaagtatatataataatgttttaaatttttttaaaaaaatttgcatcttcactggtgggccacatgtcagaactaggacggtccatatcttcgttgtcgggccacgtgtccatccacataagccttagtttatttttcctagcgtgccacgtggcctaaaatactgtgagccgccagcaaagaattatcttcgctggaggccgtcctaaggctactgccagcgaagagttctctttgctggcgggcgttcctttcttgcctgccaacgaagatgcgttttttctggcggtaaataaccgctagcgaagatcgacatttttattggcctttgctttgtggcggctgcgattttcaccagcggaaatccaaaatggccaccacaaaaaatggttttcgtattagtgatagtgacaagtatcgatgtgttctcaaatcacaccataaagtttcaaatccgtcgaatcatagtcgaagttgtcaaaatcgagttccaaatctatatatagagaaattaattaagtattagcctaattttttttttaaaatcaattaatatgatttcttaaagcaactttcctatagaaaacttttaaaaaaacgcaccgtttaatggtttgaaaaacatgtgcgcgaaaaaagaggaaggtgggttaggaaagaaggggaagaacagtcttacatacgtaacaatcctttctctaatctaatctgttcctcatctacatgctataatgcattcaaactctgttgcagctgtactagtacacaaagcccttatggcagataaatttggaactctttgcttcgaataaaaaaaaatctgagaacactaacacagattgcacatcaccgatcgaaaataataataataataataatacaagggaactatttcaattcccatcctatattgctgccttatggaaagacctcgataatggatcgaatgcctaacacaggactaatcttgtactcagtgaacccggcctcgttgaatatcttgaaccactctttctcatccctctccatgcctggtgttagcatagaaatggttagatcaaacagcagttgggttccatagcacattgcttgggaggaggatccaaccacaacatcaatgataatgactttccctcctttatctttagaaggaattgcctccttgcatcgttttaatatctttacgcagtcctcatcactccagtcgtgtaggacaaactgtaatcaagaatatttgttaccatctaaatcactgtactaagttcctactgcctaatatatactatacactactacaaaacccctcgtagcactagtgaagaaacaatcttttaacaccggttgaaaaccccctttagtaccagatatagcaacagtgataagcaaattaggactaaagatcttgatctttactgaataccaagtaaaaaaaatgagtggtatatgggattcgaactcaagatctcccacctcagccctcacgcgtgttaccatccaccaactacacacatctaacatagatagagatgctttcttttcaaactaacctggaggcatttttagtaccggttagtaacaaccggtactaaaaatttctttagtccgggttggtgttaccaaccgtaactaaatttaaatttttaattcgggttactattaccaactgggactaaagatcctccagcattcatctcggttggtaacaccaaccggtacttgagtagtaccagttgttaacatcaactggtacttgtttagtaccggttgttaacaccaccaaccaggactaaaaatgttttcagggactgggacttttagaactggtactaaagtatttttagtactggttcttaatataaccaagatattttttattttgtctaccacaacgaaagatcagttcttcagtagtgtaggtatcgactcataggtgtcagtttatttagaaccgacacctatgaacctttcccacctccacgcgatcacatatgggttggtttttagaaaaccaactgagccgagccatccttatccggccacccatccttatccacactgatacaagcatatcccacctctcggtttcttcctttccatctgccgccactcccctcttcctcctccctttctattcgctgccactcttccttctcctcctctccctggtggcgcccgtccaagctgcgctgcccctcctccacctcaccgcctccgagccgcgccacgtcggatctggccgcctgtaggtcaggagccgctagatccagcttcctttaggtcggtgcttgccggatccagccacctgcgacctcaccgtcgtggatcaactcgtctagctccaccgcgtccatgttatagttgattcgagcatcaatacaatctttttttttaaagattataggtgtcggttgaactggcaccacgcggatgggcaaaggtgccctaaattggtattggttgggcaagcggctcctataaagggtttaccagggtttctaaaccagcacctatggggccttttgtagtagtgataaaaaatgttgtcaaagcaacaggagggcatcacagatagtatgttgcatttgcattgcatattgctaagacactgaccttaagcaggagggcatctgcttgggggataaaatccatcatatcgcctgcgacaaactgaacaacgtcgccatgatcacaggaatggaatcgatcacgtgaggaaggtccagcaccgtgcacttgatatgcgggaacgcagcagccaccgccctcgccgccgcgccagtgccgcctgcgacatccacaagggaggtgatcttgtcgaacacctggcgtgcgccacggatggccgcgtccatgatgaacgccgagtcggccgccatggcatcgttgaagaaatcgccgagctccggggcgcgcctgcaggcgccccacaatccagcgccgtgcgccatctcgaacgccgtctcctcctcgccggtcttgagccactcggccatgctcgtggcgggcgtcacgcagagcggcgagtgctggaggagcacgaacggcagaagcgtcctgccggcggtgacgagcagggacgacacgggcgtgaggcggtagtggtcctcctcctccttgacctgcgcgaagacgcccgaggcgaccagcacgcgcatgacgcggcgcaggaaggggagcttggtcgggtggagggacagcgcggcgtgcaggtcgtggagggtggcgcggccgccggcgcggtggatggcgtcggcgacgccgagcttggcggcgcacccgagggccatggacctgacgtagcccaggctgtggtgcatcagctccgtgctggcttgcactagctgctcgtgctccatgatagactaggcttgggtgagctagctgattcactggtaagtgaaggctcgttcgttgtatatggttggtacgtggcctcgcattgctatcgatgtcacactacaaaattccttgtctgggccaggactgtatgagcgactgcttatcaggcatccttcctaggatcgaccttagcctcacattactatcggtatcagattatcaaaaagacaaaactccttgtttgaacaggaatatgtatgagcgaataatttggggcctttcatttttttaggtcccgttcgatcgcccggtcacttcacaattcttgtgggtaatgttccgatcacccacttaggattgcctcgttgatgggcctggcgagatgtaattaaacttctcttgatgtttttttttctctcctttgttttgtggctaggagagccagcgctctacgtcgtattttcttctacgttgtaattcttttgtatgttaggaaaaaaagtatgagcagaagggtattatactcatttctgtaaagaatatatctgtcaaagcaagaccaactacatatatagaggacaatagtgatgggcagtgaatttgccactccatccgagcatgctaactcactccagtcattgggaggtgatcttgtacgtccacgtggaagctgaggatcaatgactcagattggggtttggccgaaccttagctgtcacctcagcccgtgggcttcctcgttcgtctatcccgtcactacctgttaatgtacattgggagttactccctccatcccagaatataagccctctcgaaattcttcatggggattaaggagataggatggaattaaatgggatggttgtaattggttgagatgagtagtagtaggtgaagaaataaaattagagatgacgtggttgattgagataagcaagtgagtagaaaagtagctacattttgagacaaaatttaacacttctcatttgtcatatcttcttttgataaagctaatgcccactcaacacttaaatctcaacatgcaagcatagtattattagcactcctaaaacttacatgcaagcatgccacatcaacttattaagcacacaaagctcaacgtgcaagcatatagtaattatatctacaatttattttattttaaaactaaacatacacatgctaaatcgtcattctcaaatcattttcataatatttcaatgcaaatcatttcatcatttctccattatcaaatatatatcctgcagcaaagcgcggggcatcatctagctacatgtatagatgatgttggttgacatgtcaatttttggttgtgatgaatgtgtagatgctgaagtgacagtttgctggacttggttttattttgtgcacaaaataaatagtatatactttgtgtgattgtctttttcatagagtaaggaagcaaacagttggcgttatttttttaagaagaaatcttatgttcgtgtggctaggaacaaccttttcttgtattggtgaaattgtggctgcactatctcgaaggtctcgtaagccaatatccacacatctgaatatgtgagtttatttttcgtagagattttttatggttcaggattttattgatatcatcccctctcgagcctttgttaaaagagggcacactttactctccaccttttggctgagttaaacttatggagaacataaaatggacttgtcatgtgacccaatttcttcatatttatttccttggacacatggattgatcctccaccaagaagattggtccaatatcttgatatctgtttccttagtcatatggattggtcatccaccaagattgacccacttggcctagagtattttctggcttacttcttacttgcttctagtcacctttcatacgtgcatcaaatacaaattagtacccttgaataccacgtacatctcatttatggattttacttccaacattttatcatcttgatgaggagtatatttatcagtctcataatgtgtgttgatatttcttaatgacattactagaaatataattccaagcaattgcgccaaaatattattgatatatttatggttacatatatgatccgcaagtgcacagatataccattgtagcattttacccgggatcaatccaaggtattttatgtacttaatcccaaggaaagatatgataagagagtactaagctaataattcatatattacttgtataaaccaaagtctaagcaggggttagtcaattcattagtaggataaggttgacacacagaagaaagaaccaatgtattcttcactaaaatataatctaggctaagtggaggaagaataaaaaaagaatcattcctatacttcctgtatataggtaatttagtttacacttgctagtatacaatcatgcaaccaataccccgtaattatgctctcctagtgtttcaacagaccacccctgat

SEQ ID NO: 23977 - DNA, 10872 bp, Oryza sativa
caaaaacatgtttttctcaaaaactccaaaaattatgtttctcccaaaattcatctcttctcccaaaactcatctcttctcccccttttgacaatgatttcatcaagcatagaaattatgttcattaaagtataagagcttatcatacatatggcatatcatgtcatgtgttgcaataaaaagaagatgaaccaatctataacataacaagcatgcattaaagtataatcataaaccaaagattttataattaagcttgaatcaacaatcaaaattcatgatttcgtacgatttataatgcaacatcttaacaagcacataggttgaaaaataaacactaaacacatatacctattgcatttatcactctttctcaaattagctctagcacaaaataagagaattttttaaccttttttttcaagcctttttgctcatatttttctctcttattccgggtacgtccctgtcgtcaagactatttccagggattcggcacccattattttgctcacatcgaatacgtcattgtcgtcaagactgtttccaaggattcggtattcatttttttcatattttttattctcttttcacaatgagcaattaaagctatttgaggaataacaattcaataaagcatagatatagagcatttacaaataaaaccatatgctagcatcaacattgcatatttacttaattcaagtatagaatttaagtgtcatgcatcatctcccttaaaagtaaaatctaaatctcatgaaaagactagaatatatacaagctatgctagagacaaataaaccttcaaagtattgctagcatgcacaagaaaataccatatgtatagaacaaagctctcttttctcaattttttcattgtcatattattgcttgataaaaccatgaggtacatactccccctcaaaccatgccaaaagaattcacgaataagaactaactccccctcaaaataacctccaattctcttcgagcaaaaatcaagaagaaatcaaagattttgaaacaaacatccaatagccaaagatatcaccaatactttcaaaattgacatacatccattagtattaaccaaagctactatctcaaatactagcatatgaaaaagctaataaactagagagtagaacaaaattatgtcaatccaaaagtaaagtgatgttacctttcaacgcaatcgtcatctcaaaattgaacgcacatggggagtatgccaccaaaatacctacgaacgagaagatgtcgaggcctccgtgttggggttagaaataagaaattttggaatccaacactgagtcacacgaccagtagaaccagtaggtacaaatgcactaacaaaatcagaatcagacttacctgaaaacttaccttgacgcttcacaaaagtctgatttgaattatgcgataacttgccccgaggctggtctgaccgccgctgagactgcgatatgacctggcctggtaattggtctgaccgcccgttcacctgcggtttgaccgctggccggtctgaccgactggacaatgtcggtctaaccgtgctcctcgaattaaaacctgatttttgccaacgtcgttttgcaaaagcaatttctcttttctttttctatttatgggcagatctaaaacaaaaaccaaccaaatgtccatcttttccacaataagaacaagtgtacttctcacgacaagtttgtgaagtagatggttttgaaattgatggttttgcaacacaagtattaacagaaggttttgcaagcacaacatttgatttcgaagaagatgcattcaaagaagacatgatgccggcagatttaaacacaatattcttaggctcagattcaatcaaaatttcacctctcctagcaacacccaaaacagtaggaggatgtctagtatgatgatcataagaatcaaaacctaaaccacggttgtgcgtgctaactttggattgatcaagaatcatattgaggttctttttaccatcagaaaatctttccaaagaacttttcaaataagaaacctcttgtgtaagaacaacacaatttttgcatgcatccaaaagacctttttgttttctacaagttgagcaagaaaacacctcatcttgtttaacaatttcttccatgtgattaacacgctctaaagcatctttcaacttcaactcattcaaaccacactttgaacaatattgagaaatcaaagcaccattgttttgttttgccttatttgcacatgaaacattgaccaaagaacttgcacaaaaagcaactttgtatttttccaaaacgttctttgtcaaaatcaactcatcaacaacacgagcatgtaaagcaaatccaagagcaaaagaagactccaaccttttagatttttcaatctcaaattccaatttcttgcaactaatagaattgacatctcgcaaagcattaatttcagaaaataaaacttcacaagattgacaattattagcattaggaatcaaagattttaatctagcaatttcagcattaagaatctcaatagtatgatccttctcatcaagcacaatagaacatgtttgaagtttcttagcaaatttataagcagcatattctaattgatcataactaagcttttcttcattatcatcatcagattcatcaacaccagaacttgcattacgagcaataaaagctagatcaacaacttgcttacctttgctctcatcttcatcttccggttcatcaaaaacttttattaattcttgaattagccactgcatgcaatgcttcttcttctccttctccttcatgttcttcttcttgttcaagtcatcttctttgactcttacatcatcttccttcttgcctctcccaagcttaggacaatgcgagcgaagatgatcaagtgcaccacacttaaaacaacgattcggtccacctcttttcctgttcctaacattattcatagctcgagaaaatttgttagatagcaaaaccaagtcctcctcgaactgttcaagttgatcgtcgaacatggcattaaataaagcaagaacagaagacttcgatgaagaagcatcaacatccaaagaagttgtagacgaaaccaaagcactatacttagaatcacctttacgagaaagaatattcatctcatgagttttcagtttagtgtaaagcgaatccaaagtcaaagtagacatgttaacagactcctgaatagatgtaactttcatctcccaaatagacatgtcaaaaccattcaaaaagtgacgagaaatctcagattgtggataattagcatcataagaagaatcaacagatctaagatcactcaaaattttattaaacctagaaagatagtcatccaaagcttctccaagtttcatttcaaatttaatgtactcctttttgaaaagatcacgacgaagttctttaatgttatttgtaccttgatgaaaatttctcaaagcaatccaaatctcatgagcagtttgaagatgagcaacacgatcataatccgaacgagaaatcccactcaaaagaatattgcgagctttgcaatttagttcaaaagcagttttttcagcagcagtattaatagcttcaggaatcacataaggaagagaaacttttctccaaatatcataattctcagccataatgtaagattgcatcctactacaccaatgagaaaaaccgttctatcgaaaacatgaggcttagttgtaaacttattagaagcagccatagcaaaaactttagatcgattaaaatccaaagaagcaaacaaggctctgataccacttgtaggatcgaatcacaagaactaagccaaccagagggggggtgaatggttgatatacccaaaaaccgaaaacttttagcggaaataaaagttaccctcaaaatcgatggatcgtggtctgaccgaagtagatgcaccggtctgaccacctggttgccgtcggtctgaccgagattcaatctccggtttgacctccaagatcagctgccgcttgctgtcgccaccgccggtctgaccgcccgtataccgccggtctgaccaccgcttgtcgccggtcggaccatcgttgagtcgccggtcggaccgccgcacccgatgaaacacacatcgaagaactctcaaagtagatgacaactttattacttctctctgtgtttacaaagtgcaacaacagcactccttacaaaaatctcaactactcgaaaccctaactaaactagcaactcaattgctctaaaaaacgatacaaaagcgataccgtgaagccccacgctccccctctatttatacatgaggtaggcagcctaaagccacgaaccaaactcatactaagagtcctaatccccataggaaacctcctagtacaagaaacaaactctacataaccaatcataccaaatttggactccttccaaattcgactccgcatcccatacgcacacaatacctccatcgtatgccatatggaatctccataaaccacgtgcatcaactctagccttagtatcccgcatgatatctgaccaccacggacatcgtcttaccaccaagccgactcccggtccatcaccgcaaatactctcccgaggcatcgagtcacctacacatgaaacaaacaaagaaaccatattccgagaccaagctatcaccaacttgactcattgtattgttagcaaacaacagtattacatacgtatagtatccatctagaagccataaccatgaaacaaccacagatatccaaagaaacaacccgaaaccgaaaccgacacagcgtcggccggtcagaccgcgggccggccggtctgaccggcaaccaccgcccggtctgatcggtcccgacacacctgaaaatcaattatctccaaaaccacttcaacagtaatctccaaatatcaaaaccaataatcacagatgctaattgttcgtcaccgaataagaatcaaaacacacgttgatcttacagtaccagcaactctacattcttgaaattcacatcacttcattgccaatatctatactccttttaaaagagggcaatggtggtgacagtgaatctgccaccccactaacttttgtatagagtttttttaaccaactactccttcatgttttttaccaattactacttcatgtgctttaatattacaaaaaatttcttcacaattattcgtataatacaagtttattatacaaagacattaacaaggacaaaattgtgcaaaaacatcacaattaatttgttccaaacaatattagcacacgcataatttattttaatccgtagcaaaacacaggtacttagctagtaacattatatatttctttgtaaaaaaagcagaaaggacatcctcgcatatatattatagagaaaagagcgatatatagtgcatacatgaagcacaagacaatgataaaagaagacaatcatacccaagactgcgaaaatcgaaactggggtatttgattcccatatactgggaaacctatggaaatactttgataatggatcgaaaacctaacactgggctaatcttgtacttagtgaacatcttgaaccactcttcctcgtccctttccttccctggtgttagaaccgaaatattcagatcaaccaaatgttgggttccttggcatattgcttcagaagaagatccaactacaacatctataatgatgatctttcctcctgcatctttagaaggaataattgcttccttgcaacattttagtatctttatgcagtcctcatcactccaatcatgtagcacagactataatcatcaagaattaatgttatcatctaaaatgtgttaaattttgtactagcttagcttgctatccaatacacaaaaatttgttaacaacactacattatatatattggatatatataactgaccttaagcaggacggcatctgctttgaggttgaaatccatcatatcacctgcaacaaactgagcaacgtcgctatgatcagacgcgatggaattgatcacatgtggaaggtccagcatggtgcatgcaccatgtctcctctggttaccaatcgtgcattgtccagttgaccttgccgagaaggctaacccctgcatgcgaattgaagaacacaaacaagaacaaggtagactataactcaatttgcagatgaatgattaagatctcacaattggggttccacaaaccgaactaatggtgaaactgcaattacataaataatctaagcaaaacccaactctaaattatgatgactactgagtaaatatgattaggggtgttctagggttagccctaggacgtccagctattgggtttagcccacaacacaattacaaagtccaaggcctaaatcagactcgaactggatgtgatacgtggcttgttttacagattcccaatagttgagatggaattttaacgtgggaccaaaagcatcaaaaagtagactacatcagttttccaacaagtactcatgagccctgaaattccttctaaatcaacgacggtccgtttgaatttgatgttgttaggatatccgaatccgaataaaaaacgtgttgaacttcatcttttgccttgtatggaccaaaagtgacgcggtaatgatggagtacacttggagaaggtcttgtattggtccccaatcaattttattgatcatccgagcacttcgtgagtccgttgttcattccttgacccatgcaattatttttgcgaacgagaagatgcaaaactcatagcgcaataatgtttgttcaaatatatagcacgtaaatctcacatagaaagcatgcacctttggtcgatgcatacataaggtagtcatgatcatatctgagctagctagtgatgtcctcatcaacaatgaaagctctcctccaacaccgccaacgctgagggacactctccagcgaatcccctcatcctcccctgccaagctcgctctaaaactagtggtcagttattcctcccacccaccaccgtaccaccacaacacctcgccaatgacgaaaggcattaatgtagtgctaccaccccacgcggtcaatctcctcactctcccattcatcttgctttgtctatgtcaccaacaatagcacaccgctcgttgtcgactcctcccccaccctacccccaaaactataaacctaaccctaaccctaaaccacacccctaaccggcctaaccggtgcttgtcgtcacgccctagggaccatgcgcatgacctagcgttgatgcaccgatagacccccgtataattacttatgatactcttcgattccaccttactcttatcccttatcctctcccacatctatacattattagttcttatagatagctcaacttactctaccatagcatttactgaatctgcatgcctaaaatcgaatactgaagatcatttcagatctttcagaaccatatcttttttgacaattattccaaggactcgctaaatcttccttactgatctgtttatgttctatatctaactacaaccatacgttctgcagatacaatcatggattcaccaatattctatgtgatcatgttggacgcaacaaatcaagactatctggtaaatttaggtccaaataccttatcaccctgtacagtctcctgccaaacacccataataatacactactcggtttgtacagccggtgcctcttacaattagaacatgtcacctataggcatgcacacattctaagcttagtcacatcacatggcttgaagataaaaaccaaagtgagagaagcatccaacatgctctacatgacaacaggatggaagcaattcataaggcaactggattaaaaatcggagaaaaggttgttttcagactgttatcatagtcaaagctgcatgttatgatacttaacaaaaaaagaacccactagatgtccagtcacaggttaccccaacagcccaccgccggtgaagaagggattagttcctagaacaaatcattctgtccaggggcggagctaggtaggagaggggggccagggtgcccaagaatctggtcaagaaaatttttagctatagttcatctattttcaccatatgtgcacccctctcaatccaatttcaagcactcatatcagcctaaatttaatctaaagtagagtaaagcaagcgagtagcacccttctccattccattttagctccacccctgattctatcgaaagaggcacatctcgtatctcactagacagtgacataggtaaacatcttacattttcaaatttattcacttcacctataactttcattatccgttcatcattgtttcgcttacagatacaacctgcagattaaaccgcgcatgcaccaccacatccacacaagacaaaacacaatattgaatcagctcctataaatccaggtacttcaattactgtttttgatgatattgttaatgccaaaatttggtaagcccctaggagaattatcacatcgccaatagtcagagtcctgctatattcggttaaggaaattaatctatcaaaggaatcttatccagaagtgaccgagttcaagaaggatgcggcatgtcaagttatctattaattaggaatagttgttaagttccttttatatttaagaaagtgtgttcagtgtcctataaggactttatgttttccttttatctttaggaaagtttctttcttctcctacaaggactagtatctacccatgggtataaatatgtacacccggggtcattgtaaaatatctctcgatcaatacaactgctctcggcgcaccgccaccctctttcccgaggttttacttatcaaccggcagaatttggcacctgacgcggggctgcatctgttcagttcgatctccggcgaaggggtaagtcctacattccaccagccccagtgaatctatcggctacattgatgttgttcaaggttgcatcgcttcgatctcttggatcgctctggtttggtcgatatatttgcctacctgatatctcaattctatctctaattgcattgtatttagagacacatcggttttgttggaattgtctcagttaggtccgatcttctgtcttagccgatatatctctacaatcacaatgctgttataaatagatttgctatatccatcacattagacagatctattggctcatcgagtattagattaccacatataatctcatgctgcatcggttaggtctgacctactagattgttgttgataatataaatcttgttaagctgataggttcatgctagtgttttatcggggtgctagccgataagttatctggacgttacatcggtttataaggatatacatataagttggatttagccgatgacaacaaaggtttcattgatctatctaatcttgtggattttatgacatccgatcttcagccgatgtatgctttaacctttggatcaaaacttcttctattatatcatactgctagccgattggtttctactggattatcttgctatactattgttatttatcatcatcagctgatcgcctttatatcattatctacattggacatatagccgatagctcaaaaccctatcactatcggctggtatcggcatcggctggaattgctccatcggcttgtcagccgatcggctcattgatctgctatttgcatatcttgtcagttgcaggatcaaactgactggcacgcttgcatctcaccaaactttggacctgcactggagctaagcagatctcccaggccagtgtgtgttttttgcgtcaacagatatgcatccatatttcctttcatgcacactaaaaatacttatccaccttttttagaaagcaaaaaacaagcacagcctgaaggatatgtgcttttgcagcaagaacgtcaagctttcggttgagctgaaaactatgtcaaagatattgcagaattcctgcaccactcaagcaaattctatattgtcgctatgaacaacacattcatgaaacaagacagagtggtcaaatccttcacctactactaatctatttatagccacaataaacacctaacattcaattttcttgacagtacttcataaaagaattttcgaagaaatatgtagagaatatgggtaccggatacccacacggcctccatattcgactagagataggaggtgggccagattcatatattatgtaatagagtagaactcggttgctatgttatcttgtaccttaaggcagggtatagagccccgacaggtactaccatgtaatagattagaaaactgatgtcgtttctagctaggtttctacttcgtaaccctgccccccaacctatataaggcaggcaggaagccccctccaagggcacgaacacataatcacacttgagatcgtcagatcaataccacaattgacggaatatttccccagacaagagtagggtattacttctcatcgagaaggcctaaacctatataaaccctttctctcataacccatccacttttatatagcttgttcaccaccccctttcaatattgctgaaatctagtttcgacaaaatacatagcaaaatcttgtgcaaagcaagacagagagcattcaagtacaaactgcatgcaggaggcccctcaaccgccatgcttcttcacaaaccaataaatggtttctacaacctcacagcaggatggacacattttgcagcaaccaataacatacaactacagacgatatgtatcttccacttctacaaaacagatcgattgcaggcaacaatatatcttctgtgaaggttatttcgatgccttgtgccataaccatccatctttgccatcaaagtgcaatgccaggct

SEQ ID NO: 23978 - DNA, 6528 bp, Oryza sativa
tacttaccttatcattttcctctgcagttttcattgtacttatgccaagtgaacgatgcaccatgtttcccacaaacagctaccctcttatgttctgtttgtgatgtgcttatttactcttcctaatttcaagttgctactggaaacaacatcgtcatcttttaaactacctgtatacaggcggtgtgccaatgacatgccccgacatgtagtgcagataacaacagatattctatatgaatggttggcgcacaaattcgtagtcataggaaccggcaatgtcctcgacgaggttgataaggtgacctaatttctgtaagagtagtcctccttccatcctcctctcccaatatatatgtgtatgtgtacacgaaaaataaccaatatcatctctctaattatatgggtcccctcccaatatatatgtgtacacgaaaaataaccaatatcatctctctaattatatgggcctgactcgttaacatacaaacttccaatctatccctaattatataagcttgacccgttacaacgcatgaacatgtaactagtaaaaatgaaagtaggaggtttggtgataattggcttcgtcatcctctgcagctgttttagaagatggatcagtcgacagcaaggctcccaaaccactagtaaccgcacataaagtgggggtacggtgagggttactggtgctagggtttgacaaagaaaaaaatttgaccacaaattttagaaaaaaaaatgaggaaaaaatccccccaaaaattcctagaagtagtgtatgatttgtaatgatatccggtgataaaattttgtgaaaaatactaagctaactccatgtgttggctggactataaggtggcattactttgaaatcaaggttttgatagtcgtgggcattattttggtagtattggacattatattatggtatttctattgttgtgttatgttttttttatgattttctttattttcaagtcaaagacaacggttattgtgccttaccacgagattactgtgaccttaccatgggatttaaaatttttgaattcattttgaagataaaattcatgtggttttcagtggttactacggtaactgtgttattgtggggagggggagggggtgacaacctccccacagacagtttgggaaaccctggtcgacaattgttacaaaatggtaagggaataatgagtgcaaagggagacaattgatgatccaatgttatgcaatggggaatggaaagtaggcggcgcagctacactagttgggcataaaagtggcatgtccaattcgcttagatttgcttttagaaaaaagtacgaattacctcccccacaaactatcgtggtcgaccgaattacccccccctgaaccacaaaagcggacattgttcacctccaactttgtaaaccgaacaaataacccccccccccggctcaatccgtggtggttttaatcctacgtggtagtccagtcagcaattcatttataaaaaaaaataggtgggccccacctgtcagtttctctctctgtctcttctatctctttcccaatctttcactctctctctcttctccatcaacggcggaggaggcgaggcaaggcggcagtggcaggcgcggctgggtggcgactggcggcacgaggcggcgacgtcgcccccctccccctcccgccaaccgcctcgccgccacgctcgcctccttagccaccacgcttgcctcgccgctggagaggacagagctcagggcggctagaggaggggaggcggaggacggagctcggggcggtaggagcacagggtggcggagggagctcggagggagttcatggtggtgctccacctcacctcggccaagttcttgacgacgctcgtattcttcctcatcgccttcacactactcaccctcatcccgcagctcacccacgagatccgcaagtcgctcgaccgccacaccgtgctctacaccactattgacggtcgttatcgaccaatttcgaccgtcaatactacccaatatatgaagactagctatgcttgcaatgcattattccataaataaaatattctattccactatatgcttggaaaactaaccatgcaggagaagctatcaaaatggaggagaatcgacagtacaacaatcgatcaatcaaacagacgctgtcgaaaatcagacttatggatggatgggccaagaactcagaaatgagctatcattttgacccaaaacattgtgtaccataaagtggggcccacatgacaacatcctgaagaaggttgtgggccaggggagctagccagggttcgaccgaaccccctagttcggccgaaccaccagctggcccaatccagcccatcttcggccaggcagttactaccagcatcctatgacggttggagctaattctacctgaagaaaccgtcatggacacatggcaagaggagatgaaatatgccctttggatgcttgaccatgccacttgtcatgatgagagcaaagatgctcataggatgcttggagcatctccactctcccaaggcacctcatggcctataaatacccctcctctcattcattccctcaaacacctcaagaagaagatcaagagctctctgaagtattgtttagtagttctaatattagtggagtaggaaatagaatagtcttcatagtcctcgagtcttcaggagaattcgggtatggctctagtagcttttctctcttcttttgtaagacttattgaattaatagaatattcttctttatacacttttggtaatttattccattcatattacttgagtgccgactttactttatacttgaatcaatatagtcgtgtaactagctttccagataggtgtattggtgtgggtttagtgtctgattattcggttgctctatgtcggttgcaaggatgtagagtagtatttagtaatgtaagcacggtgcttagattattagataccattaattggggttatatattgcggatgagaggtgggccgctgatggtgacagctcagtacgggtattcctccgtgctggtatataatcctaagttaattccctggggagggtattcctacgtatttagccccggttgtatggtcatgacgggctgtcgtaaggaactcggcagtgaggggtggcttctcgaaacaccaggaggacactgggtacggggtattggttgcatgactatataatagcaagtatagattaaagatgtatgtatactagaagtacaggaatgatacttttcttattctttctccacttagcttagactatattttagtgagagtagttcttagttctgtcttctgtgtgtcaccctaccctttgaactgaattaacccttgcatagactttgatgtatataagtaatatataaactattagcatagtactctcttatcatatcttcccttgggataaaataaatacgataccttgcaatactctcgggtgaaatgctgcaatggtatatccgtgcgcttgtggatcacgtctgtaaccatagtataccaggattatttctagtgctattgctcggaattatatttccagtagtgtcgctaagaaataccaacaaccaccctcatcgagctctccagggtgctcggcctcaccaactgcgccgtctggatgcccgccgccggtgaaatgtgcttgacgcacaagctccggaggggcggcaacgacgatggcgttgaggtcggcggcgtcgacaacgcgaacatcgtcgaggtgcgggggagtgatggcgtcaagctgctcgggccagactcggcgctagcctcggcgagcggcggcaaggagcagggctctggcgcggtggtagcgatccagatgccgatgctgaaggtggccgacttcaagggtggacgctagaggtgatccagacgagctacgctgtgctggtgctcgtgcccccaagcggcaagagctggggacagcacgagatggagatcatcgaggtggtcgctggccaggtcgccgtcgcactgtcgcacgcgactctgctggaggggtcgcgggcgatgcgtgtccggctggcagagcagaaccgcgagctgctgtaggcgcagcgggacgcgctcatggcgaacgaggcgaggcaggcattacagggcgtgatgagccaggggctgcgccgcccgatccactccatcctcggcctcgtgtccatggtgtaggaggagaccctggtgccagagcagaggctcgtcatcgacaccatggcacgcacggacaacgttgtctccatgctcatcaacgacatcatggagatgtcggtcgacaaccgcgagcgcttgccgctcgagatgcggccgttccacctgcacgccatgataagggacaccgcctgcgtcgccaggtgcctgattggccgcaccgagctagggcatgtcacgctccgggtgcactccgccactgacgatgtgctggagggtttggagagggagagagggaaaaaaattggggacagatagatcataactaaggataagaccttcaaagatctaatcttttactgatgtgatgttggtacattaattctgcaagttgattaagcaagcaacctatcatggttacatcacaacccatcgatgtaaaccacgcgctacacacacaagcaagaaacaaacgcctaaaagaaaacaatggaactcttggtagcgtaggttcaacttgagggttcttcgggatcttcactccttggcacttggaggggaaactttggaggcaggttccttcttcacaactagctccactgcttcctttgctttcttgccacctcgttcaactattatgtgttgaatccaagcaagggagggagatatgaacactttgcaaatagcatatgggaagaagcagaaagggattttgcaaagtcttttacaaaataagtccttagggtttgtccgtttggcttatcctacagtcgagatggcactgataccaacttgtcacgcccggaaaatacctttcccgaacactagtgtattaatccccgtcccaagagaagccggggtacaccacaacaaacttgatacagaagacacatctttattaattatcacgataatatttacattattacaaaggcacattacgcctgacaacaaaagaaaaacaactgcggactagcgggcctacggctccatcttcacaggcgctcatctagggtataagctaggactccacctaagacttcttcttcaaacaacttctctgaatggaggggggaaaattgagcaagaatataaccaccgtactcagcaaaccatgctgagaaatgaattataatgcaaaggggaacaaagagttggcataatagggttcatttttgcgtaaagccaaagttgcaatattttaatgtttttaaagcatagttttaaactcggtcctatatctaagcaatattatcacggttgtgaacccacgcataccagctttaaactcaggttaaccacctgtccaaagtgtcatgaattccatccatcgcttagaagaaaaacactaacttgggtacattgctaggcttgcccataactgagggcgcggctattcggatagttttactctgatcagaggtgtacatctttacccacaagacacaatacttgacttcatgtcagccatgaatcatgatacctcaaaggtacccgaaaagtcaagattgtgacaagactatccacctacctcaacccaaaacagaaggacctgctaaggtttcgccgcccgccggtccccgacaaggtaaaggttgccggatcccccaggatgagacaggccccttcttgcgccaggtcaaagtcggcctcccctggccccagacctatcataccaatggcctttgttttgagatgatctagacttctagtcaggccttaccaattagacttgtggttgcactgttatgtttcgcaacagaggcctgaagactggtccttgtagtgaccgaggtgcttctaacaaaaccatgcacctcgcgccccaccaaaaaaaataggtttagggagttttgaatgagattccaccatgtccaagctcaaccagtcacctaatcatcattcttacatattttagttgttacccacagtctaatttatagaaagggattctatgttagatctaagcatagataagcccaacctagagcaactagtaagtccatcatatagggaaccatactagtcattttatcattttactaaggttgacaagagcatgggtagcaattcaataacatggctatataacgaggatcacaggaatattaactattaaataaataatagtgaacgttatataatttataaaagtgatgcatatagaagtaaaacaacatagttttttttgcaaaaatgggattcaatatgttcaaggaatatggtatgacttgccttgctcgaagagaaggtcttctgacaacttgacctgcacttcgggaacttccgaaacgacgacagctacacgaaaaaaaaacagggctacaaatcta

SEQ ID NO: 23979 - DNA, 8699 bp, Oryza sativa
tgacgggaacgacgaccggagggaggcgaggcgatggggcggcgttccaagagtcttcgggcagcgaggagacgtggtcgatgatgaaggtgacgagatgaagccgacagcagcgacggcgcagtgaggcaatgctccggcgaggagggagggctaccagagagcaaggatgaaggctacatcaccactgctcaccagcgaggacgagtttccggcggtctccaggagaaacggaggtgaggccggggaagaggaggccgctgcgaagccgatggtggcgacgccgggctccgatgaggacccgaccgccggcgaggggcggccggagttgcacgacagcggcggcacgggaagaaggcagcacagcggccagggagagaggaggaggagggctgcggtgtgtggggagagaggaggcggtcagggctcccttttatacgccggggtggaggagggggatggccgggagaggaggggaaagaccagggagctcgctggccggtcatcaatgacggccacaaattttactcttggttgattatccaaaacagggtgtggactgtagatagactccaagcgagacagtggccaaaccaactcctatgccttttatgccgctctgtgccagaaacggcaatccacctactagcccactgtaggttgtcgaagagaatttggagttcaattgaagcctggctgcagtttgatctccacctctctgaatggaccaacttcctcactgtgcacgactggtggtccttcctactaaaaattccaagcagctcgaggaaagcccaaaaatcccttgtcattcttgtttcctgggaactttggaaggagaggaactctagaattttcaaccacttggcaaataccccgaccaatatcattgcaaagattaaggaggaggctaaaatgtaggtgacagcgggggcgaaatggttgacggagatacaactattgggagaataaaaacactgctttcggtcggggaatgacctaaactcccataatgtatatattgttatgtactcccttctctatcaatatataaggcaaatttcttgccttcttttcaaaaaaaaatgacggcagttcatcggagggtaaattcggcgaatcaaggccgaattaagaggggagaacgtgggggaattgatgatgaggaggagaggaaccgatttttggtagaggagaacgagtggggagggagatcaagaggggccgcggcgcttctgttctttggctgggagaagaacaggcggcggtcagctggaggaggaagacgaccggctgctgggccagctgggccgcagggggaagaggaatggactttgtccgagggagaggaaggagagttgggccgagcaagggaggggaggagatgggccacggagaaggaaaaaggcccaggagggagggagaggaggatttggggccgaaaatggcccaaagagaagaagagaattatttttagcttttcatttttaattaactcttaacttggtttttgttgcatttaaattattttttgtgctctgaaaattcaagtaaaaaattgagggaccaatttagagcatggaggatttaaaaaaaaatactccaagccatattcagatttttgttgtatgcattttaatgtttgcctatttaacttcgaattttaattaattttattattccttttagagaatgatttttaatttaggatggatttatcagggcgtgacaaattcaccccctacaagaatctcgcccttgagattcgaagggttagaaagaaggtgggttcggaaagtctttgatttgccttctcattctttgaacagcttccacttttatcttgaatgatctaaccagatccttcaatagtgaatcatgtaatctttcaataataaatcatgcgttccttttccgttctatgtttctctagtactcgtgtcgatttttgtcatagtcaatagcttggtttcaccctgattcttccatttttagcttttatctgagttgcgagcacttggaggtgttgcttcaattctgagtctgagatctacaacatttgtatatgtctttgatttggacaggggaggaggagatgaattagggttaaggggtctgcacgaatcttaaagcatatctaatggtccaaaatttaaaagataggaggtagaattttttgtaaacaaatatgtagatagtttctttttagtatggcccagcccatatgttccaatgagagatgttggcaacgcatctgcgcggaataggctttctcacttaaaagtgataggagtcagtacaagtaggatagagagtattgtatgccctggattttgcgcacgagctacggtttgcatcatgttcaagttcacatatggtgaacacaatttactctacaaataaattatgataaaaatctgcgaaatgacattgacaagcgtcccaatccatgaaatgcctcgacaaacccaacttcctagaaataccatcgtacaagcgcttgtgtcccagaaataccgtcgctgttaagtttccattagtagacctccgttaagtgttataaaatatcattttacccctacaaattgttgaaagatgattacaacttttactctttctgacaatgtacaataatttagtttaaagagcaaactacaaattagtataagctaatggaaagagtaaaagttttagtcaacttttaacaattcatatgggtaaaatgatctttttatagcacttaacggagggatgctaacggaaacttaatggcgatgtcatttctagaataaaaacgcttgtacgattgcatttctaggaagttggggataacatttctgaattggagcgcttgtcaatgatatttcttggattttctcataaattatttaaaaaacttcacatacaaaatataaattacttttggttacactgttatttttatgaaatttgccactggacccacctatcaaggctcacatgttatatacagcgagtgacaaattcttaattgccacattttaaaagtggcaaatagttaaatgtcgctatttttatacggcaatcagtttttaaaaccgaagcggctgacaaggtgtacaatatttctttcttttataaaactggctaatggaagttcacttttgtttaatttaatgaaaaaacagaattactttaagaaaaaggagattcggtgttcgagcctcagtggctgaactgaactgaacttacaaaaactgaccgttatctcttctccgcctcacctttcccccctctctctctcccacgcactctcgccttctccacacaaagctcgcaaatggcgatctccacctggagcacgcgcctcctcctctccccctccgcctccgcctcgagccatagacctaaccctacccgccgcctcgccttcccctcccccatctccggccccggccgccaggctccccgcgcctacatctccgcgccggcgtccggccccgacgcctacccgtccccggccctcgacgccgcggcggcggcggcggacgtcgccgcggccatcgcctcctcggacgccgtcacgtgggcgggggtctgggccctcctgtcgccgcacagggcccgcatcgcggtctccctcgcggcgctcctcgcgtgcaccacctgcaccctctccatgccgctcttctcaggttggttaggttggggtggttggttcagggcacacacacgcctcttgcgcgctgatgctggtttggttgtgagatgtgtgatgtgatgtgatgtgatgtgggcgtgtggcttggtttggatggcagggaggttcttcgagacgctgataggaaggggctccgaacccctgtggaggctgctgtccaaaatcgccgtgctgtatacgctggagcccatatttacaatcgtattcgtgatcaacatgaccgtgatctgggagaaggtgatggcgaggctccggagccaaatatttcgcaggattctaatccagaaggtaattttgctttagctcattagctgtgtaacggttgcattgcacctacaagtatttacagtagcaattacaattgccagacttggggtaaaaagatgttgggttattccatatgatcgcctaagttctgtttgctcattgggtatgcagctgcttcaatcatgtccaaataactaattttaggcatggttgcgcttacacacgagtcctttgctactactgtatcatttgtatgatgaataagttaaaagctgctaagtgggtagcaacttagttcatatgcttgtttttggattgtttacaaattatgcccacattagttttaataccattatgaaattattcatcccattctattaccaggttgcatcaacacttagtaggttttactagggtgaagttgttcgttgaggtctcctatgctttgcacattgtacattaatgaaatatgaaggactagggacatactgtgtggagttaacgtaggtagtactaatgcatcgtgaaaatatatttttttattgtgcatgattgtgtagccttgaggggcgataatgcactgcttcttcatcttagcaatttggcattcaccaacatggttatatcagttttcattagtcatttcatagtttatgttgataatgaatgatttattctgtttggttgtttgcagatggtattctttgatcgtcacaaggtaccgactaccagcataccacattcatattaaattgtcacaattagttagagaaagataacttcatttgtaagatattgttcctactaaattgaaaatctttgtatttttatgttcagtgtctgtattcaagttttcaaatcatccaacacggattttgctttgtgaaaaatatagttgagcaatgtagataggtagcttggtaagccactttttccttcttccattatggaaggcatgtaattaatgttgggttagggttatgcaaaaaaaaaatgttgggttagggtgtgtggatagtgataacagtgaaagatttacttctaggttaaaaaataactagatctaattcaatttaccaagaaaaatggtggctatgatcagtgtattatgcattatctgaattagtaaagcagtcattgtttagcttggtctgttatacaagttatagagaattttctttcataccaaagtacattttttctgaaaattatgcaaatgaaaggatacactgctgattattccttgcgtgtgttctatgttgcttcaaaaattttacgaataaaagaaccttactatcatttgatggcaggttggcgagttgactggtttgttgacatctgatttgggtactttgaagagtgtcgtaagtgacaacatatcaagggatcgtgggctaagggcactctctgaggcaagaaactttacactatgagaatgtaagcttgatactgctaatggcctagaatttgcgctatacaatcactgaatcacatattctctctgtgctattagcaatgctttcaaaaatactgacatctcgaagcattattgaccagttagtccatttatatcatatacttgattatttggaaatcatgccattacctgtaaggtcaattatctcagcatcttctaaagcagtttttcctcttttctttttctccagatcaccggtacactttgtatacttttcacattatccactgagctagctcctgtactaggactcctaatggtctctgtctccgtgctagttggtaattatccaaatgatgactgatgccatttactattcattattctctatatcacatgtctttaagcgtagaatgactttcaatctttcatcatcctgaggtccatcatatgttctagaaacaagctgatttgtggtaaatatcacacattagttttgtcaggtccttaccgtggaagctggtccctcatgtcttatacgtttctagttagctgttgataatgaattgggcctaaatttaatcaccacacttgattttttatttctctgtgaaatatatgggtgctatgctgaaccatccctggtattttgctaatgcaaaatagaagtcctatttaggaatttgcatgagtggaatgatattgaattattgatttgggagcttttgatgcaaatgtccataatgttattttttagtttgaagtaattgattagacatatttgagatgatacagaactttgcaaataagaaataataccttttttactggctcgtaaagtttcaccttttgctctgcttttatttctttcttagatcattgccgcggatatttccttcatgttattcttgaacttatatatgttcgatgttgtttgattatagtattttacaatttcattgagtgatttgtcttccaaatatatttttgtcttgaaggattaacatagtgtggccttctaaaaagatattatttactgaagtagtgttggcagttgtatgtcaattttcaaaagcatttatgatctgacaagctatttttattaaatcagctcttttcaagaggtcaactgttcccacatttaaatcttatggaattgtccaagcacgtatatcagacactgcatcagaaacattttcagctattcgtactgtgagtattttttcgtcagaattgtatacttccttgtaatacttgcattaatagattttatctctttattctgttaaataccagtccacatacttgggggttatccttattttagtcaaaaatacatttgcaggttaggtcatttgggggtgaaaaacgacaaatttctatgtttgacaatttggtaagtcttatggcctttcacctatgcacttctcgggccatccattagaatattactctcattgttcatttctctattacgtagaaggaaatgtgtcattctaccaatcgttatttatattaactggagatttgtaaaactccacattaatcctaggaggtaaaacgatgataaatccccactatgtaaaataaaagggtagatatgcccacattaattggaaaaagagagagagagaacatcatatccatccaagttattgcacagacatcatgaagcgttaatttgacttatgtgttattgtagtattgtactggtccccatataatgtgttgaaaaatgtccaagtctttatctgatttggatttggcagattctggaatgaaggccacatgtctaacatacactaatagaaaagcatttgtaaagtagctaactatgttattttctttcctacaatttagtctactatatatgttatagacacaatacaagaaagggttacacatttgttcttgagggctaaatttttttatatcaattggtggaaaagagagatttacatcgtcttttgttgtgagcccaaattataactatgcatatttcatgttagattaataataatgaattccatgttttgctcagctaataatactaacctataccaaaaagtcaaatagtttacaacaaaatcagactactttatgtatttgagtagagttatgatgggtggctctaaattctctaaacctgtttggtttgctctccatgcatagtcacatatccacaagcttgataatagtttctttttatgttttttcaacatattttcttcaaatttttaaacaaactcttcaaatacctcttattaaaaataaatcttttggcagctttgctagcaaatgtttacatgctatgaaccatggtgtggcaacagtgacttgccacaccaacgtaagtgctgtgcccaaatccttgccaagccattgttttttaatccttggcattttatgtggccataaggttcagtctggaaataagtttcaagagggttttgacaattacattcaaaaaaagtacaaaaagtaataaaaatttgatgatacttatcagtcatgacctgcacttactacacccatgaatcgatgcacaagctgtagtgccgcaccacgatccagtaaggcatgatgtggcataacttggcatggttgctaagtgcttgctagctgtgttgtctgaccatggtaatgcgtgccgctgccaatttgtgcttactataaaaggatcttgaaactgtagatttaatgccataaaaatttaatgcatcttgtctatcaaatcctgttagacaagataaggtaaaacaactatattacaaaggttcatgcctttgtggatgtgatcttaccctgtgagagcttatatatataattgtatgaacccatgctctaaaatggtggtaagtagtaaccaaactttcaccccacctcttaacacttaaagctatgttaatcatttgagttttgtaaaaaagtgggagcattatattttgaaggaaaagaaggtaatatttgtagcttctacattgccttcgatatcttgttaattcaagtttttgtttggcaggcacttgctttccagaatagtggcacaaaactaggcgtgctgaaatctgccaacgagtcattgactcgggtggtagtctatgtttccctaatggcactttatgttcttggtggaagcaaggttaatgcggtaagcctctgaattgcttggagtgtgatatttacgtgtaacctcattttctaaagctgcaacacatttcatgtagtttggttctgccatagaataagttccatgttatcctgtaaaacatcctgatagtttttacaagtacaaaaccgggggggggggggggg

SEQ ID NO: 23980 - DNA, 2836 bp, Oryza sativa
ctattctataaagcataatggccgtgtgaagtgtcctgaagtatttccttgtacaatgtagaatgatctacactttgatagatgtcccatcccaccatacatggaaatcttaaaagatgcatgaacagttctttagatgtacaagtgtgactcatacaacagcactgaacccctggacaatggctatccaatgctgaaatttgcatagatattttgttgcttctgggttctggccaattccatggaacttaggtgccctctagtttctccctatgcgcaacactaggtcagctgcagcccggaagccctttaccatgtgaatttgtgctatatgtattgaataaaatattgttaacacttctggcagcaaacataaccacagctgtaggattaaggacctgcctaaagcttctcttcctttttgcccgtaacttttgtttaagaaaataataaaaccacttcagcttttagatctagcatgtgttatacaagaattaccctcaatttgtaccattgatattcagtatctacaagtaaactaattcacatcagatacatcatccaaatatttcagtatcaatactaaaaattgattctcttgtatgcgccggtgctctcgagttgaatatctatagaagttctcattttatttaggacctcaattttaactgttggaaacacattttatgcctatcaaaagaccacatgcatgcaaccatgtcaattttactaacctgtatggtcatttagatatttaataatcatttgtcttgtcattgaaatctgaaaatatgatacacatgtatttcagggaaaattgtctgttggaaccatggcatcttttattggttacacattcacactgacattcgctgtaagtatcagattttacttattgcatgactttttgtagcttgatgtgtttattgtattttggtcatcttacttgtcagaacatgcattttaggttcaaggagctgttaatactcttggtgatctacgtgggacatttgcttctgtagaaagaataaattctattctatcagcagaggacattgatgattcacttgcatatggtttagccaaagaactagaagattcaaatggtgcagtgcacgaaaatggcactgctaacaaacattacatgtcagcactaaaatcatcaagcagctgtagtaatcttgcctggtctggtgacattcacctagaaggtctgctcgccactattcatatttgttttatacatgcagttctttttccatttcaaaatatttttatgcatatgcatatttctttcatactataatcttctatacaataatttttcttaagtaatttgtctctagttccactaggcaagatgaagaagttcagaactgggatgccaaaaagagccaatttgcatctcacataataggttaatttccttttgtatcataaaaactactagattaagacaacaaaggggacactctcctcttcaaatgttgctggagtcatatcacttgcttgcctaaactacatttgttttagcttatgtagcatttacatggataagtttatgtcgatgtggcatccatgtagacaaataactcagcaaagctcaatgatataaaatagctctggctgtcagctatctcagccaaaactcatggggctttactttggtactgcctacacccagttagctctgcacttgaaaagccaaatcagccactgaactcttttgtgtcagttgcccctgtttgatttttctattcatgaagctttcatcttccttgaatattgattcatgcaaatgcgtagcgccatgacagagcaaccagagtaggcaggtctagtctgtgagcctcaagacaactccactcatgtacatgtcacaggggcagggtagtatggggttgtggtggctggtagttttgagctatagagcataaggcaaggacatcaagcagtcgcactgaagctctaatgtttgtgcagaaggggcacaaagtaggtagccttgctatgtccaatgagaactagctagtatttctgaattgtaaacgtccaggcaacaggttgtttagcgtggaaacaagctcctccagtgcctaatatctaagtaagaagaaaactccatgaaaagcaagaacgaaaacaaattgagctgtatgaagcataaaagtccacatctttattatcaaagacagaaatttgtcaacaccttcatgtggtgtagctcaaagttgctgaagccaagcaattttgcaaatgatggctcgagacatgcactgtaccaggatgaggcaacaagtgaggtgtagatagaaaagagggatgtatatcagtgtggagattattatgtcttaagatataatttcatctttgaatgtatcggtactttttttgtgtccattttccttgtgttttgccttttttgtgtgaaagcctaacataagaggtgtttccaagagacacttaaatgaataatgaagtgcacacttatgaacattggcctttttgtgtaaatctctaacttatatagatgtttccaagatgtacttcaatgaataataaagtgtgtagttatgaactctatttactaaaaaaacagaaaatatgattaactagattattcttggaccattggcatgcaactgatgctcatctatattttggcaggtgtccacttttcttacccactgagatctgatgtggagatcttaaatgggcttgatcttacaattgagtgtggaaaaattacagcacttgttggacctagtggtgctggaaaaagcacagtggtgcaacttcttgcacggtactatgagtacttctgtgtatccacatt

SEQ ID NO: 23981 - DNA, 1348 bp, Oryza sativa
atggtctcgagttgtatccttagtgaatcaggtatagtggtacattatctgtctttttataccacgtatcatcctcctgtcctacatattaattgaggtacacaagttttagtttctctggtaaagtagcatttggaatagtattttgttctggtgatattcattatgtggttgtaagttcatgtgagaagggggaacacaatatattgtacccagtcttttggtttgccattaattattctgattaggtatagagaacagctctgttagtgggatgtgtgggactgtcatctctagcatataggtttcagtccttttatttagaacttgggtgcttgatcttttattcattttgatgcaaaatttatcatggaatgaaagatgattccacttttctttaattatattattttggtatgaaaatttcaggaccctgtcctattctcagtttctgtcggagaaaacatcgcttatggtcttccggatgatgttgtttccaaggatgagataataaaggccgctaaagctgccaatgctcatgaattcattgtctctcttccacaggttgaaacaatatttgtcatacattttagttgtagttcctggtgtccaaatgatatgagatatgacagtagtttgattctcataatttgtttgggatttagggctatgacacacttgttggtgaacgtggcagcctcctaagtgggggacagagacaggtaatttgctactccctccaattggacacattggtataggaacaagatctgttgtactttctaaacttggctatcaatatcttggactggaccgttgaaagtgatacatgtggattgttctgaaaatctcttttataatactgtaaatttattactctatgtagatatataacagtggaagtttgtagttttcttgggcactatgtcagtgtcccaaatatcactcactttgtgacttgaggataccttaacatgtaaacactctctttgaccatatatgttcacttggggtccatatgctcaaggtttcaaaatattgtccctgggtatatgttaaaatatataaactcacaatacaaaaacagtattgttggatttgttttagaaaatacattcattgtttgttatcattactactttacaattattttgttgttttgcagagaattgctattgctcgtgctcttctgaaaaactctcctattctaatacttgatgaggtatgtcctacaaaaagttcgcaattttgttgttagttactattcaacgtgtcttatatcatacctactttttactgtgatgtcttataccctacatagctatacaacattttatcttgataggag

SEQ ID NO: 23982 - DNA, 1584 bp, Oryza sativa
gaaaaacatgtttttggttcaattgagttgctagtttagttagggtttcaagtttagtcgagatttttgtaaggagtgctgttgttgcactttgtaaacacagagagaagtaataaagttgtcatctactttgagagttcttcgatttgtgtttcatcgggtgctgcggtccaaccggcgacccaacggcggtccgaccggcgacaagcggcgatcagactggcggcatacgggcggtcagaccggcggcggcgacagcaagtggcagctgatctcggaggtcggaccggagattgaatctcggtcagaccgacggcaactaggcggttacaccggtgcatctacttcggtcagaccgtgatccatcgatttcgagggtaacttttatttccgctaaaagttttcggtttttgggtatatcaaccattcacccccctctggttggcttagttcttgtgattcgatcctacaggtactaattcttggaaatgtttggcaaattgctattctactgatattgaggtgattaggtgaaaacatgacacttctacactgttgacggtcgttttagaccaatttcaaccatcaatataaccggaataaaggagaactatcaatgcttgcaagcatattttgtttaagaataaactatatccacttgtacttggaattttattcgtttgcagagagctctacatattcgaaggataatcgacagaaaataactgaacaatcgatcgccgtccgtcgagagatagacgtatgggtggatgggcttacaaactagtaaaataacatcaaataggcctaaccatcatcacggagaataaatcccaacaaaagacgcgcctgccaaaagtggaggccggataggccagcccaggttcggccgaaccctagccgcggccactcatcccggccttccatgtggatgctccaaatgcactctcaatgatggttggagggcgtttccaccatttccaactgccataaccgtcattgagagactatataaaggggtgctcattcactctcccatacacactcaagaagaagacaaaagaagctctctgaagtttagtttagtgtattagtgctagtggagtaggaatataatagttttcttaatcctcgagtcttcaggagattttgagtatggctccagcaactcttccttctattgtaagacttatagtattaatgaaatattcttttttatataatttcggtcttttacttaagtcatattattcgagtaccgactttagttcgtacttgtctcgatataattgtgtaactagcttatcagagatatgctttggtatgggtttaatgtttatttctatgattattgtatgtttgctgcagcgatatggagtaatatttagtaatgtgagcatggtgcttagattattacatacgattaattggggttatatgcagtgggtcagtacaggtgggccgctgatggagacagctcagtatgggtattcctccatgtagtatatacccctaaggctgtgtccggcacacccttttcctaactcctcttcctcgtttttcacgcgcacgcttttcaaactg

SEQ ID NO: 23983 - DNA, 45029 bp, Oryza sativa
  unsure (1)..(45029): unsure at all n locations
agctggttttatgttggcaaataaaatgggacagtgattaaggttagtgcaaacgacgatgacatgtagtacttcattttacaggttgaggcataggtgttttttttttttggcaaaaatacctgtgtcatatagctggttttggacaccaattctgtggttgtatgtgtttaatagtgtgcccgtgcattgcaacgggaaaactaatcattaatcagggttcagttttcgtgatatgaaggggatattttcatctttgtctttatataggagaaaaaattgcccatgatttatttatctcaattgcatcatgcacatcatggcaagaaataatgtctacctggaagctgcaacatggcagtcttattatagtactaacctaaaaattatataaagatcaaataagtaggcgtcaccgaaaaatgatctggtgaaatggtgatgtcaaaatcagtaggcttctatttagaaaatgtggctacattccaaagttgcatgaattccagtttgcttcatccagatagaccacttaacttaatttacgaaaattgagtgactgaatttgaccgactcaaagcttatcaaacgtactgagtgggagaggaatacaatttacttaattcagaagaccggtttattgtggtgagcagcttttgttttcttatttactatttcaaccatgcttaattgtatttgttaatcttccagcagtgcactatattttgcaatttcagtaccctattaagtagcacaccatttcagtactcgttagtcttccagcagtgcacattatttttcaatttcagatgttagctttaaattgacatgtgttagctctaaattgacattattcgacaacttccagtactaaagtcttgctctgaattcacatgtgttatctataaatttcagatgtttcatatagattgtccttgggatactgtcgaaacaagatttcggcaataataaaagggggtggctatcaagttaggaaagtggatgggtttggagacaaagaattttatacaggttcaggccttcttattcaagaagtaataccctattcctgtccggggatgattccgccgagtatgttattgattgtataaactgggaaaaaagaatcgcgccctaagaggcacacggaccctccttatataggggaaggagtccgctttacaaaatacagtccatatcctaacggaatatgggattacagataaaatacaatcgtaaccgactaggatcccgggtattttcttgacatacaagtttagaatctaacccgagtactcatagagatattctatctatatttggtaccatatatccgactaaattataactgtcgtgtagatatggggtatccataatctccacagtagcccccgaaaccttcgcagttgacagtaatagccttctcgaaacaaaaaacagtaatccgagtgcttcaattcaacttgccgagtgctaaaatcaaagactacgaagggcaaaaataaaacatggtgcatcgagtagatgcacctaattaggtgtagcccctgactatgtgattagttgaaaaaactaaacatatagtcaagaaccgagtggttatatagcgaagcacgcatggtacttagtaagatacccagccgactgcttctcaacttgaacataccaagaacaaaaatacaagaagggccgagtgataaacactcaaaggtccaaaaataggcatatttgataggaatctgagtaagaaactcgtaaaatgatccaccaaatatgataaagatcatggcaattaggaagtttaatagcctaggctataacccttaccataatcaaaataagcatataacatgctaggagaatgactactaataaatcagtcatctcaaattaacccaacagcttttgtagcctaaaaaagcttacaaaaatagtataacacctttctgtcgggtacctttttatgtgcatcataataattccaaagaattattgaattgcgttaaaaaagattttaacagcatcgggtcacatcattgtgagcacatattgccaaagcaaaaagcgcttaagtccctagggatcacaacgggccacgctgaaaacaaaattgggctgaagtaccgtacaggcccaggcccattagtactcccgataccctaaaaacaccgaagtccaaacgtcatttcgtcttccccgccgagactctcgccattccccgctccatgctacagtacagaaccgcgccgacgaagttagggttcatcaatctgctccaatcctccctcaaaaacttcacaaaatttctccccgcgtccaccgctccaattccccattccactctagccatatctcggaccaaattaaaccatccagttacattcatggcggaagaaagagaaagcttcgagagtcagtgggcgccctccgatgtaacagaagataatctgaaggaaatggtggcgcacagcgttcttccggcgaaggaaatcatcgggtggcgaccggcgttcggcgaagcattcccgacccccgacacgcacgaaatcgtggtatttgctcatttcttctacgacggattttctcttccaacctcaagattcttccgggggattctgaacttctacgggattagcttgcatcatctgaatccaaactccatagtgcatatcgccaattttgttcatgcctgcgaagcttttctgggcattaggcctcatttcgccttattccgccgaatcttcttcctcaagccccaaccgaataagagcaaaccatgtgtggttgggggcgctggtttccaactcagaggaacactgagccaaaagtatttctctatgcccttcaagacctcacacaaaggctggcacgcaaactggttttacgtccaaaatcctgaacccgcacttcccgagtattcctgtcttcctccggtttaccaggacacatggaactcattgcctatgggagatgaagctgctcaggcagtggaattgatggaacgcatgctaaaactgaaggaacaaggtttgcagggagaacagatcactcgacacttcatcaaaagtcgattagctccaatcaaagagagatcccgcacggcttttgagtttgacggcaagcatgatccaaatcaggaagatccagattctcttgactttaaggtcatgaaagaaagaactgtacaagatcttctcaaacgctattgttgtcagctattcacatctgctgcccattgtgccattcaatgcattcaaccctcctccaccggtatgcattcaaacatttcaacgcttcctcaaaagtatgcttttgtcctctattaagctaattgaaaattcaaaatatcatgcccaggaatttgccttgatgaaatcggatcctccaattgctcaacgccgatcaccttgccagcagactggtcaggcgagtggaggaccaaaaattcggtctgacgctcaaccaagtgcttccgatccagtcggccagtcagattcttgcaagaggaagctagttctaagcgacgacgaaggcgatgataccggaaggctcggagacaaaggagcgaccggaaaacccccgaagccaactaatccgaagaagaaaacctccagtcgtcctttgccaaaaatcagaaaatcttccaggtacaaatcatttggccatcttccttgtcttgcagcttacccgctgttgaaataatactaacaacataactcaaattcgtaggaagccgtctgacatagatccttctgaaaaagaccctgagccggctgacatagaggcaaacccttcaaaagaaaccgggccaactgcagaggattgcccgagtgacaaacaaccggcaaccgacaatgtagaacccagcaacgagcccccgactgcgaaccagtcggccgaagctgaagttggcgctaaccaggagcccccgactggaaaccagtcggatgtagggtcaagccaaaagattcccgaggttgaagctcaaacgaacaggcctctcgggaaggatgctgacagtgaatcagaaaccagatctcctgtgaagacaccaaagtccactcgtccccgaccgggaatcatcacaggtagacacgctatctgaaatcattttgatccaacagactttatttgaccgcttcatcttcattcatggatacactagggccaataattggtgatgaagaagaaatcctccggatacaagcagctgaggattcacgccctcctattctggtcaagtggtgggatgacaacatgcagcctcaagggatcgtgataaataagcaaaaagaggacgaagagttatgcctactgaaggaggcacttggtcaggcaacctgcattgtaaatgtaagctctctggcacctgatctcaaccatcttgtttgccatttaattcatgcgctaattaaactgtcttgcagaggattcatcttaggaacgaagccaaaacggtaaccttagagaggttagtccctcatctcggaaccctcgaagccaccaggaatcaactgcacgaagcaaaagaacttgctaggaagaatgaacatgatctgagggatcggattgctgagctccaggaatcaaattttgaactgagtggctcgtcaaaaggtatgcacaaactctgctcaactgactcatactgttatctttgcaatcttgattaaccgtgatcaatgtagtgcaagctgccaagatatctcagttagagaagcagatttaaactctggagaatgacaaggcagagctagcaagacaaaaagacttggctttaaaggaagttgaaggtatcaacaatcaatacctcaaaagccattatcctccaaatgctgactcattaatgtgaatctgttgatacagaccgcaatatcaagtctcaagctcaattcgacgtcctggttggcaagatcaaaaaacttgaaggagcccgagatgaggttgctaacgctgctgccccaattgttcaagcgatgttcttcaataacaacggcccgagtgcacttgatgcttctgaaatcttcgacaagctgagagttgctccagatacatatttcaagagcatcaaagaggttagaagtatgggagcaagtctggcgtgcgatgaccaaatctctttatccgagggttgacgttgacgccattgatggctttgcagacgggacgagcgaagaagctgctcttgacctcatcagcgatgcacaaaaatctgctgataagatagcagttgatgtagttgagagatttcaggacaccgatcttcgaccgactggtcctgataattctgataatgaaaagactgatattgattaatataccaatgattttgatgattaatgatgatggaggcacaatttgtacaatactgatgaatttatgttgtgcttgatatctcaacttagttcctgatttcttaaaagtttttgtcaaaccttgttgagcctaaaacccgcaaaagttgttaaaaaactttcagtcctcattgactaagccaagaaatcaaacagggcaatgatacatcaagtaagcaaattgaattgataaaaaatcacactccattattattatagtagcccctcgactgaaaacttcaaggaaaaacttgaagttagcagtcaaagaggaaagatacaaacgaaatgcctaagcataaaatcgacgaaggtgttcaatattccaagaattgttgatgagagtaccatcttcgtgcttgagtcgataagaacctggccgagtgactccagcaattatgaacggtccttcccataagggagataatttatgccgatcctgtgtggtttgaattttcctcagaaccaggtcgccgactaaaaaggctcgcgatcgaacattctgattatgataacggcgcaaccctcgcaaataccgagtcgactgaattaaagctacttcacgggcttcttctagtcgattgatgtcatctactcggccctcttcatagcgctcctcgttgaagttccgaaatcatagtgattcaaattccacttcactcagcaacattgcttctgcaccataaaccaaaaagaacggcgactggccggtagcccgactgggagtagtgcgtaaagaccaaagtacggacggcagctgatctacccacttgccagcatagggacgtagtcggtcgaacagtcgtgcttttatcccttgaagtaccatgccattggcgcgctcaacttgtccattactcatggggtgtgccacggaggcataacaaattttaatgccaaagtcttcacaaaagtctttaaatgctccgccagtgaattgagtgccattattagtgatgatccgattaggtaccccaaaccgatgcacaatgttgatgaaaaaatctctagctttatctgctgtgatcgtgatgaccggtttagcctcaatccacttggagaatttgtcgatagccacaaagagatgcgtgtacccgccgactgcccttttaaacgggccgaccatgtcaagcccccagaccgcaaacggccaggacaacgggatggtttacaactcttgggctggcagatgaatttgtctggcaaaaaattgacaaccttcgcatgtccgcacaatcttgtcagcgtcagacacagctgtaggccagaaaaaaccttgccggtaagctttgccgacaatagtccgtgtagcagcatgattaccacaaatactagaatgtatatccttcaacaattgtctcccttcttccaaagacacgcagcgctgcagtattcctgatggacttttcttgtacaactccgtcttatgaataatgtaaagtctgctgcgcctggaaatccgctcggcttcatttttatcttgaggtagttcttgtttgctcaaaaattttatgtgaggttctctccaatcggtttcgattatgcttacgccttgagtatccatggctccgattgtttcttttctgggtacggttggttcgtaaagatgttcgacgaacacatcagaaggggctgcctcccgtttggaaccaaaattggccagtctgtcagcttcctcattgttatgtcggaggatatgggtgagctcgagtccatcgaatttatcttccaacttgcgtacctcttgttgataagagatcatattatcatctagacatgaccactctttcatgacttgattgacaaccaactaagagtctccacggacaattagtcggcgaatacctagagatattgcaatccttagtccatggagtagcgcctcgtattccgccatgttatgggacgcagaaaaatgtatccacaatacgtagctcaatctttctccagtcggggagattaaaacaaccccagctccagtgcctataagcctcttcgacccatcaaaatgcatagtccaatattccatcttttcctctggcatgtcttcttggcactcggtccactcggcaaggaaatcagctaaagcttgtgacttgatcgaagttcgtggcttgaacgatatgtcaaaagacatcaattctaaggcctatttcgcgatccgtccatttgcttcgcggttatgaagtatatccccgagtggaaacgatgtgactaccgtgaccgggtgactttgaaagtagcgagataatttcctgatggtaatcaagacaccatatagtaacttttgaacctaaggatatcttgtcttggaattggctaaaacctcgctaacgaaataaattggacgttggactttttgaatatggccttcctcttcacgctcgacaaccaggaccgtactcacaacctgggaggtcgccgacacatataacagtagcggctcttgcggatgtggcgaggccaaaactggtggagtggtgagaagtttcttgaagtcttcaaaggctttctgtgcttcgggtccccactggaaattgtcagtcttcttcaacagcttgaagaagggcatcccccgctcgccgagtcgtgagacgaaccggctgagcgccaccatgcaaccagtcagcttttggacgtctttttgggagcttggcggtttcatgttgaggatggcgttgattttctccgggttggcctgtatgcctctttgagataccataaatccaagcaatttccctgacggtactccgaagatgcacttttccgggtttagtttcatcttgaaagcacgaatgcttgtaaaagtttcttctaaatccacaatcaggtcatccttctgcttggtcttgacgactacatcatcaacataagcttcaacattgcgaccgatctgagttgaaaaacatctttgaatcatgcgttgataggtcgctcctgcattcttcaatccaaagggcatagtgatgtagcagtaggccccaaagggcataataaacgaggtcttcaagcagtcggattcttttagtcggatctgatgatatcccgagtaacagtccaagaagctgagtaactcgcagctggccgttgagtcaaccacctggttaatgcgaggtaacccaaaagggtctttgggacaggatttgttgaggtcggtataatcgacacacatgcgccattgccccgtctttttccgaaccaggactggattagccagccagtcgggatgaaggacttccttaatgaagcctgctgctaacagcttggttaattcctccttgattgcatccttcctgtcctgtgcaaaacggcggagtcgttgcttgatgggtttggcgtcttccttaacatgtaaagagtgctcaatcacctctctggggataccaggcatatcagatggtttccacgcaaaaatatctttattattctgaagaaaggtgatgagcgtgctttcctatttacaatctaactcagcgcctattacagcagtcttatcaggatcggagggatctaagggaatttttttcgtcttggcatcactttcttcggtcttcgttagcttggttgcgggcacttctccctcgcttgctgtggtcgcagccagtcggacctcttcgcgggcgagcgtagtctcgtgggtttgggccatctcgcaactttctttgtcacatgtgacggcctgcttgatgtcgctccgtagtgatatgactcctcgaggaccaggcatcttcatcatcatgtaggtgtagtgtgggacggccataaatttagccaaagccggtcatccaagtatagcatgatatgttgtctcgaaatcagcaacttcgaaacaaacattttctgtgcgaaaattctcccgagtgccgaaggtaactagaagagtgatctggccgagtggtgtagctgacaatcctgggataacaccgtggaagggtgcattactcggctttaattccgtgcgagggatctgcatatcgtccagggtcttagcgaaaaggatgttgagtgcgctgccaccgtcgatgagagtccgtcagagcttgacattgcgaaccactgggtctagtaccagggggtaccgcctcgggtggaccactcggtcgggatgatccgagcggtcgaacttaattgctatctctgaccaccgaagatattagggcgtgttaggctgaaccgcattgatctcccattctgttagcttctgctttctcttagattcataagctaggggtccgccgaagatgtgattgagttctttgcgatgatcttgaaaaccagtcggggcatcgtcttcatcatctttcttctttgatgtgccttgatctccgtttgagggcttacgtgcgttcttgacgtattgctccgcaaactgtttgttgacgaagcaatctttggccacgtggttggagttgggatgatgcggacattgggagttcattatcttgtcgaaggtgttgacgcgggaacgttgtcgggaagatggagaggttgtggccacaagttcttcgggcttacgcttgcggtccttgtggttgttacttccactccctcctccggtcggcgtatccttctttggtttccaagtggtgcccgactgcttggacaccgtaatagcatcttcggctttggcatactcgttggctttttcaaatatctgcttgactgtcttgggaggtttgcatccgaacttgccgactaggtcctcgtgtcgaatgcctttagtaaaggcggcgatgataacgtcgtcggtgatgtcggagatcttgttgccttgctcggagaagcgtcgaatgtaatctcgaagagattctccagacttctgaacgatattgtagagatcgaagtgtgtaccaggccgttcaaaagtgccttggaagttggcgatgaagtggtcgcgtagctctgcccatgatccgatcgtgccgcggggtagcccgtgaagccatgaccaggcagaatctgctagggccacaggcagatagttcgccatggctttgctgtctcctcttgctgcgcggattgcgagaccatagacggtgagccaagactcaaggttggtggtgccgtcatatttctcaattccagacggcttaaagccggctggccaatccactcgacgcaggtcgcttgtgaaggcagcaactccgtccacgtcgtcgtcatcgcgatctggtgaatgatggcctcttgctgcgtggcgctggttgatggtgtcgcgaagatcgatggggcgccttcgatgtggggagtgtggtcgttcaactcgacgctccctatatcattcgggaggcgaacgaacagaccgttcatcatgtcccctgctcctgcgactagatccggcgccggcaatgctgaggcttggctggtgatagtcttgagatcgaagatgagggactcggctaccagtcggggtgcgggtgcttgcggagttggctggaaccgaggcggcgatcatggtctttgtctggttcaagatgttgacaacatgatcagcttggttgagtgcgtcttccttgaggagggtgttgaggagagtgattgctgcaaccgtgttctgctggggggtgcgaaagaccgctgtcccatcgacgtcttgttgcccaatgagctctctcgctcgccgcccagattctaaggcgcgttgtcgtcgatcttcagcctcctttgcaatccgttcgcgatcttgttgctcacgctgtagtcgttctcgctcctgtcgctgtcgctcttcctctagtcggcgacgttcagcttcttgccgtgcacgatcttggtccgcttctcgggcttggcgctgttcctccgtttcgttgtcagccatgaatacgccgaagaagaggggcgtgtagttatcctcatagctgtcgtcgaagttgtcgaggtcgccgtggtcgtagtggtagccgaaatcgtcgtagtcgaggatctcggttggtcgagaactgacgccgggggagctgaggtagccatccaactcttccgtcgagactgtcccgaggggttggagtatgtcacatcctgaatttttgtttcaggatttataaattatttaataaattattattagaatttatattaaatgttcattaatttacaagtgaagttaaatgtgggaaataaaatttcctaaatttaaagcatggatggatttaatttttattaaattctccatggttaattatactctctggaatattctcggatttttcggagctcaattcctaatttttaatcttacaaagagcatttcagtaattacccacatattaaattaatcattaaatggtctaattgtaatttttttaagtactttgagtgtccaagtattttgaggatttttcttgaaattatttgagcattggaagtatttttaacaattcaaagatcatttaagtgattattttaattgggaaagtaataaaatcctcctcctcagcttgggccattttcggcccattccttcctttccttcctctctcttccgccggcccaacctgagccgcctcctctcctctcagcctagccggaaaagtctactttccctccctgagctactgttcatcttccaactcaggcagagcccgagccagccgtgccgtgcacagtgccgccgcctcttccttccaaatctcgcctccccgttgctctttttccaatttagttgaggggaaatattcctcttatcctcctctatctttaccccaaaaatcggagctaatcgttgagtatcttatccgaatcgagctcgttttcgagtttatctccaaaaccgagtttttgatttcccggatcgatttcttgcgggaggagtccgatctcttcaatccaaggctataaataggaccccctagtcctcctctttcgtttgccccctcccccgtggtctcccgtgcctcgtagcgccgccgccacgtgctccaccccgccgtcgtcgccggccgagctccatccgcgtcgcgccgccgcctccgtcgtcgccgccggtcgccgtcaccaccgttaggtgcgcgggagggtggacaagcccggccgcctgacccccgaagccgccgaccaccgcagccccgtcgccgccgtcgaccgaagccgcgccgccgctagacctcgtcgccggccgtcgtcgttcgccgtttggttcgagggtgggtaccgttgggttcgtctcgtcgtcctctacgtgttcttgtcctccaaagtcgcagccgaccatccaatctccggcgaggtcgccatcttggttcggccattgatgaggtcatcatcatgacgtcatcatcgtttttttctttttcctgtttttctaatagattaaatcttcggaaattcataactaaatcatcgtaactcggttttgagtggttcaagttgctaaattcatctaaaatcatgatctacatgtttgtttactttatatgtactgtttatttggtttttattagtctttttcttcgttttgcgtgttagtttgtcgtttccgtcgttgcgaaggttcgtgagtgcgccggaagtattcaagaagattaattgaagaccgattattgcaaggcaagtcacacagatcctaaacacaatcctttgagcatgttgatcctatatttaaattctctatttatttcaactgtgcatttattttcgaatgtcaccgggtggtgtgaacctattcctttgttatggccaatttgcattgattactttattccttgataccttgggtaacaaattgattagcttgaaccttatatattggtttggttcagctaaatgctatgtatatataattgcttagccatgcttagaaacattatcacataattgggataactaatgttacactatcacttatgattatatttaatggtagctcacgatgtttaatcgtgttatgataattaattgataactaaaacttgacaatggtgggttgtgagcacatggttttgaaggtcgtgctcatgacaattaaggaccggttcacgagctactgttgtgaaatattaaccgtaccaaccacaagccagcatgggcaacggctttaccttctgtatagcatgattcattgcggggcaccagactgagaagcggcgagaagtccgtgggggtcgctggggagtccatgcctctggttatatttatagagggggtgattatgatccaggaatggtgcactgtggtgagttgtgttgtgcaaagggtattgtcacagcctctattcgggtactttccagtatcgcgacgcatggtagacatgatgatgaggctgtgtcttgtgggtacagtggtacacctctggccagagtaaaactattcgaatagccgtgcccgcggttatgggcgggttgagcaatgtttttcgtgattagtctcacacctctcacaataattatggatgttatacctggtaataatttgcttagctcctggtttggagttagatctgtacagccgggtatggttgttcaggatggttgggcctgtgcagcatgggtgtgttgttcagtgttgattaaaatttttaattaattactctactgttttactactcttaactctttgctaaatgctgctttcgcaaatgagcctatattatgccatcctttggtatccttgtgcacttgcatatttgctgtgtggcttgttgagtatgtcatatgctcattcttgcaataatcaatcaacctcagttgaagataaaggatccagaaggagaagacgtttggcttataccccagttgagttgcctgtgggagtggagctgaagccatcgctagaccgttaattccgctgcagttttcttttcttttgaaagtatgtaacactattattgatgattctgtatattaaattgtcagtttgtgtacctcggctgattcctggacgaggattttatgcacaaataagttcggaaattactagtgaatttctgggcgtgacagagtataacgccaacctccctggatctagatcggatcggggccaaagccggagctcgcctagatcttcgagtgggagatgtcttgactgtgaagacagcggccaagtcatcatgaagtttcatcaggattgagggataggacccgtcgtcttgatctggtcgcggaagagtagattggatctcgtccgagtggtttgaagccgactcgggagagatgatcttggagtaggcctcgaccgagttcggaataccgaacggcacgggggcctggtctctccccgactggtttgaatccgagtcaaggagagagatcttgccgaagtcgttggtgatgaagttgaggctgccgaacttgaatgcctgctcgggagggaaggcgaagtcgtcgatgccagagacggaacccatcgcacttagtcggcaaaaaacttgacgctaccctacctggcgcgccaactgtcgaaacaagatttcggcaataataaaagggggtggctatcaagttaggaaagtggatgggttcggagacaaagaattttatacaggttcaggccttcttattcaagaagtaataccctactcctgtccggggatgattccgccgagtatgttattgattgtataaactgggaaaaaagaatcgcgccccaagaggcacatggaccctccttatataggggaaggagtccgctttacaaaatacagtacatatcctaacggaatatgggattacacataaaatacaatcgtaaccgactaggatcccgggtattttcttgacatataagtttagaattaacccgagtactcatagagatattatatctatatttggtaccatatatccgactaaattataactgtcgtgtagatatggggtatccataatctccacagatactaacagcaacgaaccttgttgtttctatggaaagttgacactttttattttattttttgatgcatttatgacgatcaaatcccgtgcactgaacgttagaacttagaaccattcagtgccttgttacgaacagaggtggtgcaatgcatgacatgatctgcacttttatcactgaaattgaggtctgaatgttttaggtctggagttgagtttgagttttgaatcacagttcagtgacttcagtcctgatgatattttcccaatccatacatgttgtattccttgcatcactagccatcatagcagaagggaatgagtaactataattttggttgcggcaagtatttctgaaagaacctgttaccctgaataggatttaagtgtacagcttaattaggtagaaaagatacagaatgctgtttagtactccttacttgaaggcctttgacgaagccatgtccatatggtcaaatgtcatctgtaatatttcaaattcaggatggtgtgggatgatgagcttcatattttaaatttcctttttatcccagaaatacttttatgttatttgttaggtttaatatggccaaatttaaaatatgaggtttttagccctgcacttcttaacctgaacactcttggatatgcatagaatcttgtactaactttctccattgcaactgaaacactcagtttttttagcagataagcattacgttgtgaaaaactgaaaagattacaggtatttatggtaaagtagaaacctaaaataagatggaggaaggcgaccagtacaggttagtgccaaataaagggagtatgcaatggccaccagtaaggtagtaacaaattaaatgttcaccagcaggataaggactaatatcttatattcgcgcaaaaaggactaatatcttatactattttgttgggttgcattaaataaaggttagtctttgggtaatgaaatgttttctggttaacattcagttattaatatgtcaaacatgctggtctgtgaatgggatggaaaaccctggttgattcttttacaacttattatgtttttaatatgattgtagaaacttgtactaaatttttgtaccgcttgctgattgataatctctattggacactacaaaatagacgcgccagttgggtcggtaaatgattttcacacaatttaagttcgtatgaaattttccctatatctccccttttattcatatgaaaagatagaaaaaaataataggattgtattcctgcgctttgcttttataggaaaaataacaaggggtatgatctcttgctaaactttcatttctttttcttatggtactatcaaagtgttcctatcctgtttcttgtgtttttattcccgtatgattggagaagcatgccacttcaaatcttccgttttacccatttcccttttttttctaccatgtgaatcttagaacatagaattttgcaaaaaaaaaaatctatgttcaaatggatcattaaaaaattggtgcatatctacagttactcaagtactacctcaggttataaaactttctagcattgctcacgtttaactttttgccacttttaagatgtggcaattaattatttgccactcgtgttctttgacatgtgggccctcatatgtcaatgacatgcgggtccagtgacaaatactttatcaccactcgtaagagtggcaaattcttaattattccttattctacataggcatcaaatgctttgtttttgtacttgtttacacccgcaacaaattaatgaaataactcatttactttttaaacatacttttaaacgtatattgccctctatattgtatactaagtgattatgtaatcaattctggtccagatttattgtgcctatataatatcatattattgtactttttgtgaaatatatttgattaaggcatgcattgaattaaagcttaattgtacatatcataaaaaaaattgctaacatgaaattttaaatgttaataaagataaatagaatagtcccgtagcgtatagcacgggcatattactagtcaaagttagtacgagatttaaaaggtatcacggatctgaacagagttcttatacagatttttagcactagatacgttatattttgtagtattagatttgttttgatggaaggttatcatcaaactaataggataagtcctataaaaaacttaattaggagtagcaacatgttaatggagcacgttggcttttcgattccaagatctgaaatattttactactccctccgtttcaggttacaatactttctagcatgatgttaatgaatctaggtatgcaacatctatatgaatgtccctgaaaaaaaaacatccatatgaatatgggcaatactagaaagtcttataaatgaaacagaggtagtagtatttcacgttattgtcactcctagaaaacagattttcctgaaaactcccattttcccagacggaccgttttcgcgtgcatctacgaaaaatcggcctcccattttcgcgtgcagatccttaataggcccgcacgtgaaaatcgtgtgggcctcttaagtggaccgcacacgaaaatacctctccctcttttccctctcactcacttcaaaattttcaccttctctcttcctttttccttttattctccctcaatcactcatctctcccttcttttcctctcctctcctcccctcccctcccctccccaccgagcgcacggggtgtgggaggcgcccggctcgctgctgccgccaacgaggcggcgaacggaagcaggcgggaggcggcacggcgagcgaccggccggatctgcgccacgccaatgacgaggaggaggaggcgcccgggagcagtgacggcggccgatcgcggtggcggtcgggatcggatggctcggaagcggcgcggtcgggagcggcggtggcacaatgacggcgatgacaaggacgacggtggccacatgcggcagcagccggcgattctagggttagggtcgttagggttttggattttttggattttattttttttcgtttttttgcgtgcaggcggtataatttgaccgtaggggataatcgatcatcttgtacggtccacttaacccgactgcacgggaagatggattatcccgtgcggttgggccacccgcacgcgaaaatatggattttcgcagacacctaggtgcagctaggcgggacctccgtacggaaaaatgcattttgaccgcacggaaaaatattttgtgtatgtgtactagtgtgtagtacggcatgagtatcacttgctctgttattaggagacatttcagattttaaatagactagcaaagtgttcgtgcgttgctactggaaaagttacaatatatcatatctagctagagaaacgtgaaaggcaaataagactacgataaaattaagtgagaggactggagagacttaaattagtaactacacctcactcatttagctacttacgtcaaactacacatgaaatatctatagtcaaataaatcgataaccgatccgaaacaagagttagagctattgattttttttttgaaattatagacctttgtcataggttggatttgaaattaagacttgacactatttggacgacgcagagagcgtaaaggaagtcgttttgaacagcgacacggtctccaaaacacaactttgatttcttgtttctataaaaatatttattgaaaaatgatatatgtatacttttatgaaagtatttttcaagacaaatatattcatataatttttatattttcaaacacaataacttgagagttatttatgatttatattcctaaggtttaacttaaatattattctaaatgattttcttaacgagtacagagagtagtttggttgaaccaatttaaatcttatggatagatgcatagaaactttctctcgcctcgattatcgtatggacgatatgatagtcgagactcgagagtacatcacgggctcgcggtgattagctttggctgcttggtgggagcaatgagctaggtggcgagaggagtttaggtcacgatgaggcttttatttggcagactcagctcaaggaaagttttgtgggctgtgggcatcctagctatttgatcagcaccgatgcggtcgatctttggatggatgttgtctctaccaatggacaaaaaaaattcttgaaacttatcaaatcaaattgtgatcacgaattggatatatacgtgcagaaaaacttgacccaaactgatttagtaacgcacggaggactcccgcgggactcgggaagtacgtcaatgcgtgcgtgaaaaaacccaaaaagcacatcaccgaaaaaccgatacgaagaagaaattgatgaacgaagaaaacaaatttcgctcttcatagagataggatatatagaacattgcggggtgtcgaagaggtttttttccgggacgacttttttttcctggaatcagattttaaacgttgagcgaaatgattttttttcgcgaacctttttttaggctgcgttttttcttgccattttttttcctcgaatcggattgctcttttttctcgttgcgtggaaccggatttttgtttctcgcgttacgttgtgccaaactttttctcatggaatcataggaaaatgcttacggtcgaacgtccgatccagctaaaaagatcggaccagacgcaccgtataacacttgccccaaattacaaccaacatacatgtcgtttctttttcaacaaccaatgcatttctctctttcatcagtcagctgacatactacttattgttcatgcatgtagctatttaacaagcttcaaatgtttttttccaaataaccatatattaaaactgtgattcgattacactattatatttattgtagttaaatctttataacaagatacgatatgactatattccaatcaaaacattttttgtagcaataaatctttgtttatgtttcaattattttatttagatgtttcaataagtatttcgtaatgtttcactagtttatttgtaaatatcacatagcatgttttaagaatgttttagttggtaatttgtgatgtttcaatgcttatagcgtgatatttcagacgtggtataaaaagtattaggtatttgtaaaatataatacatgttgcatatgatattttttctatgtttcattcattatgactcaaagtttcatatattcattgatggtgttgcggtctgtatattattaaatgttgcatcttctggaacatttcatgtaatgagtagaacaatgaaacatatttttggtgaaacaatatcccattgtttgacaaatattttttcatcctttttaaatttttttatggacacgtctttttgtttttgctggattttttttattgtgacacggtattttttcccgtggtgtagaaatcgaatgatttttttctgcattttttgggattctttttttccggcttatttttcgttgcctaccaatgagacgtttttttcgctgtttttttattttctttacatatgcgttgttttgttttttcatggcttttttccgccactgttatttttgcgatgattacgaatcgtactttttttgctgttcttttggacggcgttttttttccttgtatttttaccgaacttttgtttcgccttttttttcgatggtgttttattatttggactgtctagccaacattcggctgataaaaaaaaacagcatgctgctctatagcaaatcccttattttttgcgtgactttttttccgctctctttttattatggacgacggaaatattttatactttttaagtaagtagaaaaaatgcctgtgcgttgaaacatgtgaattatattttaattttattatatttatacggtttagctaaatgaaattcatcgtcggaattcgcttagatatttttttagaaaatcatgagctgtaattaggcgtacgactttcatctcaagttagcatgcgagttttattacagagatttcttatacgacttcttttgcatttttaaaagtaaacgaagttaaaattcaactcaaacacggatatgtattttcaaaagcgaacgaatttaaaaaccgactcaaatacggttgacgtattaaaatactgacaaaaacatcttcaatttttataatagtagagatagagaacagacgtagagatttatgcatgagtacttcatcgtatatgcgtctaaatttgtaccgatagatagaccaaaacatcttaaaaaagctatatctattcgctccatcatataatataaagaattttgattttttcttgcactatttgactactcgtcttattaaaaaaaatttgtgcaaatataaaaaacaaaaagttgtgtttaaaatactttaaataataaagtaagtcacaaataaaataaataataattctatttttttataagacgaatagttaaatagtgtaagaaaaagttaaaatcttttatattatgggagtatcgaaggaaccacttgcggccaaatgtgggttaggtggtttcggtgtgcgcgccgcgcacccggctgccggcctgcgttgtcggccgctgctgtcccatgccccgttcccatgccgcgcccggtgacgacgcttggtggcgtcgtgaaacgcaaaggaaaatctcggtacagacagctcggcccagtactacaaaaacaatcaccaaatcgggcccggccacacataaaagcgtcctaataagctcgcgggcttagcacaaacaataacaatgttgatgttattatgctaccactaattaatgtcgcatgttaatatatatgcctttgtagtttgtcctcgtatatcaccaccacattttatatatattcgtctcgttggacaatcagtgtgctatgtgcatttgtgtgtgttgcacatgtttgacaacgatcgatcgcttgcacgcactgttcatcactgttgcgtgagaggatcagaggactcgaccaaaagggatgttccagctttggcaaccggctcacgtatcaagtgcgtcagaccatatctgtctcgtttcctttcctaacctttctttttttttccctgaagggtgtgctttctgtgaaatcagtagaggatgtaaaccatggttatattcttaatttctgtttggtattatcgtagattatgataatttcgaaccatgtgaaacaacttttatttaaaactatgttacatactactctccgtctacaaattttgtacagggactataatatttttatgatctctccataaaataaagaaaattatttcaggtacttcctcgaactgatcgcttggcgcatttaaaccctaaattttttggataattttaccctattctcggtaatccactttacttcttattgatatttctttttttcctccttaaatttgtatttaaagtttcagtttttttattccccctatctccgtgttgatgaggtgactcaaaaacgactcatgctttctctcggctgaccctttcctcctccagttctgacggctattagtcaccgattaggagggaggagcaaccgcggtcgggcttgttccgtggttggcttaatcttgtttccctttcttgttcaaattgaaggacttttcaatgtccacctccttcatcacggttgtggctagttgtggttggaacttccaaacttctctccggcatctaccatccggtcgaccgctaactactactaggcgtgccaccaatgcttgccacagagagagcagtatatgtgcaccagatttgatgtcagtcctccattttcacaagaagaaggttgtcccaaatgatatgaacttcttcaatgagttttcctcaatcgccttccccaagaggagagagctatgcagagaccgagggtggtcttagaatgattgtatcctcttgatgtaattatctaagatcgataaaactctctttgtcaaaaaaaaaaaaagaggagggagctattggtggcggagagaggtgcaaatatcatgtgaagggcaggctgaacgatggtgctagtcaaagtgacggaagtgggcagtgcactaggcggagatacatactttccatggtttattattggatgacaattttgtatggttctagcatcatagtttgactatgtaatctaggtagttcacaaatgatatctagaactaaaacttgcaatttgtgatattaataaagaggcaatggttttcgttaatctctattgagctttcatagctatttttcatgttaaactagggggattgccttgcgcaaaactgcagttttgcccgttgctagataattcacatagagtaagatttaatatgtaactccaaaattttatttatataggtaccattatatgtgaaattatatttgaatttcatatatgattcttaggttctatttttataagctctagatttcatatacaactcttaaattctatttctgcagatataattgtattttatatagaacaatatcaattgatctacacttttataatccgaacccaccatgatctaacacttaagatatttttctttttctccaaataattatgtgacaatttctggttttcaaaatgaacgtggtgccttctttcaagtcagtcttagtaaaatattataatagatagatactcccttcgtttcaggttataagacattttgactttggtcaaagtcaaattgctttaagtttgaccaagtttatagaaaaaagtaataacattttcaacccaacacaaatttattatgaaaatatattcaattattgatttgatgaaactaatttagtattataaatattactatatttgtctataaacttagtcaaacttgtaacagtttatcaaaacgtcttataacctgaaacggaggagcagatcataatgtccttatctgtccttatctaggcctaaagttcttcttagcagtaagtcttcagatggaggaaaaaaaaaacatcacgtagcaattttttttgccatgttttaggttcctctctgttcttctcatagattatcttgcaatgagacatttgccttttatttgaggtccaatttatgaggctcttggattgagggtttacttatgttcttttgccatattgtaagcatgtaagtgctggcgttaattacttatgttcctttggtcatatagctgcactatacatttctttcaaatccataattgtggtttgagtaaaatgcacctgcggtccttaaatttgtcagcaggtttcacttaggtncacnaacttgcatattgcacatccaagtccctaaacttggtttattgtatcatcccggtccaaagccgtgtttgaccgtggtcttgctatacgtggcacgccacatgaacgatgacatggaattgggttaaaaaaattctcccttcttccttcttttttcaccactgctacagcccctcccctcgtgccgcctctcaccaccgagaaaaaagaaggaagaaataaaaaaaagaaggaagaaggaagaaaaaaaaattccatgtcattgtccacgtggcgtgccacgtagacaagaccacagtcaaacgcggctttggatcgggataatacaataaaccaagtttagagaccttgatatgcactttgcaagttcgtggacctaagtgaaacctcctgacaagtttaaggaccgctggtgtattttactcttgtggttttatccatacgtgcttgtgctgcagtccattttgctggtgtagtgatattaggggggccatgcattagagttttggcttttaatttgtacgaaatatggtgaagaactttagatctctctctgtggagtattgtattagctgcaataatttcaaactttagggatctcaattcttgttttggcattagaaatttgaactgtgcacctgtcattttgctggtttcttttcctctcagggcaggaggatcatccccactgacaaccagaacacggcgtcagtatgcctgaccaatcaattaatgatggatgccactgacaaccggaccacggcgtcttcgacaccaccatgatttctgactggttattgggttaagcttcgttatgtcatctcctaatttttttatgtccatgtttgcttagagcaagtttaatagtatagccgactactaactctaattcatctatagctaatctaataactcattcatacaatagttacatactacactattaatacctggtcccacttatcatacacacagcgtgtcttagagtccgtgctacaactggctataaatttgtagtccgctgctcttctctctttttatttatctccttaaaatatgtttgcagctggcttatagtttgctattgtacctgctcttacgatggtttatcattctccagatctatgaactggttcttgatcatttgatcatcatgtgcttgaaattttacacatttggtcctgagtctgtattaaatgtgtaaaatttcaagtgataaggtcttctccagtgtcatgatcagtttgctgatcgtcacattatcaattagtcccctttaattaatccaagcgtgaagcatgcatgcttacgtggaacaattaattatatataagccttgcggacttgcacaaacaaagatgtatatagaggcataagtacatagtactccctccgtcaaaaaaaaaaaataaaccctggatttccgtgtccaacgtttgactgtccgtcttatttaaaaaaaaatatgaaaaaaaaattaaaaaatacaagtcacgcataaagtattaatcatgttttatcatctaacaacaatgaaaatactaattataaaaaaattcatataaaacggacaatcaaaagttggatacgaaaacccagggtttatcttttttttggtcggagggagtatatagtaggagtagaggagcaagactaatttgagaggacacaactctgaactgtcttactcaagctcagcaagatagatatcgatggcaaaggagtgcggcagcagcagtgtgatcgtcggggtggtgaaggtgaaggtggtgcgagggaccaatcttgccgtccgtgatgtcttcagcagcgatccctacgtcgtcctcaagctcggcaaccaggtgatctctttcactctttcgacctgctaattaagcttgctagtacgtactattgccgagttattattgaaggcctgttcagattgtaattaaaacaaaccttactaaaatttggtaatcttgctaaatactgcatcaatttagttttttaccaaactctagtaaatacatagaaaatcctgtcaaaacttgacaatattaccaaattaaaaaaatggtattgctaaaatttggtaaggtttattttggctacaatttgaacatgccataagattattaaaaattgctccgtatttcgaacgaatttgtaccaaattaactgaaatatgttcaaatggatcatctgaaacctctggggtataacattagctaagtgaaaggaattgatttgcgagatgtgcatacgtatacgtgccattaaagatttactggatttaaaaaataacattactattcgactattcacaaacatgccattacaatttcgatgaaacaccttccatgccacgttatacgctggaatcgcgtctgtagccgttttttgtgcactgtattttcgtatggactggaatgcccccagcatatgttgaagagggacctcatctattcggtttgaccaaaccgagtccctggaaattaaatcaccactccctggagtggcctcggtacaggggctattattcaagttggaccattgcaaatgctcttaggtagaggctttatcataacaatttatggtgttcatcgattgatttggaccaacttaagctgccgaatggtgcggtcgtgactcggtcagagctaaaatatgtagttttcgctgccaatgcatgcattcatattggttgcttcaaatgcttaattagttgcattattatctcatgacacatcgatgtgaatgtactgacaacaatcaagataactgctacacgagttgggaattgaaagattagttactggagtatatgggtaatcacaaatgatgcggcattgacgtacatcgagttggttttttagataatggaatagaaaatcctggtatttgctcaatgagttacaactaattattatagagtagcatacaaaataaaaagtttctcacacaaaaaagaagacacctaccaacccaagataaggagtacacaattattgaattctgtttgtgaatcttcatccaaaattagtaaacagttacataaccattgcctcaagattacgacatcgagttggtttgggggcaaaaactaatagttggtgacaaactacctgtttggcgtgcaattcggtacgtagagaaatacgaaaatgcagtcatattgtttagctatacgcgtaacaacagtcatatcttggaaagagcagtgtcatgagtacttcgaaaattcttacaacatccttgccaacgaggaacgaagttctcaaccatttaatttaattaattaaaaatcatagcaaatcaagattcaatcataattttttacgagaaacaacaggattattaaaataaaatataaaaaaatgatatttacaattttatttatgaaggattaaaaaagaaaagaattttgtgaacaaaggatcgattcaatcgtaagttcatagtgtgctgaattagtacgagggatgagcggatctttatagttctggcttagttgtaggccagaaggcgaccgctcttgtatagcggccgggggccaggttgtgctaggtttcagttgtgtggagctgtcgtgatcagtaggtggttggctcatgggtgcagttgcctagttggatgattttttcttggttctttttttttatagcttccaaggctttagttatatatatattttttctaatttgtcaatagaatcttcggtctggtgttggtcgttaaaaaaaaatgtgccatatgtaacaagtgattatggcattgtatgttttggattgagcgtatcgtttatacattaattttgctatatatttgttgacaaattttctcctaaaaatttgactgatataattatagtataatcgtaatgtaattgcactgtaacttacatatatctataatataatgtaacatgtatgtaactttcatataattttaaaccgttagatttgtttcaagatttatttaagtcactgacaatggaaacctgactgcaggaggtgagaactcgtacagtgaggaaaaacaccaatccagtgtggaacgaggacctgacgctcatcgttcaagatctcaaccatctcctcgtcactctcgttcgtaccttccaatcctccatcgatcgatcgatgtactccattgtgttctcctagctaggctagagatcaattaatctccgcttgcttgcttacaggaggtctacgaccgtgacccgttcgtcgacgaccccatgggcgcggcgttcttcgagctccggccgctggtggaggcggccgcggcgagcagccgccgccgtaccccctccggcgttgacagtaaagaggacggcaccgccgtggtcccaaggagcgggagctccgttgtgtggtcggcgtcggaggggaaggcggcgcagggcctggtgctgaggctcgccggcgtcgagtccggcgaggtggagctgcagctggaactggaatggcacggcggcgcggctggcgacacctcaatgatcgatcgattgattgatcgtaactcgtaaaggcctgaattaagacagaataaatcgactgagctagctcaagcttgtaagatcgagttcagtcagtacctctggttcgatcgaaaatttagtttctcgtttcgatttcaagaaacaaagcagctcaaggatcttgcatgcttgtattactattgaagcgattgttgagacaagtttgtccaatgctttgtgatttctggtaaattggattattaaaagttttatcgcatgattagctatatttatagcaccatcttttaagaaaaaaaataggctgttcattttttacattctaatttacatacacattataaatacactgtaaattttgtaagtttcaatatttacatttgtaatctatactaataatataaaaaagatagtagtggtggcgaatatatcactgccactcaattattatacggtacccataaacaataagataaaactttacatggcccgtatgcctaactcaacagataccttcaaattaatagaaaaaatagcgtgatgatgatatattaaataataaaaataatttatatatactaatccgttacgacacacatgtattatgctaatttttctaatgcacaatgtataagagaattaggattggaactaatttattatttacttaaaagataaaagaactgatagaaaagatagaggcatacttatacgtagaacaggggaaaattgactaaaattaagtgaaaaatatagcaccataattttaacaatgatgttacaatttcacatagttgcccaagaataaaaaaagagggggaaatattgagagggcctcgggcagtcgggctatctatgagctaggctaggtcaagggcgacccagtgtgtgatataaagttggaataaatctattttgcctccccaatctcttgatcctgtatcgctccaccgcaaagccaggtataatgcctccaccatcttcaataatcagtgcaaattaacttctcggtggtttggaacgtggtttttgtcaacaacgcccatatgtaagtgaaatatgataaaacatatgtggtgggccccacatgtcaatttccttttctccttctccacctcccccctctctctcctcgcattcttctctattgcagaggatgagttggtgccagcactcacgaaggcggtgcatggcatggtcacctcgatctctaggtctgatcggctagcgctggcaccattgcctctaggacgagcacgcatgcgcacgccaggtcggtgggggatcttagtgcccgtttgtccaaggggagcacctcagagatcacgtccatgacaaatctcgcctgattgatgcaacgcttgagcacgttagggagctcgtcacggagtgtgtccacctccttgcgcgcgcctcgcgacccgcaaaagtgaagaaccccgccaagtccatgctagcgcggagtgacctaagtcacttagcaattccatcggtggagccggtcctcgcgcaaagctcttggacagggaatcgagctgcaagagcgcgagatggagccgtcgatggaggcctcctggcggtaaagcgcctcgagcctatagtttccgatgtggaatacttctttgtcgtgtagtagctcgtagtgaaaagctgccatggattcgatgacgagaaattcatcagaggaatagaaaaacaaagagagaggaagaatgttgcttgccttgatggccttttctattgcttcctttgcaccgcctcctccttagtgtcattgagctggtgcgcaacgttgcacttttcccagtccttcgcatgttgaagaacatgcacttggtgcgggccacggagcgtctcgaagcaagccgagaggcagtgctctagggaactgaagtgctccgtgagttgctgatacaggcgcgtgcaggtcatgagcaagaggagatgacgttgtgcttgcgctccctgcaccgcctttgcgagtgctaacgccaatgcatcctccgcagcagagaagaatgcaaggagagaaagagaggtgaggaaggagaaaagaaattgacatgtgaggttccctgcatatgttttgtcatatctctctaacatgtggacctcgcatgcagaaaaccgcttcccaaacaactaaggagtcgatttacactggttttcaaaaatagggagatcttatacccgattttactgttgaggattgtgacttaagcaggagggtaaaataggcttatcccatacaaagggcctgtttgggagagcttctagtagctgcagcttcttctacaatctccaactgctagaagttccttcaaacagttcagattttcacctagattctgagaatctgtaattgtagaattcagaaaataaactagctagaagctggatttcctagcttctctcgattctcaccctgctgcttctccgaatcttaaactccccaaacagacccaaagtttaggcacagcccggcccgcttttgggccttgcgccttccgggcctctcgtaaaatgcattgggccggtccatgtctcagttctatccgtcaacaaacctacaattaatactccgggcctgcacggcttggacccggtcaagactcaccacggtccacgcagcagcgggcagcgaggaggagaagatgccgccgcccgtgccgccggaggagcggcggaagccttcgccggcggagtcccgccagtggacgcagcgcttcttccaggtcctcggcgccggggagcccctcccggcccccgcggagctccccgctgcctactccgcgctcgtccgcggcgtcctctcctccgccgccgtctcctcctccgcctccccgcgcgtctcctgcacgctcaccgtctcccccgccgccgttgtgagcgcccccccccacccccacatctcctcctccgctgaatcctatcctattcctaccctagcgtcgtgatgacgtcgtcgctgctcgatccgcgacttgcagaacgggtacaacacgctccacggcggcatggtggcggccgtggcggaggccgtcgggatggcgtgcgcgcgcgccgcggccggcgacaaggagatgttcctcggcgagctcagcaccgcctatctctccgccgcccgactcaatgtgagcacacacacaacatcgacctcctcccaaccccaacaggcgaacctacgtttttcttttttcagaaaaaaaaattgcatcgttaaataaaatttgtttcacttattggattattcctatcttgggtattggagggaaattgattacagcgaccgatctgtggttggggtaattggtgctgggtaatctagcaagagatgagctttgttttctttaggattggaatctggcaacagctagtccaccatctgagatgaagtagtttatctaggactggtggtaaatatatttcaggactgcaagagggtgggtgatccagctgtagaaggtgtatttatttctaggatgaatcaaaatcatccaaacagggaaacaactgttctaaacagatggtgaaatgaacatagtttattcttttgtcacttaaatagttccagtgatatatttgaaccctttgctattctcttgatatatatgcatgtaataatttaccaatgaaagctgattttgcacaggaacaatccagattacagaattcagtccttctggacatggtgccagtttaataatgtgcagacattccacagcataaaaatgtcattgcactaccactttaccgcactgtgttgctagcctggtgcccaaactcacaacatcatataccctgtatgaaagcacaaattaaccatttcaaccacaacatacaaatgcaactcctcgttttcagaaacttccatcttattagaggtttagagtgaagtgtgtattcttttccctgatgttcccgttgtttgttgatgcagtccgaagtggaagttgaagcgcagatactcaggaagggcagatccgtggtggttactacggttgagtttaggctcaaggataccaagaagctctgctattcatctcgagccaccatctacatcatgcctgtggtgagcctgtgaaaaaccacatggtacgtggatgaccaagtgtttgtttacacaacaattactgtgtagtatatatatgtgcatatatagcaaatctatatatgccacattcacaaacatagatgagaacattatcatatgcctatccagcaaccttccaaagctcagatgccttgaaaggcttccctttaagttccgcatccttgttattttcacttggaacttcagccaacaatgaatgtatgttagtcaggacatccagacaagaagtatataaaagattaaaccatgcgagctagtatatgatacagttctgttttcacgctttgaccttcaagtcttattgctccgcagtattcatccatgtcctatttaaactgtggtttccgttgaatcagattcctcgcaattcagatcccagcatactcttgttcacgttcgtgaggtttttacggaataaattaaatcttaaaatgctgatatttaggacgctttcttgcagcaataaatagatatttatccagtttatacatgcccacatacgccagtttatacacggcatctcccagatgttgggccatatattttcctgttctattcactgcatttcgttcgtcatactgagcttctaaacggtacgatttttgtaaaacctatatttatatataaatttcttagaaaattgttttaaatttgttcacctttaaataattatcataaatcattccactattcagccactgcttgcctagacgtcatatattctgtcagagtaacaatgtcacccaaatactcttacatgtccaaccataccattgccacctctattgacacgccgacggcataaccatgatactgtcttattgggtcatctatctagctgtatatccctgctgcatttgttgcattttgcattccactgcctggacaccattctgtctgtcagaggcacaagttctctgaattctatcatgtctttaacgatttatggtagttccttcggccctcggcatgaataggcctgtaccccctccatttcatattataagatatattaaccttttcataatcaaacttatttaagtttgactaagtttataaaagaattagcaatatctataatactaaaatagtttcattaaatctaatattgaatatattttgatagtatgtttgttttgggttaaaaatgttactatactttcttagaaacttagtcaggcttaaaaatgtttaaaaatgtttgactagaaaaaaaaaagacagcgtagggagtagaattcatacatgtccaaacggtgaccattgctttctagttactggaagaaggcacggatacacatgccatcatatacatgcatagcacatacacgcaatgacaatgcaagattttaatacaatggggttgaaatgggatatgatatccatgacaatgcaagattttaatacaatgggattgaaatgggatatgatatccatgtggccaaatactcagttggccagaccattataatttaagttttgatcctgtggttgaatattttgaatggacaaatcattgaagtatgatacttataattggttagtttggttagctagttaagttcgacaattgaaaagattagttgctacttagctgagtaattggaagctgacgtggtcacatgagcttgcttcattaatattcagacattcagtagatggcaacaaagtaaatcacgtaattgaattaagagtaggaaatttacatgatttctttgttagttacatagagagaatactcagataagccagggaacagggcagcggtgccctgtaaaaggtgcagtggacacatcaatttatacttcctataaatcaccaatacaagtgcatgactttctttttccgattgataatctgtggctggtcagagaaaacatgccgaatagctatatttatattttgagtaaagttcatcaccagtccctaaacttgtaccgctgtgtcatcccggtccctaaactccgctgtgtcatctcggtccctaaactcgcaaatcgatcgttcaggtcctcaaacttgttcgactgtgtcatcccggtccctaaacttacagatcactcgtttaggtcctccaacctgttcagttatgtcaccccggtttctaaacttgaatgtaaatatcatctgggttaaatatgactgtctaaagactttatatttaaaaataattcataccttttccatgtgaaatctaatgaagacaaactttatataaacttgtagccattgacgcgatctacaactatagttgattttttttattttaagtcattttttggtctcaaaatgtaattttaaaattaaaatttcaaaatctataaacatgcaacaatattttgggaccctaaacagttttaattcaaaaacttttcaactacaaatttgtaagtcgcgtcgagggctacaattttgatataaagtttgtcttcattagggttcacatgaaaaagttatgacttattttttgatataaagtttttagaccgtcctgtttagggaccggggtaacacatctgaataagttggaggacctaaacgagtgatctgcaagtttagggactgggatgacacagtcgaacaagtttgagaacctgaacggtcgatttgcgagtttagggaccgggatgacacagcggtacaagtttagagaccggtgatgtattttactcaaaatataaatatagctattcggcatgttttctctgaccagccacagattatcaatcggaaaaagaaagtcatgcacttgtattggtgattttaacatgctagctgtcacaaatctcagcacctcggtactcgggtgatcgagtataatgaatctgagcgcttttggactgattgatcgggtctatgatactgtttgggaaacttaagattatgattatgagaatttgttggctgacagtcagtttatgagagtatgaaagagctgagttttttgcttatggtttctagttagttttctggattgtacaattatatattcgtagaatctagatcacaactgagaagctacagaattctcttaaatagttcctatatactatggtaatactcctgtagctagtgatcctgatcccggcgcactgaatcaactcgaattagcgaatttctctcaacatactcgaaagagagagagatttggcgaaacataatgacttgtttctctattttctttcttttacttaggccgtgtttagttgcttgtcaaaattttttttttgacgtatacggatatacatttaaagtattaaacgtagactaataacaaaacaaattacagattccgacgataaactgggagacgaatcttttaagcctaattaatccatcattagtacatgtgggttactatagcacttatggctaatcacgacgtaattaggctcaaaagattcgtctcgcgatttacaggtggactgtacaattagtttttctttttgtccatatttgatgcaccatacatgtgtccaaacatttgatgtgacagaaaagttggaagtttgaataaaaaagttagaatctaaacacagccttagtgtaagtaaaatgagtggctgacgatcgcgcccctcgataaaaaacatcctgcaccatcccacacgatcgatcgtgacaagtatggagaaaagaaacatcgcaataaatttgtccactgaaagcacacatctcagggtcataaacaaaaagcgccctctccccacgtagtgcagccacgtggcgcgcgcggaaaggggagatagcggagcatgtggatatgcgacagtttttcctttttctcatgttttaaggtatttttagtttttactagaaaaatacccatgcgttgcaacggggtaaaaacgttttttaccctatacattatactccctttggtttgggactgaacgctcattccatcctttctagctccagtcctaacctagtccactacctccctctactcaacctatcttcgactcagcccacaagtggaactgtatgcccatctcgaacaatctcgtgcctgtaccataatgccgatcctcccatcaaatccgatactccggtcaagcttggatagtagccgatcctcccatcaaatcctgtaatctggtcaagcttacatagtctcgtgtccgtacgatgacggagccgatcctctccatcaaatttggtccaatctttctcgatctccaaaatttaatctggtcgagctcgtatagtcttcatagtcctgtgcccgtgcgatgacagagccgatcctctccatcaaatccggtccaatctttctcgatctccaaaatttaattcgtttgagctcgcatagtcctgtgcccgtgcgatgacagagccgatcctctccatcaaatccagacaaagccaatcctctccatcaaatccggtccaatctttgtcgatctccaaaatttaatccggttgagctcacataatctcgtgtctgtacgatgacagagccgatcctctccatcaaatccagtcgaatctttcttgatctccaaaattgttgagggattttaatccactcaatctcctttttctttttttttattaaaatctccaaaattgttgagggaaaatgatgagagagtagtgaagaatcagtttttgcaattaattggagaaggaaaacatggggaggcaaaacaacatggtggtgacgctgggtttgacacggcgaaataaaccgcaaaaaaaagcgacaaaagaaaaaaagggaaaacggtgaaaaaaaagaaaaacggcgaaaagaaaataaaacggaaaaaaacgaaaaaaaggaaatggaaacgaaaaaaaaggagacagacagcgaaaggaaaataaaaccgaaaaaagggaaaaaaagaaacagacggaaattgttggcagaagccttatgtattttttaattaggtatatagatatgtagtatacatacgtatataaagtttgtatatatgtatatattttttatacatcaaaagtgtatgcgtataaatacatatatattgtatatatatgtgttgtactttacatatgcgtataaaaatttatacatatgtatataaagtatatactacgtatacacgtagagaggagagaccagggttttaaatttcgaaaatgacatttctgccgcaggtgggtgatagaaccgaaatttcggaaattttcgaaaaatttcgtatgagattttttaaatttttgacagattttgaataaaatttaaccaaattcacaaaaaattacaaaaaaaaaccaaaattttcggtcgagatgttaggatttctgtgaggggcgaaatttctgaaatttctaagccctgggagacactggaggggggaaatccactgcgcgggagtgcaactacccgtgtagtatcccccacacaatgtcttataagtcggactcactcaagaatagtgaaaaagaaacaacgactgaaaacctatgcggtacagtaactttgaacattgaagaaatcaagaaaatgccaacaactcccattacacaaatataagtatttctaagataaatataagtatttttaggttatttagtacatggtagggattaatagttacaagaaaatattttaggttgtgttctgtagctggtgagagaagatttctctagttctctacgtgcacgctttccaaattaatgaacaatgtgttttacaaaaaacaatctataggaaagttgctttaaaaatcacattaatttgtttttaaaatttaaaatagttaatactcaattaataacacactaatggttcacttcattttacatatgttctcaatcttccattttcatgtcaaatcaaacatagccagtgtccgttgtcaaggagatatgttagggcattagggggtgagagatggttaaagtgcgacagtgtttggaggtaaaatatgaaaaagatataaataagaagtgatttgatgtgataagtaataccgtatatattttttatatttgtgaataaattccaaatactttaaaatataggtacagccatatggcggattccctacaaaagagagaatactcagataggccagggtacaggggttccctataaaggtatggcgcattaaagacgcacaatcgacacaaatcaaatttatacttctccaaattaaaatatgagaaaaatcaaagaattgcacaaacgtcctaatccaagaaataccatcgacgaacccaacttgaaaatgtcatcgtacaaacgcttttgtcacagaaatactgttaccgttagatttccgttaataaaactccactaagtgctataaaagactattttacccatatgaattgttgaaaaccaattaaaacttttgctctttccatcaacttactataatttagagcaacctacaaattgtaagctgacggaaaaagaaaaacttttaattaacttttaataatttgttgagatagaatcgtctttttatagcacttaattaagcattgctgacggaaacctaacggcgattgtatggctattgtacttgatgtgatttgatgatataagtaatactgtataattttttaatatttgtgaataaattccaaatactttgaaatacagatacaggtagagttatttgtttttaactttcaggtacaggtagagtagattcgatttgatgatgtgaggctgagatccaaagaacagccctatttttttttgtctagtgataagcctccgcagccctcggtcctatatatatccatgcatggtacggtaataatcaaggaagcagcaagctagctaaagctagcccagtcatggagaaagagcagcaagccggccatggcaagctccctcacgagcagctgttgctgcaagccagcacggagctcatgaacctcagcctgggctacgccaggtccatggccctcgggtgcgccgccaagctcggcgtcgccgacgctatccaccgcgccggcggccgcgccaccctccacgacctgcacgccgcgctgtccctccacccgaccaagctccccttcctgcgccgcgtcatgcgcgtgctggtcgcctcgggcgtcttcgcgcaggtcgaggaggaggaggaggaggaggatcactaccgcctcacgcccgtgtcgtccctgctcgtcaccgccggcgacggcagaggcaggagcctcctgccgctggtgctcttccagctctcgccgctatgcgtgacgccggcgacgagcatggccgagtggctcaggagcggcggcgaggaggagacggcgttcgagatggtgcacggcgtgggattgtggggcgcctgcagccgcgccccggatctcggtgagcacttcaacgacgccatggcggctgactcgcggtttatcatggacatggccatcaacggctcgggccgccaggtgttgacaagatcacctcgatggtggatgtcgcgggtggcaccggcgcggcggccagggcggtggccgccgcgttcccgcatatcaagtgcaccgtgctggaccttcctcacgtgatcgattccatcccggctgatcatggcgatgttgttcagtttgttgcaggtgatatgatggatttcatccccaaagcagatgccctcctgcttaaggtcagttatatccaatgtagtgttgctgacaacttttcatggcggacgcagcttcaaaatatagatggggcggagaacggaaatgttcactcgataaaagcaatcaaacacaacacatatcgtatttatagtttaatcacataactgcctcgatcattatttgtggcgtgcgtgcattatgaagagacggactaatttgttggacgttcacaccttgtcatacctaattttgatggcccatgactactataagggggtagagggttcttggggatgtagagcgacacgggtcgtagctggatcggtcgatccaccctgcctaatgggtagatccgcccctgttttcatgtattggatagcaagctaagctagtacaaaatttaagacattttagattataacattaattcttgatgattacagtttgtgctacatgattggagtgatgaggactgcataaagatactaaaacgatgcaaagaagcaattattccttctagagctgcaggaggaaagatcatcattttagatgttgtagttggatcttcttctgaagcaatatgccaaggaacccaacaattgtttgatctgattatttcggttacgaggaagagtggtgcaagatattcaaggaggcaggattcactaaatacaagattagcccagtgttaggttttcgatccattatcgaagtatttctataggtttccagtatatgggaactccactttatatatattcttgcactcttgggtgtggttgtcttcttttatcattgtcttatgcttcatggacgcgctatatatcgttattttctctgtaatatatatgcgaggatgtccttttccctttttgtccaagaaatctactagctaaatacccgtgctttgctacgaattaaagtaaattatatgtgtgctaatattgtttagaataaattaattgtgatgtttttgcacatttttgttcttgttgatgtttttgtatgataaacttgtattataggaataattgttaagaactattttgtaatattaaagcacatgaagtagtaattggtaaaaaaaacatgtaggagtagttggttaaaaaaaatctatacaagagttattggagtgacctattcactgccgccaccattgcctttttttaaaaggagcctacaactaatattaaagtaaatcatgcccttttccatctcctcataaaattatctttttaccctttctatctaagtacatgtatcaatacttaaatattttttacgtgataccttttattctagagcattatatctttactatttctgaagtgcaaacaccgtaaaacttctctttattcatttcaaatagagagtcttttgtttggtaccttggaatataatggccctgctcgaatttccaacaaaagttagataaacttttggataaaagtggcacgctcttcaaactgctaaacgtgcatttcgtgcgaaaactttttatataaaagttgttctagaatatcagattaatccattttcaagtttataataattaaaactcaattaatcacacgttattaccacctcgttttacgtgaaacacttgatttttatctttatcttcagaagattcaaacaccaccaatatcgtaatcaggacattgcggtcgtgtccacattatgaagatttgtgaaatctgaaatcggaactttacctcaagtggatcagtctccccatcaagctcgaccataacaagagcattcatgctgcataacaatagataagctcgaatttatatgattaattaacttaattgatgatatacaggttacattttataaaaagcataccttatctgcaaggcagtgtaccaaggatgcgtgcacgctcgtattttgtcatatacattgatgttttctgtgggcgagccatctttttcatattccttgtcatatacagtatcctcattgttactatttctggaatacaaacactgtaaagattctctttattcatttcaagtggagagtcttttgtttgataccttagaagataatgtcataatcaagacatcgcggtcgtgtccacattatgaagatttgtttttttccgtaccttttgtcttcagcttttgtgattaatgtattctctgatgaaaatgtatttgcaataatgtacattaaaggagaatggtagagcatgaatacatagttatttgcagtaagatttttgtaacaagcatatcctatttgccacaattacccttccttgaatattccttgctatgtaaagacaatatatcttactacagatatatgtatactttcttttgtgattatatgaaagatccccaacacccgcatatattgcatagacacaaaagtgtgccctcttttaaaaaaggctcgagaggggatgataggaataaaaccctgaaccacaccaagtttctacgaaaaataactcacagttacatgtgtggatattggcttaattatgatacctttgaggataatgcggccacaacttcaccaatacaaaacaaaaaaagttgtttcctagccacacaaacataagatttattcttaaaaaaagaacgtcatgtgtttgtttccctattctatgaaaaagttcacacaaagtatataccatttattttgtgcacaaaataaaaccaggtcttagcaaactgtcacgtcagtgtatacacattcatcacaaccaaaaatgggcatgtcagccaacatctctactctacgcatgtagtaataaatgagaaagctgttagaataattgggctaggcccgatttattctattaaatatcaaaggcccataataagtgttaaggataataataccacctcaggaattaagcgaggagtatctcaacttaaatagggagttattggaggctcccagttgaccggttgaggtgggaatcggaaagccacacgcgcgcgccgggccggggcgaggctggcgtgcatgcgtgccgtcacgtctctatcctgtttgcaaccacgatcccacgttcccacgactgcctccgtaacggcgcgtgcacgatcccacgacgtgtgtgcagcaactggctagtccgatcagaacgattcgctcccacgactgcctccgtaacggcgcgtgcacgatcccacgacgcgtgtgcggaatctctcctgctatatgtgcgtgccgtcacatctctatcctttttgcaaccacgatcccacgttcccacgactgcctccataacggcgcgtgcacgatcccacgatcccacgacgtgtgtgcggcaactggctagtccgatcagaacgattcgctcccacgactgcctccataacggcgcgtgcacgatcccacgatcccacgacgcgtgtgcggcaactggcggaatctctcctgctatataaggaggccgctagtccgatcagaacgattcgcatgctttcctctccctggtgttcttcctcctccgcgcgcgcctgctgcttctgttttcgcttcctcgcttctgatcgctttcacgcacgagagatcggaaggagcagggcctccggaaccacaccttcgcctgagatctgcaccgggtaggcgggtgatcaggtttttggggagtgcttcccgcacgactgctctgttcgttgttgtctcgtcgtccaccatgtctacgcctggacacctggagccggagctgccgccggcgccggtgctgctgtctctggagatggcacgccgggagccggagccgttgcgaacgtcaacaccaacggaggcaattctgcctcacaatccagcggagggccattctcggtgtatgtccttctcctgctgttaactcattcgttcataccgctgttagtcgtgttagtcgcaagtcagttgcgtccttggtatgtgcatgatgcttatgataccttaagcatgctactggttatgctacatgttgttactagatcaccccacattgtttatactatgattattgtcttaatattttggattaaaatatgccgatatatgaccatattttcaacgattcaaaaacctgataggtcattttcggtagttggctttgctgctgcactgaaaccatatgcatttgatggttctaactataagaggtggaaaacacgtgcactattgtggttgatagcgatgcaatgcttctatgtttcacggggcaaacgaagtgaaccacctctctctcccaaggaagaggctaagttcgaggcttcggattgcctgttccgtggagcattgatcagtgtactcgctgacaatatagtggacgtgtaaatgcacatgtcttccgggaaggacatgtgggatgcacttgaggccaagttcggagtttttgacgccggca

SEQ ID NO: 23984 - DNA, 25472 bp, Oryza sativa
cttgagaacaacaattgtaagttgctggacaagtttgtggcgggtggcattattgccaaattgccaccttcttggttggactttgccacttctctaaagcacaagagacaagagttcagtgtttctgatctcattggctctttgggtgttgaggagaaggcgagggcaaaggacaaggcaaaaaggttgagggaggttctagtgccaatatggtacagaagaagaaccctcatacatcccacaacaacaagaaagtcaagcctgatgtcaaacccaaggctgcaaccaactttaagaagaaaggcaagggaaaggcaaagggaagctgctttgtgtgtggcaagtctgggcattgggccaaggactgtcctgagcgcaaagacaagaagtcttccaacatggttattagcgagggcggaggaacatcggggtacggtaaaatattacctacagttctctctgtttttcactcacctgattggtgggtggatactggcgctaatattcatgtatgtgttggcatttctctattttcttcttatcaggtcgggagaggttcctccttgttgatgggaaacgggtcgcttgcggctgttcatggtgttggtacggtcgatctgaagtttacttcaggaaagaccgtgcagctgaagaatgtgcagcatgtcccttcaataaagaagaatcttgttagcggctctctattgtgtagagaaggttttagacttgtgtttgaatccaataaatgtgtcatatctaaatatgaaacttttgttgcaaaaggttatgacagcggaggcttgttccgcttttctttgaatgacatgtgtaataatcataatgttgtgaaccatattagcgagaatgatgagtctaatgtgtggcattcgcgactctgtcatgtgaatttcggttgtatgacgcgcttagctaacatgagtttaattccaaaattcactttggtcaaaggttctaagtgccatacttgtgttcaatcgaaacaacctcgcaagcctcacaaggcatctgaggtgaggaatttggcacctctagaacttgttcattccgatttgtgcgaatgaacagcgtgttgactaaagggggaaagaaatatttcatgacactgatagatgattgcactagattttgttatgtgtatctattgaaaacaaaggatgaagcattgcattactttaagacctataaagctgaggtagaaaccaacttgaaaggaaaatcaaacggttgaggtctgatagaggtggggagtatttttccaatgagtttgcatccttttgcgaagagtttggaattattcatgagaggacgcctccctattcaccccaatcaaatggggtggccgaaagaaagaaccgtactctaactgagatggtgaatgccatgttagacactgcggggctttccaaggaatggtggggtgaggcagttttgactgcgtgtcatgtcctgaataaaattccaatgaagcataaggaaatgacaccattcgaggaatgggaaaggaagaaattaaatctctcatacctacgaatatggggctgtttggctaaggtaaatgtacctatagccaaaaagcgaaaacttagaccaaatactgttgattcacagtgtgggttatagattcttaatagtaaactctggagtacccgacatgcatgttggtacaattattgagtccagagatgctacattctttgagaatgaatttcccatgaaacatacacctagcacttctagtcaagaaactgtcatgccccatgagcactttgcaccgatagaacacaatgatcaaacgcctgaggaaaatcctgaggaggacaacattgtagatactcgtaagagtaagagacaaagggttgcaaaatcctttggagatgactacattgtatacctcgtggatgacaccccaagaaccatagaagaggcatattcatctcctgacgctgactactggaaggaagcagtacgcagtgagatggactcgattatgtctaatggtacttgggaagtcgttgagcgtccatatgggtgcaagcctgtaggatgcaaatgggttttcaagaaaaagcttaggcctgatggtacaattgaaaagtacaaggcaaggcttgtggccaagggttatacccaaaaggaaggcgaggattttttcgacacatactcaccagttgctcgcttgaccacgattcgagtactacttgctctggcggcctctcatggttttctcgtccatcagatggacgttaagacagctttcctaaacggagagctggaggaggagatctatatggatcaaccagacgggtatgtactagaaggtcaggagggaatggtgtgtaaactgttgaaatccttgtatggccttaagcaagcacctaagcaatggcatgagaagtttgacaccacgcttacatctgtaggctttgttgtgaacgaagctgacaaatgtgtgtactatcgctatggtgggggagaaggagtgatcttgtgcttatatgtcgatgacatattgatctttgggaccagcctcaatgtgattgaggaggtcaaggactatctgtccaagagttttgaaatgaaggatttgggagaggctgatgttattcttaagggaaaagtccattttacaccctctaacttttatgtttgtctaaaatgcacccctaaattacaaaaccggatataatacaccttccaactattaaaatcggacactttaaccccttaagctatttttatggtggttttggtacacttggatgccagctgtataaatgctccacgtcagcaattatttgggtgaaagtaagatgtttctcccttcgggtaccttgcgagcggcgacaactaacataacggcgccgtgaagtgcagcaatcaacagccacgcgcgcggcttgccggaggcagcggcggcggcacggagaaggagcagccgcgtgcagcgggcggttgccggcggaaacgacggcgctgggaaggagtagctccgcgcggggaggaggcagcagcaagcagttgggtcgcagagacttgtctaagctttcatcaaccacttctgcaccttcatgttgtgtttcagaatgttctatatacagtagcatggtgtgtgttgaaaaacagcagtagcaagcaagatgaacaatctatcttgactgaattgttggcgtcggtgccgagcttgacggcgagcccgcccctttggccaatgaagaagaggggatcggcaacaagctcgacagagaccgcacctttggccaagctcaggagaatacatgccggcggtgagcttgccctccttcgctgagctcgaggaagcatgcgagagctctggcctctgagtctccgacgagttctcctagaaaaatattggagggagaaggtataggaaaggagggggaaaggaagaaagagagggagaggaaggaagaagatgggccggtcccccaccccacccccgcgaccacggtgtagagccttgccgtcgaccatgcaatggcagccgccgcaactcgcaaggcaaaccccgccgaacatacaaacatctggcatccacgtgtaccaaaatcaccataaaaacaacttaaggggttaaagtgtccggttttaataattggagggtgtattatatccggttttgtaattcgagggtgtattctagacaaacacaaaagttagagggtgcaaaatggacttttccctattcttaacattaagctacaaagaggagatgagggtgggattacacttgtgcaatcccactatgtggacaaggttttgagtcgctttggatatagtgactgcaagccagctcctactccttatgatcccagcgtgctattaagaaaaaaccgaagaatagcaagggatcaactgagatactctcaaatcattggttcattgatgtacttggctagtgcaacgaggcctgacatctcatttgctgtaagcaagctgagccggtttgtctcaaatctgggagatgattattggcaggctctggaaagagtaatgcaagggcactatgagctatggaattcactataccgggtatccaaaagtactagaagggtatagtgactcaaactggatatctgatgctgatgagataaaagccacaagtggatatgtgttcacacttagaggtggcactgtttcctggaagtcttgcaagcagaccatcttaacgaggtcaacaatggaagcagaacttacaacactagatactgcgacagttgaggccgagtggcttcgtgaactcctgatggatttgccgatggttgaaaaaccagtgccagctatcctaatgaactgtgataatcaaacagtgattattaaagtgaacagttcaaaggacaacatgaagtcatctaggcatatcaagagaagactgaaatctgtcagaaagcagaaaaactccggagtgatagcattggactatgtccaaacggctagaaatctggcagatcagtttaccaaggggctaccacgtaatgtgatagacagtgcatcgagggaaataggcttgatacccacctaaagttgcacaatagtggaaacctgtccattgtgatcggagatcccgtgaatttggatggcgaaacaaactattgtgtaactgagagaagagacccttgaaaaaggctcattttcatgatgtatttctcttcttttctgcatggtaggatggctcatgctttaatgtgatccgagtggcttttccaagcagcgatgttgacctgtagaacatctcagaaggaacacacctatatgagttcgactgctagtcacagtctatgagatttgggcgatctctagatagtcatgaaaggcctggagtttgacttatatgctccaaacagaggggatgcgaacggcagctcagtaccagtcaagggtttgagtgaaacctgatcatacaagactgacaattcaagacatagtccattgttcagttgtggtctgatgtagctcatttcctaggtggaagttcaacttaacagtctccaccaaaacactggtatatcaaacaggcatagccttgagaacatttgttttgagctttgaaatttggtggggattgttagaataattgggctagacccgatttattctattaaatctcaaaggcccataataagtgttaagaataataataccacctcaggaattaagcgaggagtatctcaacttaaatagggagttattggagactccctgttgaccggttgagatgggaatcggaaagccacacgcgcaagtgcgccgggccggggcgagggctgggtgaggcgtggctggcgggcgtgcgtgccgtctggcggaactctcctgctatataaggaggccgctagtccgatcagaacgattcgcttgctttcctctccctggtgtttttcctcctccgcgcgcgcctgctgcttctattttcgcttcctcacttctgatcgcttgcgcgcacgagagatcggaaggagcagggcctctggaaccacaccttcgcctgagatctgcaccgggtaggcggatgatcaggtttttggggagtgcttcccgcacgactgctctgttcgttgttgtcttgtcgtccaccatgtctgcgcctagaaccgatggcgtgcctggagtcggagctgccgccggcgccggtgctgctgtctctagagatggcacgccgggagccagagccattgcgagcgtcaacaccaacggaggcaattctgcctcacaatccagcggagggccattctcggggtatgtccttctcctgctgttaactcattcgttcataccgctgttagtcgtgttagtcgcaagtcagttgcgtccttggtatgtgcatgatgcttatgataccttaagcatgctactggttatgctatatgttgtcactagatcaccccacattgttcatgccatgattattgtcttaatattttggattaaaatatgctgatatatgaccatatttccaacaaaagcaatatgtgcccggatagctacttctagtgttaaattttttctcaaaatataactacttttctactcacttcctcatctcaatcaaccatattcatctctcatttaatttcttcacttactacccatctcaaccaattacaaccatttccatttaattctatcctatctccaacttcaaaataaaatgcttatattataagacagagggagtaactcccattgtacgttaataggtggtgacaggatagacgactggtgttgccttacctctcactccaatttcagtaacatttcaatttttcctaaaaaaaactaaagaacttcaagctatctaaatttcagcaaaattacttaacaaacacagtgcaaagcagccttaaaaaaaggctcaagataacaatacccttatttcagtgtttagcaaattaactttggtcactattatatatattgcaaaagataataccgctatgttccaaaaagggtcctattatatactccctccatcgtcgatctacttttgatagtcatatttccaaatctgaaaaatttatttttgataggcatatttcaatccaacaacttatcatcttaatgactttcttagatttaatgcgtgaccctccatttttccacacaagattagctacatggacatcgagaaatgtaaatattaatgaatcacttgtttacgaggaatgactagctagtagcatgtttaaattaatgataaatagaatcacttatccttgatctgtgtgctaagatgaaatatgaccatcaaaagtagatgtagatggaaggagtattacagaagataataccgctatgttcaaaaagggtacagcctggtcaaagcccccacccccaactcaaaatgtaggtttgtctggttttagttcgacgcggtaaataatgtgacatatacatggcattaggctgacaaagccaccgccacgccccctgccccctagtatgaaattaataaagttagcgagcatgcgtgtgtgtatgtgtatatcgctagctagcacaaacacacaatgatgctttcctcctctcttaaccaccctttctcgttgatgctttcctcctctcctatccaccctttctcgtatgccgtcaatgtcggcatatcgatgccaaggaacttgagcatgtagctagtgatttgtggcaaaggtcacaaatttccaaccacgacccaagcaagggtcaaggcacgaaggcaccacccgcgtcattatcatccggcatttgtgaagtgcaccagcggtccctaaacttgtccgggtgtgtcatctgggtccctgaactctcaaaatacattttttgtcctcgaacttgtcttgggtgttatataggtccatccgatgacgtggcatgccacggaggcgcctacgtgtcggtggggaccccacatgtcattcatatgtataaaaataaaattaaaaaccatattttctcctctctacctccgcgtcgagctccgccgcctccactcaccggcatgcgcgcgccggcctacgtgcgtcggctccgccatgctggcctcctcgccgcaggcgatgccgcacccgcctcggcctgggcagcctcagatggccctccgcgtcgagctccgccacctccgccggttgcaccggcttccgtgcaccggcctccgcgccgcaagtgacgccgcactcgcctcgcccgaggccgtttcctcggcacctccgctgtcgacgtcgcgacctcgcgcagctcgccgccgccaccaccacgtgcgactccgccggtcacgcgcggctacgtcgcctccccacccaggcgcgacacggcgaacccctcatgcgaatgcatgtgggtccccaccgaggcgccggcgcggcaaggcggcgttgccgcgcgcggccagctgttaacgaccaaatttggtaatctgagtatcggggataaagattagatcgaagcggaatcgaagatgaagatcgtttcagaaacagagtaagaatcgactggagtccaaatcggctacgacaagggttggttgagttcaagtcagacttgataagccgatacaaccgattccgacaatatgactcagtgtgcatcatcgggttgagttaatgtgcttcatatgaattgccacatacggattgagtcctaagaaggcaattgtatctattaattaggatattttatgtaattttcttagagatatgtttgggcaaaagtctgccgcaaagacttatggtatcttagaatttgttagagataaaagtcatgtccgagatggacatatcttgtaattctcgggtataaatagacccgaaccccatgtaatcgaattaacacacgttcaatacaatcttggcgcattgccaccctttttgcttttgttttatttcgacgagttcttgctttcgggttgagctacatcggttttgatcttcaacaagaggtaaaacttgttatggcggcttgcgttctcgggattagtgcttccatctttatgatactctaattttgtttatgtaattcgtcgagttattatatatcttacataatctccggcaatatcgttatctaacctacaatcggctaacatttgccagtagagggcagccgattaggttaaatactgatgttggcttagattatataaggtatctaccactctatgacactttcaatggcttgattgtctagatattgtctttctttttatacttatagctgcatcagttaagtttgatcttatgagtcgtgagtagaatctcaatctctagcctacttcttggttgtcgattagggtagtatcggggtttcagccgatcttacctgatttaaccatcttttcctcatacgctttatttacatgttaaatctgccctttatgttaagatcttgtcacatttaaatatattaggcttttgtttggtatatttcacttgctttaatatattaacatagagtggtattggagtattagccgatacatgctagatctatctgatcggctatgctatgaacatatatggtctcttgttagcatatatttcgatctaagtgatttatactgtctcggcatggcgaccgatctatcccaatcacttgattcaagtatatatcgacataaggattgcatatcgttaatatctacagccgatcgagtagatttagttctttcttacctattaatgactgccgatcgatgcatttatgacatcggctcaaagataaatgatatgtcatcggcacctagccgatcggctatcgtttataggtttaaccgtggtttctttgtccttctttcttgttgattgcaggatcaaatcaactggcacgctcatacacccaaaggcaagttttggacctgtactggagttaagcagatctcctaggcctcgtgttttcacgtcaacaccagcagatcgcagcgaccgagcgagaccacagtggcggtcccggaggtggagtcgtccggggccttgacgcagatgcggaggtgatgcggcggaaggtggctcgcacgaggccgcgcgtctggcgtcatggcggagttcggcggaatggtgcgaggccacggcagtacctctcggaggcggagccgcggtagaccttgctcatgacgctggaaccggctccgagcaccacggctaaccgggggaaaccgcggcggcggagcgaagctaacgagaaggcggcctcgcgcgagcacgcaggcatggctgcaggttgcctcgctcctgcaccttgccacatgaatagggccatgcactgcatgcatctatccacacgtgctaccaagcagaggctgcggagtcgcgtggtgccagcggagggtgccggttgccgctcatggcggcgccgctaggagctcgcgcaggcggacataagcggactcggctgcggtcgacgcggaggtggctccgcacggcattggttggtggcggaggccagcgagtagttgcggcggtctggccaccgtgtcacgcggaggggttcgccgtgtcgcgcttgggcggggagccggggaggcgacgtagccgcgcgcggctggcggagtcgcacgtggcggcggcggcggcgagccacacgaggtcgcgacgtcgacagcggaggtgccgaggaaacggcctcgggcgaggtgagtgcggcgtcgcttgcggcgcggaggccagtgcacgaaagccggtgcaaccggcggaggcggtggagctcgacgtggagggccggttgaggctgcccgggccgaggcgggtgcggcatcgcccgcggcgaggaggccagcatgacggagccgacgcacgtaggccggcggccggcgcgcgcatgccagtgagcggaggcggtggagctcgacgcggagtagagaggagaaaatatggtttttaattttatttttatatatatgactgacatgtggggttcccaccgacacgtaggtgccactgtggaatgccacgtcatcggatggacctatattaacacccaagacaagtttagggacccaaaaatatatcttaagagttcaaggacctagatgacacacccggacaagtttagggaccgctggtgcacttcactctttctaataaaatgaaaagtctaatataaattgtacacgataaaacgtagcaacggggcaaactatcatgtcagcatgtgcatattattcatcacaaccaaaaactgacacgtcaggccaacatctattgactgggcaagtgtattttgttgtcagctagcagtattattattaactaatttttacgacgcaatgcataagtgttatgcaaaatcatatggacctgttcgtatagggtgcacagacggaagtacaccagaccagagtttcagttgcatatatacttccccatccaaaaaaaacagctcaaaactcaacttagaaagtgatatgacccctcctattacaacgattctagataacactttgtccagattcattgtaacattagagatcacattatcttctaggttgagcttttttttagacggaggaagtacactagaccataatctaagtacaccagaccagagtttcagttgcataccagaatctatggctaataaatgagcacctcgcaacctctcatcagccatcaaacaatcatccaagacaaccaaattcaaatcaaatgaaggcaggcgcaaacaaaccaaaagtttccctaaacggctaaaccagtaccatgaagtatgaactcacaaagtcacaatgaagggcatgtttctaatagtgtaaagttagtcagaaaaataggtcaacaaaacatatcaaattaagtcaaaatttacatgtaagtcattcaaaatatcaaacagttcaaagacgactattaaaatgtaagtgattgagcatgatcacaataatctgaaaaagtccatgaaaccagacaattatagttccaaagtacagcgcaatcatatgcggccacataactgtgcattacatcaaccttctgtcatagaaagtatcatgttaacttgcccgaaaaaactaaaagctttggccatactacatcaaacatgggtatccagttatttagcccccaccaacttgccgtttccaggagtcctctacaatgagctcatcaactccccagtcctcatagctatttcaaaacaaaaaaaaaaaaacagtcagcctacaaagaatgtcgagttgcctggttaaagtttctaattttgtcatctcaatatctcaccttccatcaggtaaataccgcctgattgtgaaagggatcttgcgtgctctcaattctttcatggcaatctgaaatttcatcatcagatgaagataatcaacatttttattttcaaatgaaacttgacccctccaaaaaaagaaaatcaaagggctccacaactttgttttatttttggttgtgcaatgttgtttgatggctactttgatgattttatacaaaagtatgagccatttaaatccatagtccaacccaataaaacaacatattttatcagagatacgataaagtatcagacataaaaaaattaatgaaaaaaaggcaatcaaaagaatacttcaaacaacgagtataaggttccagggaaagatagtaaaacagaggccacaatgatgttcataaaccatgttaatttgtaaaatctactatgtaccaactaccgcctagggcgttactagcaccctgttctttacaattgcatggggacacatttatacttcaaaaggcatatttactatcatggaaacacgtttacagccatgggatgcatttactactttgcaggaatgtgttcacagttgttggggacaggcagtactgcgcccagggtgtcaataagttacaacaataaacttataaccatttctcatattttcatacacaagacttatcagtcagcttaatttctattatccttacagattcaaactatagttggtaactattgcagagcaattagaaatacagaactggtgctgtagcttatgaacatgtaaaccaatgcaacgtacaccagaacgaaaagcaactgttaaatacctaagaacatgatgaaaccacatgataaatgccaaattgaactaacaaaatggcgtagttataagattcagcatgagaaagaaaggttgtagttcgcacaatatattagaatgaaaagaatatatcactatctaaatgactcaaactatattagaatgaaaagaatatatcactatctaaatgactcaaactatcatgaaactgctacaaaatacttcccacagtataattaggttttcaactacgttgacaggatcacatcaatgacaactctcagaatcatattgtaaagacaaactccatagttccatcaacatgtgcacatcatcagccagttaaacatcgccactcccatcaaaacaataaaagtactagtatgttatatacatagcatgagaaggcagtcacataaatattaactattttttctagctctgcccctcactctggtcttaccttgtacgtgctacatagaaatgaagagctcaaggaaatatagaaggtgacattttgtgcagacttgtattaattgaagaagtctatgtctagaaaactgaaatcggaactttacctcaagtggatcagtctccccttcaagctcgaccataacaggagcattcatgctgcataacaatagataagctcgaattttacttaattgatatgattaattaacttaattgatgatatatgaattacattttataaaagcataccttatctgcaaggcacgtgtaccaagaatgcgtgcacgctcgtattttgtcatatactttgatgttttccgtggacgagccgtcttttcctgctccttgtcatcttcagccccaaccacatcatccacagcatcctcattgttattctcaggctcttcctcagctccttcctgttcagaaaaggtaaataagccacatagctcttcctgataaagtaaagtccagaaataaataacaaagcagcagctctgtacctcaatctcaggttctgggggctcatcctcgtacctgtaaaaaaaagtacaagcatctttagttcataaatttatataatactaaaatgattctgcagccatatataataggtgacactaagcataaccaaaaaaaaaagaacataacaatcagcaaagataggtatttttcaagcaacatatctacaatgtctcatcaagctagacatgaacttaaaactatactccctctgttctatattgatcatcatatacgttgaaaaagctaactctaaaaagcaaccagcaccttgaaaaagttccattattttgatccatcaattaaaatagttgggaccaattcttaattgatacaaaagatgtggattatacttaagccaagaaacatcaaacatcaacatcttatcccaacaaagacaaatatcataatgtgcattctcattccagaaggatgctgggtgagctaaacacaagagtccatctaatggctaggaatgctcaaaccccacataattcatggacacctggtcacctagaaatcagcatagtttcttacattccgtattaaacctgattgaccataaacctggcaacagctgcaccatttagccatcccattaaagactaagaaaaaacccaccttttaacaagcacataagcaatcaagcatgggatttactgaagaattaaagaagtcacccgacgatcagcagccaaacatagaatgaggcatgatgatttgagaaagagaagaaaaaaaaacgatgtgtcaatcaaagctcaaagacccatccatctcccaaaaaaacatcataccccctcgtaatccatgccaatgagagagaatagaccaaatactggcctaaagaaaaactccgtactgccaccaaaccagcagctagaggcagagccctcccttgagaaaggagagctccccccacgaatcccccatcaatcaacgtgcccgtaacccacccacgaagatatcggactccctcctaacccccctctccgcccgcgcccccgaacgtaccagtaaaccctaagctaggtgcgaaactgtaacggcggaagcgagcgagggagggtgggggagaggcgaaccccatgtccatgtcgttgtagtcgtcctccgccatggcgctcgctcctcctccgccgccgccgcctgggcgctcgcttcgctagggcttccgaaggcggcgatgaggggagggtagtggaagaggaggaaggaagctggagaaggcggcgtttggtcgggtcgggaaggtgtgtatgtgtagcaaaatccaagggctgtgctgtgcatttgggccgctcgacctgatctctagcggtctggccctctgtcgccgtaggattaagttcactttgactccctttactagttactctgaatccgattcttacccttaaaccgtaatacggatatctcgaccctccaactattaaaacccggtgtaattttacaccctcgatggttttggagggtggtttcgctgatgtgaagtctacatggcaaggttgacgttgatgtggtgcttaggtagcattaaaaataaaaacatatacgtgggacccatttgtcattaacacaaattttttcgacgcccacgtgtcacacactctctctctctccttcttcctcctccccctcccccttctctctctttcaatccccttcggccgtcggagcgagaggatgggcgctggaatagcggcaatgacggtgggcgggcgagagccggagtgacggggcggctctccttggatgttaggatctctaggaaatcgcacggcaaaggagggagaggagcatcggccccatccatcacgaagcacgacagctcgagctcgcagaacccatctaggcaggaggtggaggtagaggtgaaggcgaagagctgccgatcccctagccccatctccaacagtggcgacacaccattccccgttccccgttcccccagcggcacgccaattcaccatcaccctctccgcactgacggcacaccattcccctctctggcggcaaaggaggggccaccggcagcgtcgtcagcaaagccggcgatggagtaaaggcctccctctggcccctccgtcgagcagcgcccagctgccgcccactactgccctctccttcaccttcgccacagcactgcttgccaacgagcggcgccctactgctgctcgctgttgccctctcctccacctcccgccctcaccacccaactgcacaaggaagagagaatggagaagataaggaaggtgagggaggagaggatgacaagtgggcctacattttttttaatgacaaatggatcccacatatatgtttttaatagtagagatcagctgttaagattgttgtgaatttttttggaaatggtggtgaatatacatatgcgatgggaaaaaatcgatatgtcagaattaaaattagacatggaagctaaggtctaattcttttcaattaattgcaatttaaaaagaattcaactaatcacatgtacgtacaaccgaagccgttggctcatcatactcacatgagccttcaaagttcgtcaccacgcacgcgcacagtcgccgctctggaagcggaaggtcgcgcaccatggcggccacggggtggtttctagcggcagcagtagccgccatggccgtcgtcgcctgcttcgctgcgacgtcgtcatcgtcgtcgtcgcagctgcactgcggcacggtgacgtcgctgctgtcgggctgcgcggcgttcgtccgcgggcacggcggcggcgcccagctgccgtcgccgggcacgccgtgctgcgacggggtggccgggctgtacgccgtggccgccgactccgcggacaattggcgcgccgtgtgccgctgcatggcgaggctggtacggcggcacagctccaacgcgtccgccatcgcgctgctgcccggcgtctgcggcgtcgtctcgccctggacgttcgccgcggggaacaccaatagtaatcgtccctactgcagaaggtatggaagaaatcaggttgattttaaatggattcgttcaatttggttgcattgagaataattgagatttgagagaagtatattttacaacaatgttagttttggtttttgaagctgattaatatcggttttcattccctttttgcagcctcccctgacaggcatgagaatttggttaagaattgtgagcaaacacgcgccgatcgatcatgtagagaataaatttagttaggttcggagttatcatatcttgttgttgggcatagttacgtttacgtgtgatttcttttctctcgaatcaataacatattcatgctcaatgtaaatatgcaattcttggatttgatcggttaaaagagcatagttagcagacagagcaaaacgtatagattgccatgccatataggcatcatggtttcaaatgtcgatattgaaaaaaaaaatattggtactaataaacaggaatattagatatatcggagttatattgatgatttggaaaaacaataggataaaaattataaaaagggctcaaactgtttagaaaattacacagattgtatctacaaaattttgatataaataattatattgggatttgctaactggctgcctgctgatttatttttagttgtcagccgaatttttgtccatccgattctgcccaagattcgtgcgtccaatcttcaccacggcccacttgagaaaatctggcccggcccatctcttcgcgcaaaatcacacatccggtctcggcccatctctctgtgggctgttctagcactctcgtcccatctctctgtgggccacaccagtgaagtatcaatttttgtttcccatctatctactagaaacgatttgggcaaaattatgatgtgtgcttttgcttgtttgtggctgaaattacattctgaaaattttatggacatgcaatcctattagaaccggttttgtcttgttttgttgtatacttgtagggtttgttcagtattgtagctctagtttcctttgtcagatctggtcacttgtgtgggtagatgtccatgctgggttacccagtgctgcaaattttgtacagatttcaatttagggtgtgtttagttgacgttaaaattaaaattttggttgaaattggaacgatgtgacggaaaagtttgaagtttgtgtgtgtagaaaatttttgatgtgatgaaaaagttgaaagtttgaagaaaaagtttagaaataaactcggccttagagttttcctcacaagactctgtactagtgttgtggtagtagtactccctccgtttcgaaatgtttgacgccgttgactttttaaaacatgtttgaccgttcgtcttattcaaaaaatttaagtaattattaattcttttcctatcatttgattcattgttaaatatatttttatgtaggcatataattttacatatttcacaaaagtttttgaataaaacgaacggtcaaatatgtgctaaaaagtcaacgatataaaacatttcgaaacggagggagtacctcgaagaggcgagcccggaaaccactcgtttatttttacctgcatcaaccaacagcatacccccaacgaaactgaaggcgatgctattgctacactgcaagttttttatttgtttttgtcactattttaaaattttcaaagaagtggttgtcattttgtatttttttattttgtttttgtaattttttgaatttttcaacatatagagagagcaaacctgatccttttccttccctcctggctcctgcctattgcacttgaccacttgcgatatgaccgaagtgtctatacttttggtcgttgatttctatttttgtttcttttatgtaagatgtaataaaagaattatcggtataaaggaaaagagtgagacaaatcgtgcaaattgactcctggatgatagaatcaagccgacatagttttggatcttatttaattagtacttgtttatttgggaatattcgggaagtaattatatgggtgtgatgcaagaaagagagatctcgcctcatcgcatcagttcattgttaattaccacatgaggggaaattaaagggagattatggttagtctcacttccttttttttttctcgaatgcacccattgttgatcagacttgagaaatcgaagatttttatcagggtagggcgtgccaaattacaccgacaggaaaaactgctcagcatctttcgatttctcaagtctgatcaacaattacgccgcaaattgcgtttggttttcagttactgtattaattattataattactctgtaaaacggagcttgtgtgcgtgctagctcgtgaaataatcgtcgttgcgtgttgttcccaaccccctgccacgtgatgatacggttgcacctaacggtcagatagatcggttacgtagcaatcgtgttcgctatctctttttattagcatgatttttaaactattaaatagtatattttatatagaacttttgtaatgtagaagtatcaaataatttctttaaatttataataattaaaactcaattaatcatatgccattggctttctagctcgtcacgtgtttccttacttcgtcatgttcatcatttacgaacaccataaatcgtacaattttcagcggtctttttgagcacaaaaagtaaattattcttatatgctctttgttctgaatccactgtgcccacagaaatgaaacaatgttaattaattgaatttttacctgaggcacgcgtgaaatatgtgtcctattgtatttgacaatgaatcaattttcgggaatggaactattcaaatattaaaaaacttgtaagatttcctcaatttttttaaaaaaattctaagaggcttttgtacttacaaattacaatctttagtggttcttttatataaatgaaagtccacatgcacataaggctgtttcttttttttttcatcaactcaactcaacttccttgtttttcatgcccacactttataaactactaaacgatacatttttttcgaaaaatttctaaaggtcctattgattttttttaaatagctattacttaattaatcatacgctaataaatcactctattttatatgcgtgaggactagtacccatccttttagccgaacacaatttatgttcaatggcaatcaagttccttttatatattgtccgtatctatatagtaatataacgtatatagttcatcccactaataatatttctctgcatccacaattaaccacgtcgtcaaatttgcactgacactatatattgctttcctctccaacacagctccaccaaggccatttcaattgcatagccatgcattcgacacgctcacacttgctgttgccccatcaattgcactagaaaaatgaaaacgatctctggcttcttcaattactccgtacctccgcggcactagctactggttcaatttaggccgtgtttagatcctattttaaaatttttcaccctaccacatcaaacatttaaatgcctaattaagtattaaatatagacaaaaaataactaattacacagattgcgattaatttgcgagacgaatcttttaagcctaattgctccatgatttatcaatgtggtgctgcagtaaacatttgctaataacggattaattaggcttaataaatttatctcatggtttactgacgaattctgtaattagttttttattagtacccgaacactccatgcgacatactatataatacccgatatgacacgccaaaactttacaccctggatctaatcatctaaacacccccttaatatatgttggacgaaactgttgaggagccaggaagtctaccactccattactggttgcttgtatgctctaccggtaaaacaaatctgcatattcattcagcgagcaaagcatgttattttcaccttcatcattgtcatacctaatcaccaccggtaattcaacaaagtagacgcacaaggtgttaggtgttagcgtggcaattcaacaagttcatactctttccatattcattttcttttcccgtagcaacaagtggggcatctaattaattcaatcttctagtctgtttgcacatgaacaccctgttgtgacaaatcaacctaccggatctatccgtacacctacttctgttcagttgtgcccttttgacagttgtcacattttcactgtcttattgatgatgcttgctagcttgtcgcctaaatttgcaggaggttgtcttaaagaaaaaaaacctttcaaatgcagtcgagtgatgttgaatacggattcatatgtatagtttttccccataataggaactgaatacgataagtaacaaaaataataggaatcatcaattgaaacgaatgtgtttgaactgagtatatgtagaaatcgctccaaacaaaatgatgctcaacatcatattgatactggtttaggtgaagtagaccgatatttatgtccagataaaaggtaaatgcgttaagaaacatatacatttcaatagaaaacaaatagtgatccaagagtagtgtatgattttttttagttgtttttgccatttatggaggttttcccatctttcaaaagtggatgtcttgtgaaatatcaaattggagttgcattattatatggagtactgtttgtgcatacttaaaactacttacatattttttactaataaattcctcaaccgtttgatttaattaattgaaagttataggaggaaaaagattcaaccacagtttgcaatatcaacgtttccaatagactgctttctaacaaatatactttgtccggttataaatatttgacgatatgatttgatcgaacttttgaaactttaaccatcaataattcctagaacgcttagttcaaaaagaaggaaaataatatgcacagatttgcccagaaaagtacgatttttttaacttttgtaaaatagaatttacgatcaaagttgtgggccgggggatatgagaacggctgggtccccatctcccttgggtcactggggcactatggaacacatctagacatacaatatctatatcttcaaggcactaagatcagtacatgtgatgagaacacccctggctccagggggtgccccaagtaggtgaggtgccccggtaccaaggacgaccaggcacaatggccacccagaggtgaagcccaacaatcttcagatcccgagcactcttcatatcccgggagggggcctgagcttgtcccatgccccaggaaccacatgaggagcgcaactactttaaggagaagctgacaggactaggggtagctttaaccactcccttgcattaatgacgatatgatgtacgccttgtacgcatcccgttgacaacgtggggaacataagggtgtctataccgtatgtcacgaaggagggcccacaaaatagtaggggcaaaggtgcttttttcacttcggcgctcctcttccgttagtcaacaagagagaacattcccctcagtcggattgagggacatcaacaaagaccaaccatgacaaatttaatggagtagagcctactcccgcacatatatatcgacattgtagacacccctagggtataaaaagagaatcgatgccaacggaaagagggttcacattccagcaagctagcatacgcccttatattttcagtttcatgcattgtaactctattccaccatccatccataatctaagcacaggagtagtgtattacacacccgtgtgaccggaacctgtataatccatggggtttatcccttgcacgtgatttggaccatggcttgaaaccatctcctggctgaatctcttaagggggagtgctcacttccccgttagggaagttccatactctgacaaaatcttcaaaagtttaaccaaatctttgtcctaaacatttttaagggccttatatatatgactaaagggagtaaaaaacattcaccccaacgaagttttctcatgtgtttaattctctctttttttaaaaaaaaagtcaaaccaacatttgctaaaataattgtaatttggatcaccatggattttacaaatttataatctattaccacaaatttcaaatttagcaacatgacaactcaaacttaacaattttggacctacacactccgtagaaaaaaaagaaaaaaaatccttaatgtgaatctaaaaaatgattgatttgtagttagaggttgattcttttttatagggttaattggatacatgccactgcaaatgtgacaaatcaaaaaaaatgccactactatttacgttattagctggatggcaccgaaaatttttaaaattggaactatgcctctacgtgactctttctatcctccctgtcctctctcacgccaccatcctcaccgtcacgctgccctcatcctaccaccaccgccgcggccgacctcgcgctgcctccttcgttgacaacgacggcaggggcaacgacgcgccgaccagcggagcacggcggtggcagcatgcgggatggcttggcggcggctccggactccgacgagtcggcggcggtttgattccctccaagacccggcgtgcatgcggatggttctcgttagtgaggtcacaaggatggttcatgcacaaggaatcgacacgaagctcaccgaagcaataggaattgaagattgtggccatcggtcggagtcgaggaagaagacgccgatctccctccttggtgcaccgatccatatggttcttggagcatcttgaagaggacatcggggctaggctactggcgaaggagctcggcttggttaggttcacattggccggaatggcaacgacgtcatggaggcggtgttcggtgcgcgctcccgagccgcggtggcgtggtcgcgttcgcgatcatccatagcatgaaaatgggcgaggttagcggggatggaaccggtgtggtgaggagatgatggaacaaggaaaagatgaaggcatccacggagacattggagaatggagacattggagcgctctctccctcgacttgctcggttcgggaatggagtaggatataggacgacacgactgggaggagatgaaggcaagcctccccgtgcgtgcgctgctggggccaagctcgtggagccccatctcgctcctcatgctcctctcccggcggcgacgctatgcggcgtgagagaggacggggaggacagaaagagtaacggggaggacggaaagagcgacgaagtgatatggtttcaattttaaaaattttcagtggcatccagctgataacacgaatagtagtggtatttttttttaatttgccatatttgcaatgacatggatccaattaaccctttttaggggagtacacacaacgactcattttgctatcttcataataaattgagttgtgaacatcatttaaatactataaataattgcacccattgctcctcctctcgtgaagttcctctctaatataaataattgttgccattgattattttccttctcaaagttacagccacgtttagaacccgtgattccttttcgaatatttacgtgtacataacaaattcctgtaaaatttccacaaatatcttactatcaaatctggtgtgacctgtcatctgaaaaaagaaaaaactgccgtgacctgaaatgacaagtggacaaaagacgtgataaataaaccctgcctaaatgggaattaaacaacagccagccagccaagccagccagcgctggatgacgactgtccacaacaccacgagagcacgagcaaaaaaaacccaactaattttcttttcttctcctcaagaaattgatcagaaagagagacaagagaagagctagggtttcatctcatctccagccatggcgtccgccgcctccccgccgcgctccggcgacgcctccccgtcctcccctctcctcccttccccgacgtcccccgaccgccgcagcggcggcggcggaggcggaggacgcctgcttccggggctgcgcggcgcggcgcggttcctgggccgcacggggagccgccgcctgatgcgggagccgtcggtggcggtgcgggagacggcggcggagcacctcgaggagcgccagaccgactgggcctactccaagcccgtcgtcgtgctcgacgtgctctggaacctcgccttcgtcgccgtcgccgccgccgtcctcgccgcctcgctcccggagtccccctcggtgccgctccgcgtctggctcgccgggtacgtgctccagtgcctcttccacgtcctctgcgtcaccgtcgagtacaggcggcgccgggaggcgcgcggcggcggctttggggcggaccagggggctgcggctgatggggatttcaagctcaggtgagggtttgctcggatcaacccccaaaacacttcgtaatcctagtagatatgtgctattaaaagtatctcgaacttatgcattccactctggaatcaagtcgatgtaacagttttttttttcccgttgattcatcattgctataattatcgtattcccatgtcaattatgaattctgttggttttatattttttattcatttctgtctttgaagtgctggtgcagcctgtagtattagttttcgatttaccttcaattcaactaatagtttggcaaatgctactgtgtctacttatatggtaaattctttcttggatttttaacaacaaatttatttgatgtggcaattcgtctttcgtaatgccttcaactcatcatccttgagtacattacattgctcaaacgaagattattctattagtttttcacttttttagaactattcttatgtgatctttcagtgtgctgttgatactattgcatttgcaattttaaagtgggcattgttaggcaatgaatttgtggcatatgttagtataggataactgcaaattgaatgggcaagaatgaattccattt

SEQ ID NO: 23985 - DNA, 15227 bp, Oryza sativa
  unsure (1)..(15227): unsure at all n locations
ttactggtacgcacttagtagctgtggcatgtgaatgatagtatgtattatcattagtggctgtagtctaagatgtttatcttattgcccattattttgcaggctctccattgtgtttctggcatttgatgttttctttgtagtcttctgtgttgccttggcctgtgtgattggcattgctgtctgttgctgcctgccttgcattattgctatcttatatgctgtaactgatcaggtatgccagttcttgtttaggacagatatattcttcaaatggttgtgatgagatttagatgatcatatgatcctgtctctgctttgtgttctagatacattttcttcaaaaacaattttccaaatgcaattgcttatgttctatttgtgcaatttaagcattattactatattacacatacatcactctacttttgtctacagttcattttatatctcttaaagacatccatgtcttgaaagaaagaataacctcttctgctgtggtataaatactttttagtagaagtattacttcagagtggttttgcatgcaatgacctgctatcaacattgttttgaactcttttaaaggtagttttgtttcttttctcactatggcagttagttatcactcattatttctgaatgttccatgctaaatatgattttcaaaagtctggaactgttcttgttaatcagttatctccccttgacataagcctaataaaacagtatgtggactgatacatccagaaataatcatctcacattcattgcactgagactatttgtttgtttttaagcaggaaggagcatctgaagaggacatcaacaacctgtccaaattcaaatttcggacaatgggtgatgcagacaagctggttgctggaattgcagcacctgtgggtggagtaatgactgagtgtggcaccaatcctcctgttgaacacttcctttctgctgaggatgctgtaagttttcagtttcccccctgaaattctgttagcacaactgtattgttattctcactacatagcttgtcatggatactttggaatgtcatggcacttgcctttgtttattggacgtcaaggatctaatttgtaaccaccgaatacttctgtaccaagagtgctgcttgaaatttgttcatttaatcttcacaaaatcatagaagcatttcttagcagctaggcatgttaatgcgaaaaaattgtatcgattgatgcctatctattgttcataaactcactaaccatatttaatactccctccgtcccaaaatataacaatcgagtactggtttggacaacaactagtactatgaatatggtgaggccagatgtcctggattcatagtactaggttgtgtctaatacagtactagattgctaaatccctcgtgcactttatacaaactgcagaagataaacatggttgtttcaggtataaatttgtttagagcttgagattttgttttaccccaacataacagtctgtgactaaccccagccagtgtcattagtctaacctagcaggctaactctagtttagtttagtagcttagttatcccagttggaattatgtgaagtaggtgacttaacagatggtgaagactctgtgacttggtcaagtattaacatgttagattgtgatattttttaagcccatttaggtatgcctgaattaaggaagctgaacaggcttgtggaattgaagccatatgtatattactcttgtaaaaaaaactgtggacaaatcacacggtccccttgctgctgttgaaatctataatagtataatatgtaactaacaattaatttcttggatcttaatttgataccataccaaactgtacaagtgctatacggcacttcaagtactttaccaaaacatagcttggaactgctctggggaaaaaaacttggaatggagcaagttcctgttaagatatctgaaattgtatatgcatcctgtagtactttccaattccagcttttagtcaaattgttacctcatttagtttgcccttcacctgaggaaaaaaaactagtttaagctggccctccatactgatgctggatatcgcaaaattgacttgaaagatggagcaatgccaatattttcatggatggccaaagttattgaaacaaatacaactagtgccattttaagaggtattgtatcttatcgatcattaacccactcttgtacctgtcaaatgcaggagtgctgcatctgcttgtgtccctatgaagacggtgcggaacttcgagaactcccctgcaatcatcatttccactgtacctgcatagacaagtggcttcacataaatgcaacatgtcccctgtgcaagttcaacatcatcaagagcaaccttggtccagaagacgtctaggtttcacaggacgagcaatctgttgaaggattgatatgctccagttgcgttctttagctatgggttccttcaggtgtaagtatggggtataggtgatgcacagctggttgatcagtattcgctcctgaatgaaatgttttagcagtttcttgatgccggtagagatgtacattccttctctctaagtcaattgtgtcgcagattctcattttagccttgtaggaagtatttgaattgaggattctcatgtacgttgtgttagcaagtgttgaataaatacatggaaatgcagaggtttgtaagaagaaaaatggttgtggaattggagctttgttaacagcacatgctgtctccttaatatgcagtagacgtacattctacccctttggtgcttgatacccttgtctgcaatcctgttgaagcaaattttgcactttgttcgatgatgtttaagcgacagctggaaattagaaaggcggagtatgacggtaagcaacgcagccttaatctttcaccgtctcaaatcagagcaattcgatatttccagcaagctgtgtaattactgcttagggggtacaaactgcgaatttggctgataattacagcgtttaacttattccgtcaatgcaatggtacccaatatactctacatgttaaacgtgtaaattgcacaccacaaatacagttattgctaccaatccatgcaattgatattcacaggctcgccacgggcatgatgtagaaggtggctcgagacgtgtagcagagcttattggtgcccttgagcctaaactcaaccgtagtaaccaccacggatctgcccttcctgagtatctgcgcttcgacttccacttcagactgtatcaacagaaagagaacatgggcatcaggaaatacacacttgagatctaaaagccccccaacaagatgtacctaacacacacttgagctctaccaggaaatactactccctcgtatcctttttacttatctcaaggcatcgactgagtatctaacacacatgttgtaccattgtttttctaatcatatatctatgaaaaatattaaaaagataattacatgaatgactagtctaataatctcattttcgcatgtcaaaatcttaatattcagttcatatattgactttaagattttgaggtttaattgcacgcacgtatactggtatctaaaaaagagcagtctgttttttatgttgtgccttgaattgtttgtgctttattgcatgatatatgatggtgcgagttttacaatgctatcttttgctgtgaatggctaatacacattaaaggaaacacgatgcattcaaacccagcaggtctgaattctgaaattatgcaacatcagcatccattggctggtaggttatatcagggttcaaaattccggaacaaaatttctgaaatttcggttccgtcggatcctcaccttcccaatatgatattatttcaatcgaaatttttaattttttatgtgaatttggcaatattttgttcaaaattttggaccgaaatttccaaaatttcggtatatcggcaccctccgatacaaatgccgaaaatgaaagattgaaccctgggttatgtccatatcaagccagtgtgtgatgttcatttcatcgtctgttttggtgacaaatgttgcaggcaagtactttattactatatctgttgaaaaatgtgcttgcttgtgtgtagatgatttagttcatactagaaacaaagttccctcccctgttctagagctggatcatttaccctcttgcagtgttgaaatatatttaccactagtatcttgtacaacatcttcatcctagaacatcttcatcctagaagtgaggctaaaactgtgtccagcttccattccgaaaaatagcgcctatttattgggagattattcagcatcaaatttgcccccaattccccatgtaggaagcatccaataagtgcaagaaatttgtcttgaggatgcaatttttttctgaaaaaataaataaataaacaggttcgccagttgggtgagggaagtgtgtgctcacattgaggcgggcggcggagagataggcggcgctgagctcgccgaggaacatctccttgtcgcccgccgcggcgcgcgcgcacgccatcccgacgacctccgccacggccgccaccatgccgccgtggagcgtgttgtacgcgttctgcaagtcgcggaatcgagcagcgacgacgtcatcacgacacgctagggcaggaataggataggattcagcggaggaggagatgtggaggggtggggggcgcgctcacgacggcggcgggggagacggtgagcgtgcaggagacgcgcggcgaggccggggtggcggggacgacggagacggcggcggagaggacgccgcggacgagcgcggagtaggcggcggggagctccgcggcggccgggagggtcccgtccacgccgaggccgcggaggaagcgccgcgtccactgacgagactccgcgagcgacggcgaccggcgctccatcggcggcgccatctcctgatctcctcctttccctcgcgtttttgcttggttggtttgcattaactgcatgggtaggtgacagtttgaggaatcggagcagagaattgggccggcccaacgcaacggccatcgccgccttcgtggctttgcgatggtgggtaaaacgggacagcattagtaaatagtactccacccattctaaaatataaggcataatcacctctaacccaaagactaagaaaataattattatcatcttgtagtttagatcaccctaataaatataatgcatgcatccaatagaattagagaacatgacagtggatgttttaaaaaagtaataatttaatggagaagagatcatagttaatggtctatatgcatgtatgccttatattatggaacattaaaaaaagtggttgtgtcttatattatggaatggagggagtaatattacaagaaaattaatggattgccacttctaacggtgcgcttcgataaaataatactctaaaatatcagtttatgttacctattttatggaggagactcgcgcccaatgggaggggattaaaatcgggcgctgatgtcagcgtccgatttacgtgcaaaattattttaaattgatttttctcttaaattacttatctaaataatgattcgattgtaccattaaattcgttgcaattaaatcaaacaagactacacatagatatattcggacgaaaaaaaatttagcttattatttaattatttttaaatattgcacgatgttccaccaagtatatcggaattgtttcactaagtagatcgaaaatgtttcactcgtttaaattgggtgttgtttcaccttatataaaaacaatgtttcagcaaatagcgaaataatgtttcagttcaccgcaacattagatctatacatagtgaaacattgtgagtatactaggtgaaacatttttggtggaacaaaaaataaaacgaattcgagggtttccaaaatatgtgggtgattttttgcaatagagtatttcagttcactgcaacattagatctatacatagtgaaacattgtgagtgcactagatgaaacattgttagtggaacaaaaaataaaccaaattctcttaatagaaggtttccaaaatatgtgggtgatttgttgcaatggagtatttcagttcactgcaacattagatctatatatagtgaaacattgtgagtgcactagataaaatatttttggtggaacaaaaaataaaccaaattcctttaacagagggtttccaaaatatgtgagtgatttgttgcaatggagatatgtgtgtggataagtggcaggtggggacaggtgacacgtggtggggaccagagggagctggtgcgcacgtgatgtggtgagggaggagcgaccgatttttttcccctcccccgggcgaccgagaacgagcattctcactattttattctctctctttttacgattattttgattttttttagtttcttgtccataagaggccatgcgagaaataatgctttctcacctttctccttgacctcactccgaggcatctccttggcatcaccgaactagagctaccttttttaggctacgaaaaatcttaaaatatatttttagtctaaacctgaaacggataataatacggatccaaaattacaatatatatttaatactcctaccatccttaccaaaagtcaaatataatttttatcatgctagggatttaaactcgagaattctccttcacttgtacttatggataccaactcacctgaagtcaatctttttagcagatggatatgtttccttttaagcatttctaatcgagatttgaatcatgaatttgagtatataaaataaatcaaatgaaaaaagttgtcaactacaaaatcataaatcttatcgagatctataattttcatataaactttgtcacaatctgtcatgaaaaaaatcaagacaacatatccggaactagcactaatgtgattagggccatcagtgccagattataaaaaataccaagcactgatgtgagtggcattagtatcacgtatttgttgacgaaaaatccgtgcttggccgatgatgcctgatctgtgttggcacgaactaagtcgacgaacacaacggtctgggagatttgcttagctccagtgcagatccaaaattgatgagatacgggcgtgccagttagtttgatcatgcaactaacaagatatataaataacagatccaagagttgatcggctgacaaggcgatggaatagttgcgaccaatgccgatactagccgatcccgaaaccagctgatgttgatagggttttaaacaatcggctatatatcgaatgcatattctgatacttgagcaaataacgatatatagacaatctgctgatgataataaaaataatgatataatccaatataaaccaatcggctaataatgatatgatagaattaagtgaaccgatggttaaagcatacatcggctggaagtccgatatcataaaatccaaatgattagataaataataaaacctttgtcacaatgggctaaatccaacttgtaaataactcatcggctaaaaccccgatgaaacccttattataatcaaagacatgttagcttttatgattctatgcacgactagggatgatgcatcgcaaagtatgcaaagaagaataaagtctaaacaataaagcctttgactaatttttagggtggtggataccttagttaatataatctagcaagataatttagccgataccagcataaaccctaaaacgaatctcagccgatatgatcaaattaagatgttaaattaggttaactaagatatatgataaataagtagacaaatatactaaccgaatcagagcgatccaagaggtcgaatcgatgcagccttcaacaacaccaatatagccgatataattgccaggaccggcgaaacataggacttaccccttcgccgaagatcgaaagccgatgcagccctgcatcaggtgccaagttccgcaggtgataagtaaaaacctcggaaaagagagtggcgaagcggcgagagtaattgtattaatctgtgagagagtttataatgaccacgggtgtacatatttatacctatgggtagatactagtcctttttttgacaagaaaaaaaatttcctaaagataaaaggaaaacataaagtccttatcgggcactaaacacacttccctaaaaataaaaaggaaaccaacagattcttcctaataaatagatgaactgccatgccgcatcctccttgagctcggtcttttctggataaacttcctttaattgattaatttctttaaccgaatctaccaagaagctgactattatattggtgacgatattttccatcggccgatttcaagatgctgaaaccgatagtgactctgagcccatgatgacttaccaaattgttacgttaacggtattctaattaatcacccggcactgacgtcttttcctgccaacaggccaacccatccccattccaatcggtttaaaccgacattgattggttaatcatccatgccagatattcttataaaccagcaatggtatcttctcatcagtgccatctaagcatgaaaatgtccaggtccatatactacaacatcaatattgatgtttgaatagcattcactgtctgttcttcgcttcaaccaacaacgatgtataatttttttcagcgaaaccaacaacgattatttttggctgaaacgaacaactgtattgacatgtctatatgtcactcatccatgctagtatgtctatgtgtagcttaggcataccaaagttaataaacttattctccccagtggtaaacatgtagggccaatcgtaaaagtggcaaccagaaagtggcaagtagtcaaatatccctgagtaaatgcatgcttcgtcgatagattgtcatctgagtgaaatcatgacttcattttttttttctcactacaccatcgcaaggaattgagggtggcggttgaagatttaattgttgcaaagtacttagacacttagttatgattaatgaagaaaatacaccttttatcaccaaggctgcaaaaaatagaaggcgaagaaatcctttcattcgctagacggcactactggaaaactgatctttgctcggtcgccccaaaaccacaatagtcccggttacaaaaagaactgagactaaagatgatctttagtcccggtttaaaaccccacagccattctacgatctttagtcccggttcatccactgtcagtcgcttgacagaggggcgggatctttagtcccggttgacaccactttagtcggggagtaaagatctcctagatcaaatcacgcgtagtatataatccctattccctatcctctcccctacaaccagcctcaatctcctcaacaaccggcctctcctctccttaaattcatctccctctcctcctccccctcctccccttcctcctcccatcccggccctctcctccccctcctcccttcccatccgatgcccagcaagggccgcctcctccccctcctcccttcccgtgcccagggccgcacgcggcaggcggctggcgggcccacgcccggcggggccgcacgcagcaggcggccgcacacgggccgagtagcgagcggcggcaggcggcgctaccggcatccattctgttttctttttctttttacaatttgtgattcactgagatgtataattttgtgatttgttgtatggatctgagatgtataatatgtgatgtatttggtttgtgtgtaatttttttaatatttgtgatgtatttgatttgtgtgtacaagtaacttaagatttgtgatgtgaatgttctaggatgttactttgatttggggtttgatttggtaatatgtatcccactcgatttgggagaaaatacatggattaaactctggctaaaaaataatgaaaaaaagaaaaggagacctaatgagactgccgctgccctctctctttagtctcggttggtgttaccaaccgggactaaagataggtatatttagtcctgattggttatttcaacctggactaaagatgggtatctttagtcctggattactagtcccggttggaaaaccgggactaaagggggttaccaaccgggagtataaatggtttctccaccaatgtgggaatacaaatcttcatcactaatatgactttagagacaaatattaatacacaaagtaattatgcaagagagctatatactccctctgtttctaaatatttgacaccgttaactttttagcacatgtttgacattcgtcttattcaaaaacttttgtgaaatatgtaaaactatatgtatacatttaagtattttttcaatgaatcaaatgatatgaaaagaattaataattacttaaattttttaaataagatgaactgtcaaacatatttaaaaaaagttaacagcgttaaatatttagaaacggatggagtattcaattcccgtattatgagattgccctatggaaagacttcgataatggatcgaatacctaacacagggcttatcttgtagtcagtgaatcctgcctccttgaataccttgcaccattctttctcacctctctgcatgcctggtaatgtagtcgaaataagcagatcaaacaacagttgggttccatggcacattgcttgggtggaggatccaaccacaacatctatgacaatgaccttccctcctgcttctctggaaggaattgcctccttgcatcgttttagtatcttcatgcagtcctcatcactccaatcgtgtaggacaaactgcaatcaagaatgttgttaattaccatctaaaaatgtggtaactaagctagttaatttgatatataccctgtacatcagaagatgtcaatacacatacttttgagcgcttttcaacgcaaaaccggttggattatatgaccattaggcatgttcaaaggcatttctatttagagactatcctcatacaacaattgagtaaacaaaatactctcaataaatgcaccgagccaatttttgtattatctactccctctggcggagggtgatcctctctagcgggaggctgtgagacccccctttgtgagctcggccgggggaccgggtgcaatattgaggaacgtgttctcgcgcgagcgaggtgaatctccgggaatcaagctcacaaggtggaaggcgagagagtgagagagagggtttatacaagttcgggccgctatcaagcgtaataccctactcctgtctgtgtgatgaccttcgtatggttacaaagatttaagatcctcggagtacaagctagggcttggccagcctctttccagaatctggttttctaagagatgtccctttactcgtagggcacggtcctccttttatagacgaaggggataccacatgcattgcccctacgctctccccgcgggataggggcccacattgcctacataaaaagcgtcttgtgccttgggccggaagcgatccatgcggctaaccttgggtggcccataccgaaactttacggctgacacgggagacatcccccatcattccctattaaatgtttggcgacttcgtgggcacacacacattgggcggaccaacctgcaggacccacccctgtgcatgatgggacaaggcatacctgcccccacgccgtctgacacaaaccgggacgtgggtggactgccgcctgtcccatccgtccatcggcgggtcacagaccggtcaaaaagcggccgcaggcgcacgtcgagcgatctgtggcgcatgctgagccacgccgcataaaacacggcgggggcggttgcaacgccgctcataaatgcgcctggcggacggcgctcccgcccgctcaagcccccacatgggccttggggcgatccaacccctcgggcccgaggggtgtgacggggcacctcgagcccgaggggaggggaagaaagctgccgctctctttccaagggcgtggcccattcggggggactgggcccaccgtatgcgccacacaggaagggctttctttccccctagaccagggacccccaggggctttttttcccccctgatattatgacttttttctataaagttagtgaaacttagagcagtttgactttgaccaaagtcaaaacgtcttataacctgaaattaagggagtagttaacaacttgagcctgctactaattgccgtgctattagttgtcatcgtacatacctttaccggaggatcaagggtgaatagccaatacggtccctgaagtttaacttcgggctcagtttagtcctcgatgttttaaatcgtccaaacaagtccaccaaattaatcatttgggttaatatagttcttggacctaaaaaatgccacgtgagcatgccaagtcattctcgcatgcagcggtaggaatgatatgagcattccactcttatataccatatagaaaagaaataaaagacaaaaaatataacaagctagcctaggctcagcattgttgcagatgggtggccgacaaaggaatttatgcgaacagtgcttggctgagcaatcatgagtgacaattataaaacgatcatacacgtgtgaaccattttatcttcttttttttctttcttttctatatggtatataagggtagaatagtcatttcattcataccattgcatacgaggatgacttggcatggtcatgtgggactttttgtgggtccaaggactatgttgacctacatgattaatttggaggacttgttaatttgaacgatttgaaacctaaaagactaaactgagcccgaagcaaaacttcagggaccgtattagctatttgcccaaggatcaatgatttagatctcctgcttcaccactctataaatgtttaaccgtcatttaggaacatccaagcatgcatgccatgttacttttttgacacatgtcttaattttatggtatctcttatatagtatacatctgtaaatattaaggaccgaaaaatgtccatggagagaacacttcggtgtccaaaccacaaatagtgtcacaaattaaaaggctagaaaaaaaaaactcatttgtggtctagcaaatccttttcacagttgtattgtgtggttggcaattcattatataatcccgccatttttaaatatgtatcactgtcaatgttttaaacatgacatttgactattcatattacatagaaaagtatgtaaatattatttactttgttgtgatttattttatattaaagatactttaaacccgacttatatttttatacatttgtactacatttaattaaaacatatttacactaaatcttaaataagacgaatgatcacatttatattaattcaaaagtttattagcatcgttattaaaaacggagggagcacatttcatataactcaccttgagcaggagtgcatcagctcgggggatgaaatccatcatatctcctgcaacaaacttaacaacatcgcggccgcgatggtccgccggaatggaatcgatcacgtgaggaaggtccagcacggtgcacttgatatgcgggaacgcggcggccaccaccctcgccgccgtgccggtgccacctgcgacgtccacaagagaggtgatcttgtcgaacacctggcggcccgcgccacggatggccacgtccatgatgaaggccgagtcggccgccatggcgtcgttgaacagctcgccgagctccgggtctcggctgcagacggtccacagccccgcgccgtgcgtcatctcgaacggcgtctcctcctcgccgctcgtgagccactcggccatgctcgtggccggcgtcacgtagatcggcggcgagagctggaggagcacgaacggcagcaggctcctcccgccgttgccgccggtggcggtgacgagcagggacgacacgggcgtgacgcggtagatatcatcgtcgtcctcctcctcgtcatgcgcgaagacgcccgaggcgaccagcacgcgcatgacgcggcgcaggaagtacgggagcttgctcgggtggagggacagcgcggcgcgcaggtcgtccatggtggcgcggccgccggcgtggtggatggcgtcggcgacgccgagcttggcagcacagcccagggccatggacctgatgtagcccaggctgtggttcatgagctccgtgctggcttgcagtagctgctcgtgctccataacttggctacttgggcgagcttggttcactacaatatctataagctaaaaaattacgggtaagaatgggcgtttggttacccgtctcactctcctcacataattatattaccacatagaagggtgtccgtgtgtgtttgtagggataaaagtgcgcatgttataagtgtctatttgtactgtgtttcccaacttacacttccacattaaacggttcaatttttgtaaaaaaaaaattacatgaaaaatactttaaaaaacacattaatccattttaagtttttttaacaaatacttaattaattatgtgctaatttatttttttttcgtgtataggagattagttctaactcacaccgaaaaatatgatcttagaccccgaccacaggacgtactgatagtacaatatgccaacgtcaatgaagttacacgacttttccacatataatatagtattagacatttggacaattgcagatagcaaccaaaaccatcgctttggggtgctagatgtcatcgtatctgatactgattgttttgggatcggtacatgtcatcatacccttgtctagaaggtaggggcgacgagcgcagctagggattcttccgaaaattgcgggccacgcacctcctacttttccaccgcccactactttctgccacgtatccatctaagattaaataagagtaactggctatggttatatctgttctatacgacgagttttttttccacaaaacacacgccattttttattgtttgaacatatgaatacacatgtataccatattcttataagcactttcagaaggacgcgactagactacacgtgctagcgtaatacctctaaccagcgatgcgctactttttttttttttaaaaaaaaggttcattcttttccccacgtgagtgtgtcttgctaaaaaaaaacatgcgaacgntacactcattagtactaagcagagcccacgttatttaaaaaaaaatatatgatatcctgtctttcctcatgtacatccttccaaaaaagaca

SEQ ID NO: 23986 - DNA, 1719 bp, Oryza sativa
aactaatttaatgttattttatgaaaagttaattcctttcagaattgagttacttctataatgtgagcaaatcacttttaaatatttgaatatatttaatattgtactcatcttgtcatacattttaaatagagtaagtgttaacagcaaaatttggtaagccccgaagtcattatcggccgatgggaattatcaagtcatcaatagtcggattattgctatattcagttaaggaaattaatctaccaaaggaagtttatccagaagagaccgagttcaagtaggatgcagcatagtagtttatctattaattaggaatagtctgttaatttccttttatctttaggaaagtgtgtttagtgtccgttaaggactttatcttttccttttttatctttaggaaagtttctttcttatccaagaaggactagtatctacccatagatataaatatgtgcacccgggtcattatgaactatctctacgatcaatacaaattcggcgcatcgccataccttttacttttctactttttcgacgagtttatacttgtcatggttgctttgcatcggcagggctagggctttgacactctgatctcgtcaatgtaagcacatatttatcatatatattagttaatctagtttggtagttgaatttacttgtatcggctaagattcgttttagggtttgtgtcagcatcggctaaaatgttgtactagattaaattagctagggtatctagcaccctgaaaatcaatcaagggcttgattttctagatattatgtttcctttcatactttgcgctgcatcagccttagttgtgcttagaaccataacctctagcctgctttttgattgccaatacggatttcatcggagtttcagccgatgaggtatctagacgttgcatcggcttataacgattacatacaagttggatttagccgatcgtaacaaaggtttcattgattatatgatatcggacctctagtcgatgtctgctttaaccttcagatcaatatttattctatcatatcattattagtcgattggttcaatggattatataattattgttatttatcctcatcagccgattgtctctatatcatttatttactcaagcatcagactctgcattggacatacatccgattgatcaaaaccctattagcatcggcatcggctagtatcgacatcgactggaattactccattagcttgtcagccgatcggctcattgatctactatttgtatatcttgtcagttgcaggatcaaactgactggtacgcccgtatctcatcaacctttggacctacactagagcttagcagatctcccaggctgttgtgttcgtcgacttagttcgtgcccacacggttctggcaccattggccaaatgcggatttttcgaaaggggactgtctagccaatagacagctgaaaatttttatggtttcagccggatttttccaccacacgataaaacacgtgtcatgatctgccgcctgccgcccacctctcgcgcgccagagagcctgacgctgttttgtacgggttctttcagactctaagctttgtcccatttgtttggcacacaacaagtccggcaaaacataatctttagcaagaaaaacaagggcagctcaaagtaccaacagtgcaacatgaatacctctgcctctgtctccttatcctaccaaaacacggcat

SEQ ID NO: 23987 - DNA, 680 bp, Oryza sativa
ataccttattaaccgcactcctagcaaggttatcaactttgcatgtcctttagaacaattgttcaaggaaaaaccaaactatacagcattgagaatattcgggtgtgctgtttggcccaaccttcggccttacaataaacacaaattagctttccgttccaagagatgtgtttttctaggctatagtaacctacataaagggttcaagtgtctagaaattgccacaggcagagtctatgtctccagggatgtaacctttgatgaaagcatttttcctttctccgaactccactcaaatgccggcgcacgccttagagcggaaatatctctccttccaccatccttggttccgcatctttcttcattagggggagaacagaataaccatgtgcttaattatccgcctaatgttactgatcagtttggtgaagaaaatgcagaaatcggtgaagaaattgtagcaaacggtgaagaaaatgcagcagcagcagcagatgaaaatgcagcagcagcagcaaatggtggtgcacaggacgacgtgcatggtgtggcatatgatgcgtcgccggagcactcttcgcctgtgacagatgatgcgacggcgtcggcagctgagcagcatggcaatccaatccaggaggagcacctggtgcaagcgtccccacaaacagcgtcgtcca

SEQ ID NO: 23988 - DNA, 710 bp, Oryza sativa
atttaccactgatgttaggttaatgacactgtcggcacattggctggtgggaggtatgcggataacagtgttgttgctgctataatattgggcactggtacaaatgcagcatatgttgagaatgctaatgcaattcctaaatggaccggtttaccgcctaggtccggaaatatggttagtgtgtgaataccttatgcttgggattatcattagttgtctatgtcttatagatgatcaatgccaacactcttgaatgttaaccctacttaaaaaaatatgtaaacgtggaattatttggtattctctaggtaatcaacacagaatgggggagctttaaatcagataagcttcctctttcagaattcgataaagcaatggattttgaaagcttgaatcctggagagcaggtattctatccccagtattttcctctccttttagttttagccttttaggtggaccgcattaacttgtatgtattttccaacagatatatgaaaagttgatttctggcatgtatcttggagagatagtgcgaagaatcttgctgaagcttgctcatgatgcagctttgtttggggatgttgttccatctaagctagagcaaccgtttgtactaaggtatatttctgtaccatctctcttttgatcttcattccttccttttgtcatggcaaaagccgttttacttagttgttaacggggtgcag

SEQ ID NO: 23989 - DNA, 3575 bp, Oryza sativa
  unsure (1)..(3575): unsure at all n locations
atggtgtgtttaattcacgtcaaaattggaagtttaattgaaattggaaacgatgtgatggaaaagttggaagtttgtgtgtgtaggaaagttttgatgtgatggaaaagttggaagcttgaagaaaaaattggtaactaaactcaggccttacggggtggtttggtgagagggactaaacctcacaaaaaaacaaaggcctgttcaccttgatgccattttcaaccttatcaaattttggtaaagttgtcaaaaagtgactacatttaatttactgccaaactttagtaaatatataagaaatcctgctaaaattttggcaataacaaaatttaataaggtttattttggctacaatctaaacagtcctaaatccctcccccttaaatgctgatgcggtatctgataccgacctgtataggttgatagctgaaatggcatggaagttaagggaaggaagaagtaaagagtacacggacgagttcctgccttcttggcactggcagatcctttgcactgaagacaaaattgtggttgtttgttgcagtgtaccacaactgcattgctttatggatggcttaaatgttgacgtgcatttgatgtgaagcatcaggcaaaaggacgctaaaatagtaccctccctacatggttgcaaacggtggttgtctgataacacgtccagagctggtttggctcggaaaaagagtggccaaattcattgcctgagcgtatttggacgccgagatgattataggtgtccaaacgggcggcacggcccggcccggcacgggcacgggtccggcacggcccgtttcggcacggcccgttaggcacggctgatgaaacgggccgtgccgtgccggcccacgtgccgagccgccggcccaagcacggcccgtggatggccgggccgtgcccgtgccggcacggcacgcctgcggcccacgggccgttcggggcacggcggcccgtgaaggcaggccgccagcctgcagtgcacagtgtttttttttaaaaaaaagcaaaggaaatgtataaggaaaaataataaaaatagaaataaaatgtttaaaaaaaagtaatgatttactaatgttaaaaaatgaaaaaatggtatttaaaaaatggaaataaaagttttttaaaaaagtaatgatttgctaatgttaaaaaaaaagaaaaaatggtatttttttgttgtgttgaaaaatttaaaaatatagattgtgattcattattttgaaataatttaaagataaatccacacttgcgaaaatattgcaaaagaatttgttaaaaatagtaatgacctttattgatgtttatatcattacaggatacaatgatacatgctgcctcgttaaaaactttgtcatgtaaaaactcataggggaaaatgagaaaaccatgacaaagaaaagagtacagctcaaaggtcagaactacttctaacaaaattctactggggttggtctggatccaggtagagttgctcgaactgggcggccaattcttggttgtccgcagtgtattgggcatgttgtcgagcaagctcccagtctttaacgcttagtagcatttcgacgtggtcgctgcgcagagtcgtcctccggtcttcgatgattcggccgcatagactgaaggccgattcggaggacaccgtcgacacgggcaccgtcaacacatcccgtgctagttttgaaagcacaggatatgttatcttgtggtcattccaccacccgaggacgttgaaatcttgtgcttcgtggtggatggcgtcgctgtccaaataaccggacaactcttcggccacaacatgcgaagaggcgtctccacttgtagccgacgaactgccaccaccttggattgaacttgaagacgatccaccccaaatcctaccccactgtatcttcttcttacctgtagtggggataggagggggtctctgctggcgaacttcctgaaactttacttcatatcttctaaaaacctcatataatttacgtctaacctcagtataaaaagaactataatctacacctatagtatctccaacaagtgataaaatagcagacaatccccttaatttacacctaggatctaaaacaaaagcaaaagcatacaancataggtatatttttccaatatttcaaatatttttgtttcatgtgaaagacaggttcagttagaacgtcatcattttcgtattctttaaataatgtagcaatttcaagaaggttgtgcaaaattatattagcagttggataataaacttgtgacaaagttagagtacaatcataaaaagtttctagaaattggtgaaatttttggacaattgcccaaacatgctcgttcagtactgaagacccgtcactgtttcttgggccaccacgtgactgaacaaaatcagaaagtaaactactataaggtaaaacaacttttaacattaaatacgttgcattccaccgatgctctgcatcggtggcaaacttacgagctttcacaccggccgcattgcaaaacctctttcattcagcaatccgcgggttagaagcagttaaccacgcgattgcttgacgaacagcatcgatgtggtcacctaccctcttcatgccagtcttaacaatcaaattaattatatgacatgcacaacgctgatggagtagaaaagattgagcatacacacaaaataaaggttgcaatatttcaatagccctagaattagcagatgcattatctagggtgacagcaaatattttatcagcaagattaaattcattaattacttccctaattctttcagctatgttttctcctgtatgtgagacatctattaacctaagccctaaaactctcttttgtaattgccaatcatcatcaacaaaatgaacaactacgctaagataatcctctctagctccactactccatatatctgaagtaacactaacagagaaagtacatgtactaaacagttccttaagtgcagttgcttccttgtgataaacattctctaaatctctagttgatgtttgcctactcacagctttaaacctagggttatgagattgctgaatgtaatgttcaaaagcaggggactccccaaagttcaggggtaaatcttgcctggcgattaaccggacaagagattcccgagcaaccatgggatcgtactcccaactgcgtaccgtaccgtctgggtttaccataagttgctgctgccggagttgtattccttgcttcttggcacacgactccgcatggcgcttgaggtgacctgtaccaccagaagaacgagcagataaaatttgcctacatattctacaacgggctttcgatacctcccttccgtcggggcatgtttcctttatctcgtcgaagttttgccacacaacggaggttctcgatctcttcgagccggtgtgtgtcgaaacacttccgctcgcggttccggaaaatccttccgaagctgtcgccgcctgaaccggtacctcctcacgacagccgtatgaacaggtacctcctctacagatggtggagttggagccgatccggatgtaccgtcaaaccccgac

SEQ ID NO: 23990 - DNA, 1405 bp, Oryza sativa
taacgaaaagaaatgaagttatcgaattcaatcaatagtttccacagttgtgaaagagggattaacctgtgagttagtcacagctgacaaacttctatgacaactgacaggaggaaattggggacgcagctaacttgaagtaaaggtgtttggatagctagagtgataaccaaaaaagtgggcaagttcacacgctctaacagcaggaccataggatattccatatgctgctgctgctgtattattgatgagccaccagcattctgtagctgttttcttgctctcttaatttgcaacagaaatcactattatgatctgaggattgccctgcagttcagtacaatcatggcatcgtactgtacacacttttggcacctttgtcaagaaatctataacttatagaattacaccaatctgttatatctgaaaaagagtaggtcatttacaaaatatgcagtttgtccactgcacctgcaagatgctattttcccattatcataatcatctgtacaagccaaaaacaggtcatcccccagaaaggtgatggactatggtttgcacaattgatatgtctggaccctaatatcaacgatttgctacttcacagggtcagctccaatctgtggaaggacataagaggaaaacaaattgagggcagaccttaacttgaggaagtgaatccatttgacccaagtctatagaattattttatataactaatataagtgcaatactatagcatggtgttatataacacaaaagtgcatccatttgatccaagtttaaccagagatacagtactgctatttatgaggaaaatggcgcctgttgaagttgccctatgcttaccatgtcatggggaagttctgacctcctcataaccctcaacctcttaacagtcgaaacaaataccctgcagcagtcaaaagcattagttagatagatagcagtattcacggcacatccttcgggctagtttgaatttgctaccttaccaaaactttggtagggtagcaaaccaaacatctgtattaaacactaccttcgctacaaatttggctttgctcatgaactagtctcttatgggcatagtttggcttcaatccaaataaacattttttaactttaccctaccaaagttttggtagtgccaaaacttacccaagatttggcactaccaaaattttgctggggcatcaatccaaacaggcccgaaacaaatcagtatgacaggctgacaccgtatcttgtatatggctagtgctaataaatatacagtaggagtaagcaacaacaaaagcttacttccatggtatgtccccagctaacattctgtctccatcattgtcttcatatactaaagtgtatacaccagttccatccaacaaccctgaaaatattttgt

SEQ ID NO: 23991 - DNA, 2386 bp, Oryza sativa
gctacttgaagagttcagttttgcactcaacttaggccggagaaagtgtcaaaacaaacgtgtaacatattctaaggtcaaagtgaaagctggaaagagaaaccgggaagagataggacttgtgatcatcaaatcaattcatgtcacaacctcaaagacgttttcgagcaagggaaatggagcctgcaaccatttattcggcaacaagataaagcactttcaagtctcgtgtcaaacttaagtctttcacgacgtgaaagagtggctaccaactcatgtccaaaagcattttcggatggacgcgatgtaactcgccgaaattagcagacaaagagattcaagctcatgcaccttgcaaccactcaagaattaagataagatcacgtagcagagaacatcaacagagcaagcactcaccactcaccagacaccaagaacagctgcaataacctgtccaactctaaggctcaacaactccaggaatggctatcagaaggccagaactaacaagaagcagctagcttttgtactagtgtgtgtgatgcctgccgttcttttctattggcctgctgcttcctagtgcccctagagctgagctctcctttttatccttgcacttttcagcctatctgttcttggcaagcacgcagttggatggctcaacctgtgaatgatgcaagtgtgtactagtaggcatgtagcacgggttcctttgcgttcgtgtgtacgtgaccgtgtgtatgggactggatcgatgattgggaggggggccaggtgcaccgagcatcgatcaaatggatctagcggaattgagatcacctgcagttgtttatgactgcaactttcgcagtcatacaaccattgttggatcaaatatcaagggctcaaatcacacaaaagtactgttcatcagatactgtagcagatgaatcctgtagcgcgtactgtagcaagtgataacaaacagtactggtactaaatcatggcgttgaaatcttcgatccgatggtattgaagacctaagactgctaattttgcagtccatgttcaaactgcgtgggatcccaatccgatctagcgacgcctacggggttatggcttatccaggcaagtggggggattggtgatgtgatggatgcggggtttgttagtattggtttattatatcatcgtgtagttgttgtcggatggtggtggtgtcatggtgacacatgctgcaatgcttcttgttctttcttactacactgcccttctgggaccactgtcggcgttgggagaatgcgttttctcttgatttgattttctgatcgctgtccactttgcatgtgctgattgctgaaactatgattttgatccatgctgatgaagaacacgtacctccggagctacggtgttacttactcttatatagcaacctaatactagattgaacagattttaatcgtacgaatttaatcaagtactaagttgttatataatttttgaaacaaagggagggagtaatttaatttcgttcataaagagagcatgggttcccatccttcacaactgctgcaacttgtaggaacgttcgcaacttcgcatgaaggtatagtgcacgcctacgtgttgccgctgcaggacgatgtatgctcctttcccttgcttgcccatgacgagaactcaacagaggccagaaaacagctagtgcaccggaaacacagatgcatggttgcgagtagtgcaccggacgcacgcacgcgccatgacatggagtatattactgtagcacactacgggatagtggactttgtggcagctagcctcgccctggcgcgcgacgcgaccacgcgagagaggcagagataaggagtggacttttgcgcgcgtgcggcgcgtccgccactgcgtctcgtggtcgccgatcacgcgcgcgccggtgtaagatcgagagatcagatggacggtgtggtacggtactccgtatccagtggtggtcctggtctacagcgctggcgcgctctttcctcgctcgtgcacgcaacgcacgcgcgagcaccaccgcggctagctgcgcacatcgacgaggaatcagtgcgttcggtaggcggtagcccctgtagacggtagtgtggctccgcaccgcagcgacgactcgcggcgccgaggtgcgctttggcgcagacggccgaccggcccatgcgggcaccgaatggcgctatcgaatatcgatcttggagacttggacatgcaggctaagactgtgccggcagtgtcctgtgtcccggtctttcttttctgcgattttggacatctacagttctacactttcatggacacggtctgttgatttgcaactgcagggttccgaggtacaccgaccgtgttttccaactcgacctgttcg

SEQ ID NO: 23992 - DNA, 2757 bp, Oryza sativa
ccagaaatgaaatacagtgggacccacgtgtcagacgcaacaaaatccctacccctctcttccctatctccctctccttctctctctttagctcttctcctgtaggccggcgcaccatgaaggtgatactggtggcagtcccaaaggtggtatccacgaccaacagggagagggccaccatccctgccgatttcggttctccctcaccttcgctgaccccgcgcgcctccctcatcgttgtgcaccgtgctcatccacggggttgtcctggtcgttccctagcggcgtaggcgcaatgctcgcctcgtcgatatggcaagaatctgtggtgccctctacgaccctaccaacaccgagggggaggctgactacaccgtagctccgtccgtctccaccgtaccctacattctaccagcccccaccatccagttgtgttttggcactgccattagttgcgacgccccacgtcgcgtaccaccattggccacaacgtcaacgtgcctatctgtgcccccacgtcgtgtcgtggtgtccaccgcatgccaagttgtgagaggttaaacccggcccaattttgggaaaaattttcctttaaggggcccctttttggcgtccccttcgactcctaattagaagattggggtagggttttttttgtgtgaatttgacatgtgggtcctaccatgtttcatcacctaaaagagttttggaactatatatttacaccggttttaacaattgagtatgtgttgtacttggtttttcgatgggctttagtttggggtctatctataatacattcgatagtttttggaggaaaaaaacttgtactaaactatagtataattaaagtgtaactaaaatatgtaaatttattttgaaatcaaaacttgcactattactccagtgagtaggagggtgcgggttcgagtccacaaccaattcaacagcctaaaatcaaaagtttttccctaaaaaaatattgcaagttacctggcaatttctttggtttgtactgccgtgtcggcgaacaagtaagacgtgatcattaccgtgcagcaaacgcatgcgcttttcccttttttttttcatggcacagtttttttttcctgctaagtgtgtatacatcaagagtttgtatttctaagagtaaatttcacaaaatcacaaattctttattcaaaatatcacaaaactacatatttaaaacggtgtatcacaaaaccatagatttaacaacaaattcgccatgaaactacatgtttaagataaagtactataaaattatagatctagtaataacaaaattatcacaaaactatgagtctagcaccaatttaatcgcaaaagtacaacatttacatcttcaatataacattagttctaagagtttaaactctaaaatatgcaattttgtgataacatcaatattaaatatgtagttttatgatacttggtattaatttgtaattttgggataatgcctttaaatctctagttttgcgatagttttgttaaagtatatagttttataaaatttactctttctaattcctgttcggatttcaattcaaattcagatttacatgttttatatctatattataaggtttagcttataaagtttttttatataaactttctatgacaacttatcatgatgggccagacgcacgtggggtcggccgaaacatattcgtgttcctggccgcgcccgaacattcacacattagatctaccgtcttttttttttttgaaaactaaacatccattaatataaaccgacagagttcacgggaataaatcccagtacattgccaaatagataaagagagagcgtaaaaccatccgtttctaaagaatggaaacctgcactaaggctacaaacttcataatgaaaccacacagcagataaggtgcacatcgatagggagctgcggcaatgccgcgacgaatgcaaccttgggcctccttcggcgtgcagcccgcttgacaaaccggtaatccccatccggttgactccacaaagactgcacaaaacggaggtctgctgctgagccatagattttggagtaagcaacaccggactcagcaagaggtgtccacggagttcgtcgttaaatctgaggagcgtgagctcaacccaaacaacaaaccctgcatggaacaagctgataggaaacatataggaagaaggagcccaaatccagatctccaaacccactgaaaaactcgaatggtggcaaacgaactgctgtcttcttggatcgacgtatggggatggggaagagtaatcctacgaatcttgactgatggaacctaagcattgggagctctcgaactggcaccagtgaaatcgtcgccaccacgccgacgggttgtcatcaagcaccacgagcagcaagctctgggcgacgatagcaccggacgacgcaagccacgagaagtcaccgcagccatcacacgagatggggcgatgacctcccagccactgacgacgaagcagccgacgctgtggccatagatgacgaagcagccaacaccgtggccactgacgacgaaacagccgacgccgtggccactgacgacgaagtagtcgacgccgaggccgcaggcgacgaagaagccgacgccgcggccacaggcgatgaagccgacgccgccgcaagaagccagctccaaccgtcaattcatccacaggtctacggatctcacacctccaccgccaccaaccgccgccgccgcctaccacaccgg

SEQ ID NO: 23993 - DNA, 2841 bp, Oryza sativa
cttcatgtccagtagttggccactatttgtccaaggacccaggatagaccaaaagtggctgcctaactgttgggcttttatggccaggcgtatttaatcggttgaatcggtttgtcatgaatatcctagcggaccatgggaaatctccaggtttaataatgattttgaatgttgatgctcagctcatcagtttgtgagttgtgacattgatcccgagtttgatggttaacctgctgaaagcgtgttcttgcttaggctcaatctggaggcacttgacacacggccatggaccgaccttcgcctaaccatgcgcacatctcgcgtaaggcaagtgcgcactgagctcgtctttgtttagtcatggaaaccgcatgccttaatttgttaggagctggggtaatttttttccctgactagcgcgggatggcggtgcgttgcaatgcgaatggaaaagagaaccccatcacacatttaaagcctcaaaagttttagaaaaaattaaggtcacatttatcatcattttgtacctcacttcaatattttttttaagggatataaagtctaccaaacctgtcgatagcaccactatataggtacatgaatgtacatctaaggctgtaacactggtggagaaaccatctttacttccggttgggaaccccgtttagtcccgatttttcaaccgggagtaatgattcgggactaaagatacatctttaatcctggttagtaccaccaaccgggactaaagagaggggatctttagtccaaccgggactaaagagacaatagcgacagtaccagatggtccctttttctatttctttttttctttttattttctcccgaatcaagtaggcaaatccccaaatcaaagtaacatcccaaattcacatcaccaaatccacatcacaaatcataaagttacttatacacacaaatcaaatacatcacaatatcctaagaaattgctcaaatacatcacagatccaaacaatgaatcagaatttttaacttctcagtcaaatacatctaagtgaatcatcacattttttttttaaaaaaaagaatgccgccgctagccacgaccgccgggcgcggcccagccgcccgccgccgcgcgcggcgccgtcgccaggccgccgggcgcggccccgccggccttcgccccgcctgtagaatcgagatgtcgactagaggggggtgaataggcgatttaaaactaaatgacacctaatcaaaactaacttaagttgctaggcttggtgagggtcaactctaactaagcaactaagttatgttttgcaaacctagggtgatagtggctcaattatatctttagggaagtaagtcacactcctatgtcaatgtttagcaatcctagggtgatatgatctcaagtatgtctctaaaaatgtaaattgcacaaatgtaaatgcgacaatcaaatgagacaaggagacaagagatttttcaccaaggttcggaaattcgccggtttcctactccccgttgaggcgagcccaactccaccgctcaaccacgaagccaccgcacgcccccttcgtcaaggggtgggcaaggcgggagccggcccacggagaggactacccaagcctcgatcactagggtagttcttccttcactccgaaggtggtgaactccaaaccactcgcaaaccggcgccgggcctcctccataatcttctcggagaggtcaccgggcaactcctccacaagccgtctaggaggcggcaacctccaagagtaacaagcaatgacccggcgtgaagatgatcaatcaagtgccacactagctctacaaatggaagcaatgcacttgactcttggctaatcaaccctctaacacactagatggatgaacacaaagctcaagtgggtgtgagagaggtgcaatgggtgtatgcaattgaattgggtgccaagagagcccccttgctgctagaaggggagtatttatactcccaccaaccaaaactagccgttgggggcgaaatctttatgctctgccggtctgaccggaggtatgtggccggtcagaccgtgctactctgcaacggctagaaaactagccattgtagccctgtctgagggccccatcggcctgaccggtcagaccggcctcggctcggtcagaccgccatcggctcggtctgaccgaatacagctccgtcggctctgtatcggccatcccgagcagcaccatacccggcctccagggggccggtctgaccgcgcatgtgccgccggtcagaccggccatggccagtcagaccgccgttgtgaggccggtcagaccggccagggcacgccggtcagaccgccactatgtggccggtctgaccgcccctggtcaggccgagcccagtgaaagcaaaggtgattatgtgtgtgtgatgaaaatgtgagcacaagtgaaaatgcaatgacctaatgtggcaatttaatcatctctttgctaggtcattacccccctttatagtacggcgaaactaacaaataaacttgcaaatttgatcgtccttcacctcgatcaattttaaaattaaaacactagttttaccgttttcttttcttcgcttcgcgccatcaaattttaatccatcgatagtcatccatgcgcacacatgacgtggacctaacttaaaatatatctcaatagcaatggttagtccataattatcgcttgtcattaattaccaaaattaacaacgggggcctagatgcttcaatctccccctttttggtaattgatgacaaacaccacaaatatatataatcaaacatagaacacatggatatatactgcaaaggaaatcaa

SEQ ID NO: 23994 - DNA, 2200 bp, Oryza sativa
cattagccgagcaacatcttgctcaccaagtttccttttctcttctatttttgacttctcttcctgaatgcagaaaaaaatatataatatgttatatagttgatataacagttgccataatttctaccggtctaggcggtaacaaaattaacatcaaatatcatccttatagcaataatatatgatcaaacattatatagttaatatttcatttgtttatattattacaataatataaagatagcaaatgtactataaagatagcaaatgtaggaaatcaaatcttttcagtgtaggtctaaccttaattatctgaagccggtttatagccatctgaagaaaggaagtccacaatgtcatcagttaggggggagaacttctaaattatgtaatttattataacaatgaaaatactgaatatttacctggttttcttcatttgtcccatttactaatatttcaagtgctttgatttttgaatggtattcatcttcccttgtcttaatgatcacattttgctgcaacaagagacatctgattcatgagttgcatttattagctaaaggatatataggcttcagggaaaaaagactctcttacacttcttatgtgctctgcttgaatacaaagacgacgctcaatttcttgaactactttcctcagtaggtacactacacgctgaggtgaggtagataaatttattagatttaaaagataccaatgaaaaagagagcatgcaattcagaaacacagacatacatgtggtatttctccctttttcctttcaatgctttcgtccaaaatgccattaacgacgctaagaagggattgggttggtgcattctgtgagaaggtaattactgttaggaaaggaatagcaaacaacaagatagaacaattcaacaagcataagcaatggaaagttacatctaaactgttagaatgcatcatttctgaaatcttggcagccggaagatcagcataggatccacgttttaattggaaaatctcacgaagctttcgtcctgcagcatatatgacgagctattataaactaaaaggtagggaacagtagtgacccagatatagattatacacaatagcttgagttacaacttgcagcaagcatacacgttaacaagtttgtagtttggagcttggaagccatgttgaatttaagaaacgttaaagtaaccaccccaccatgatcaaatctagcttcatcagaaagtttgtatgtccactaagattctatgttgaacatagttgtccaatctacagcttcaaccaataaatcgttgaccccccacaacatggccaagtgcccaatcacaaatagcccatgtcattttccctttgagaatttgactatatagtacagaattctagagccaaagcgtaaacatgtagggacttcttttcaactaatatttttaaactatgcaccaaaatagtcaacaatgtgcataccattaaagatgggagttttctgctgagacttagggtctggaaggccattcctcttgtcctctccaggggatgtcttcccttgtgccacaccagggacaagaggttcaccagtttctggaactcgccattttttcctcaaaggagccttggaagtaccatcacgtaatccagaactcacactttccctcagaaccaagaggcagtccactaccccagacattgaaccctgccatggtcaagttatgagttaacataagcaatcaggaactttggaaatggtaaacattttttttaatgaaaaactgtaacatcttacatccacaaatagtgaaattggggggatttgctccaatgcttgcatgtttccgtcaattgcgagtatttaaaagcatgtcattttaactatgcggtgtcaatcctttttgcagatttgcttcctagatgacagcatccggcatagaataaatctagaactaataatctaacctccttttctagcagtcaacaatctatcacagaatttgagttattactatagtgcaattatggttaggcgatattaagaggttattcatttattcctcacagattataatgggaaaaaaaactctagaaatatagttctacttatatgtgtatgcatgactaaaacttgtcagcaacgcaataccatgagcaacaaggccaagcaccattatattgactagcacaataagggggctgcaggaat

SEQ ID NO: 23995 - DNA, 5048 bp, Oryza sativa
atcattgcccatttaaaagggcagtcggtggttacacgcatctctttgtggctatcaacaaattctccaagtggattgaggctaaaccggtcatcacgatcacagcagataaagctagagattttttcatcaatattgtgcatcggtttggggtacctaatcggatcattactgataatggcactcaattcactagcggagcatttaaagacttttgtgaagacttcggcattaaaatttgttatgcctccatggcacaccctatgagtaacggacaagttgagcgcgctaacggcatgatactgcaagggatcaaagcacgagttttcgaccgactacgcccctatgctggcaagtgggtagatcagctgccgtccgtactttggtctttacgcactactcctagtcgggctaccggccagtcgccgttctttttggtttatggcgcagaagcaatgttgccgagtgaagtggaatttgaatcactacgatttcggaacttcaacgaggagggctatgaagagggtcgagtagacgacatcaaccgactagaagaagcccgagaagcagctttaattcagtcgactcgatatttgcaagggttgtgccgttatgataatcggaatgttcgatcgcgagcctttttagtcggcgacctggttctgaggaaaattcaaacaacacaggatcggcataatatctcccttatgggaaggccgttcatattgtgaagtcactcggcaggtcttatcgactaagcgcaaacggtactctcatcaatattttggaatattgacacttcgtcgattttatgcttaggctctgcttgtatctttcctatttgactgcttatcaattcaatttgcttacttgatgtatcattgctctgtttgatttcttggcttagtcaatgaggactgaaagttttttaacaacttttgcgggttttaggctcaacaaggtttgacaaaaacttttaagaaatcaggagctaagttaagatatcaagcacagcataaattcatcagtattgtacaaattgtgcctccatcatcattaatcatcaaaatcattggtacattaatcagtatcagttttttcatcatcagacttatcagacctagtcggccgaaggtcgacatcttggaatctctcaactacatcagcagcaattttgtcagccgctttctgcgcatcactgatgaggtcaagagcacttcttcgctcgtcccgtctgcaaagccatcaatggcatcaatatcaactcttggataaagggatttggtcatcgccaacgccagacttgctcccatactcccagcttctttgatgttcttgaagtaagtatctggagcgactctcagcttgtcgaagatttcggcagcatcaagtgtactcgaaccggcgttattgaaaaacattgcttaaacaattggggtagcagcgttagcaacctcatcccgggttccttcaagttttttgatcttgccaaccaggacgtcgaattgagcttgagatttgatcttgcggtctgcatcaacagattcacattaataagtcagtatatggaggatattggcttttgaggtattgattgttgataccttcaacttcctttaaagccaggtctctttgtctcgctagttctgccttgtcattttccagaatttgaacctgcttctccaactgagatatcttggcagcttgcactacattgattacggttaatcaagattgcaaagataacattatgagtcagttgagcagagtttgtgcgtaccttttgatgagccactcagttcaaaatttgattcctggagctcagcgatccgatccctcagatcatgttcattcttcctggcaagttctttcgcttcgtgcagttgattcctggtagcttcgagggttccgagatgagggactaacctctctaaggttaccgttttggcttcgttcctaagatgaatcctctgcaagacagtttaatgagcacatgaattaaatggcaaacaagatggttgaaatcaagtaccagagggcttacatttacaatacgggttgcttgaccaagtgccttcttcagtaggcataactcttcgtcctctttttgcttatttatcacgatcccttgaggctgcatgttgtcatcccaccacttgaccagaatcggagggcgtgaatcctcagccgcttgtatccggaggatttcttcttcataaccaattattggccctagtgtatccatgaatgaagatgaagcagctaaataaagtctgttggatcaaaatgatttcagatagcgtggctacctgtgatgattcccggtcggggacgagtggactttggtgtcttcacaggagatctggtttctgattcactgtcggcatccttcccgagaggactgttcgtttgagcttcaacctcgggaaccttttggcttggccctgcatccgactggtttccagtcgggggctcctggttagcaccgacttcagcttcggccgactggttcccagtcgggggctcgttgctgggttctacattgtcggttgccggctgattgtcactcggatgatcctcaacagatggcccggtttctttggaagagcttgtgtccatgttagtcgggtcagagtctttcccagacggatctatatcagatggtttcctgcaaatttgattatcagtgttattaccgcaatgggtgcgcatcaatgcaaggaagatcgttatatgagttgcacctggaagacttcctgatctttggcacaggacgactggatgttttcttccatggagtagcctgttttggtagttttttggttgtctctcggtctccaggcctcctgatggtatcatcggcttcgtcgtcacttagaaccagcttcctctttcgagaatctggctggccgactggatgtcacgcccagaaattcccgaatagaattccaagcagaatgtgtattaaaacccccgtccaggaccagccggggtacacaaacgacaatgttgacctacagatccacgtcttacaaacaatataaaggtcttacagaaatgcagcggaaaacaaaagataactggagctaatccttgacttgaactgcagcgggaacaccactccacaggcatcctcgacggcacggacgaagcctactcctcggagaacccgccatcggacacatactcgagctctgaggttggggggaaaagtagagcaagactgagtactacccactgtactcagcaagtcataccggaatagaggtatgatgcagggatttaacaagggatagctaagcaggttcatttgcataaatactggcatttataaacaggaattgaatgcgaaaacagttgtaataattaagcagtattaaacatccgctgtccaacgctgacccacgttgcgacaggcccaaccatccacctaaactatccaaattcaacagattacactagggtgagactaatcacggtgaatctggttgaccgcccgtaaccgcgggcacggctattcgaatagttttactctgatcagaggtgtacaactgtacccacaagacacagccccacgacacgtttccgtgcgccgacatgccaccacgacataccggaaagaggccgtgacaggacccttcgcataaccccctctagccaagcacaccacacctcaggtttcacccccgtccccagcgggcgacgggcagtcccctctcgtgcctaggtgaatccggaagcgacagaggccgtcgcagggcccgccccgctccatcacgcccacccttgcctggatgcgtcgactagaggaaagctacactacaagcccagccgttgcccacgctggcttgtggtaagtacgataaattcttccagggcatcccgcgaaccggtccttaactgccatgggtgcgactagcaaaaccatgcacccacagcccaccatgtggttcattttatttaaccaacaccagagcggtggtattaaaccaacattatcatataaacctatagtctaggttttaaatgagatccccaatgtgtgctagttgaactaagcatggctaagcaattcctagtccaaagtctaatcatgttataacccaagctaacaaaggagcatgatatccaaaagcatggctgtaacaataggtatccatcccatagtgatattataaaacaatgcaatatttgaaagaaaacaatagagcatttgcaatataggatcaacatgttcaagtgacaagcatgacttgccttgctctgctgcgggagggacctcggcgactatctcgaagtacaccggagcgtcggagggatcggaatctagcgacatacaaagcaaacattgcaaacaggctataagactactgaaacagagaacaaaaccatttttaatggactctacatatttttcttgatttactgagacttgaatgggattaaacggagctcggatgaattagatatgaattttagaagattcactgtgtttattactataaaagaaatccttaaataatttattgcgcaatattaaccagggctgacgtcagcgagggggcgcggcgccgacaggcggggcccaccggtcagcgaccgggagagagagaaagggggtggcggcgcgcgggcccacgggtcagcggcacggggaaaaggaggggcggcggcgccacgtggcggccgaaccgacggccccgatctacccaagggtagatcggacggcggcgggacctcgcggccggggcacgcgggcgcggcgcgagacggcggcgaccatggcgccggcggcgcggcgctcacacggcggcggcgcgcatgcggcagcggcgcaaggcggcgaccgaaggcgaccgaccggcggcggggagcggcggctagaggaggagcggcggctacgcggctaagcggcgcgcacgcggttacacggtacggggaaaaggagaaagaggagggggaagcctcaccgacaacggtcgacgacggcggccgacggaggacgacgacgacggcgggacgagctccggaacctcctaacgaacaac

SEQ ID NO: 23996 - DNA, 1663 bp, Oryza sativa
catttcgacatgtagaattcaagaaaaattccacatgtcaaatccgattattgtttgcattgttttcttagggttttatcctgatttcctctgcattttcttggggtcatttgtaatttacaatttggcttgggaggaaaacttcggggtgtgacactggatcagaagcacttggttgagtttcagaccgaattcttggtcctccgctcccttgtccagtttggtggcggggagatcggcgttgagcgattgggggatccgacttcattaaagcaaattcctgggtgtaatatccttcattgttaactgattcaacaagaaaacaagatcatattttgagaaaggttgcagtgtatgaatacgtaccagtggaggagggttgaatgcattgaatggcacaacgggcagcagatgtgagtagctgacaacgatggcgttcgagaagatcttatacatcctttctttcatgaccttgaagtcaagagaatctggatcttcacgatttgggtcatgcttgccgtcaaattcgaaggctgtgcgagatctttctttgattggagctaaccgacacttgataaagtgccgggtgatctgttccccttgaaggccctgttctttcagctttatcatcctctccatcagttctactgcttgtgcagcttcatctcctattggcagtgagttccatgtgtcctggtaaaccgaaggaagacaacagtactcggggagtgcgggctcaggattctgaacatagaaccagtttgcatgccagcctttgtttgaggttttgaagggcatggagaaatatttttggctcaaggttcctctgagttggaaaccagctcccccaacaacgcacggtttgcttttgtttggctggggcttggggaagaagatgcggcggaacaaagcgaaatgaggcctaatgcccagaaaagcttcgcatgcatggataaaattggcaatatgcactatggagtttgggttctagtgatgcaagctaatcccgtagaagttcagaatcccccggaagaatcttgaggttggaagagaaaatccgccatagaagaaatgagcaaataccacgatttcatgtgtatcgggggttgggaatgcctcaccaaatgccggtcgccacccgatgatttcttttgctggaagaacgccgtgcaccaccatctccttcagattatcttccgtcacatcggagggcgcccactgactctcgaagctttctctttcttccgccatgaatgtgaaatggatggtctgatttagttcgagatatggctggaaaaagatggggaatcggagcggtgaatgcggggagaaatttcgtgaagtttttgagggcggattggagcggattgatgaaccctagtttgcccggcgcagttttgcactgtagcaagaaatggggaaaatggcgagagtctcagcggggaagacgaagagacgtttttcacttcggtattattagggtatcgggagtactaatgggcctgggcctgtacagtacttcagcccagtcttatttccagcgtggcccgttgtgatccttagggacttaggcactttttgctttggcaatttgtgttcacaatgatgcgacccaatgctgttaaaatcctttttagtgcggttttataattctttaagaatt

SEQ ID NO: 23997 - DNA, 2201 bp, Oryza sativa
ttaggtggttaatgcaggcttaaagggaaggctgttattttgcaaacagttttgttttcaagttttcaacaatctaagtgtgtgctttccacaaccagagcgagacaagtctcagcttggtcgggaggtgagaagaacaaatttatttatcaagatttgcacaactcccagagttggcttcaaatctggttttttttcccaaaccaaaccaattttccaaacttcccgataatagtggtccccaaacgaccaatcacttccagggacacccggtcccgctgtcccccggacagctaaatgcttcccaagcattaggtttcccaaaccttaacaccttttcataaaacagggtaaaacaaaaactacgctaaggaatcacctcacatccgcccgtgaccgtgggcacggctgttcgaacagtttgttaacctctgcagagggggtacactttacccacacgacattactaacccgaatcacccagcccgtgtagaatggccacgtctggtgacctaagggctttcatgacaaggcatttcgaaagccgacacaggtttaccatatgccgacgagaggggtcccagaccaacaacaggttaggtcccagaccatactgtgccaggaagcccaggggtcctccccgacaccaccccggcgaatccacatgtctctcggcatcaaggctcccccgattagcaatttactcagccaggggcgtcccattccacccgtgtggtcgcactattgtatgctcggatgtaattccaaaggaatcggtccttagatgcgaccgcacaagtattccgcccaggaatggccttgtgtcgcgagttttatttttaaaactcattttctttcacaaggcaccgacccaggcgtcgggttttccaaagcttttgcaaaccaagttttacccaagaagttactcagattttaagtttgaaggcgaccgttgatactcgcacagagtgcacgaatatcgaggcgcaactagatggttacaagggaacatgatataacaattaacaatggaaggatcagatgcaacaagttgggtaggcccaccggtctgcctttcagacggggcaaacaaattaagtgtaatcctatcaatgcataatattttgcaagcaatataattaagttcaaatataggctcagtatgttcaagggtggcttgccttgctcagggtcttcacgaagcttcacgaatcttcaagatatccacgatcgacgaaaatccggtaaccgcaactatgctcaaacaaacaaaaacctaaacaagagaccaagaaaaagaccctatttagactaaataatagtgccattaaatagatctcaattttatggaaatactggaagtggaacggggtcaatcggacgattggatcgagagatacgaattttggaagtttaattagaatttctggcgaaggaagatatttgtggaacaaggggggattgattcatgaaatttatagaaataatattctcaagaatattattgaccgtctctgacgtgcgggaccaaaggaaatgatttataaggaaaatgattcatgaaattttggaatagagaattgttttataggatcaagggaaaaaagatttattaacccacgaaataagataaaatgatttactgaatttatagaagagagaattatttgtggaatattggaaagacattctcaagattatctttgactcattgacgagtggggccaataagaaggtgagagagagagagaggagcaattggagggagcaattgcggacttttagctcttcggtgtgtgagcaccggactcggaagagggagtaaaggtaaacttcctttgttttgttaggccgaggaggaaggctggccaatgggccaagcccacgagccaggggagagagggggagggggacgactgaccggctgactgggcaggggcgggcccggtcaatgccacgtgggcagccacgtcggatggggagagaaaaaggggggcgggaatggcatcggacggctcacggcgcgcggcggaatccggcgaacggcggcgagccgaagcgagcgacgaacaccggtggctagaggaggtcaaggcgaaccgattccacggctcggattggggagacgacgcgtgacgacggccggcggcggcggcgaagctcgccgggatgccgacgtggatgcgcgatgggaagggatg

SEQ ID NO: 23998 - DNA, 1353 bp, Oryza sativa
cctgcagcccgttgaggatgggaaggccgatggcggcgcatggacgagcagcggcgcacggcgacgaacgcgacgccgaggcggcatcgcgtcacggcgggcgtgccggggaagggaacggaggcgtgcggtggcgcccttggtcgcggcggtggcattcttggccgcggcgaccaagaaggcggcgacgctccggggttggccgcgcgacggcgaccgaggttgagggaggaggcggcagaggacggaccgtgcgacggcgagatgtcgccggacatagagctcgacgcgacggcgaggagttcccatggcggcagggctccgccgcttggggggggaacgaagcaagggagggaggaagcacggggggtgggttttatagagacggagtgggagcggcaaggtcggttcgaggtggccgcggttttctcggcgctcggctggtgttcatgggcgccgcgagaacgagctacggcgaggatgcaaagggtggtggaggcggtggatcgtgtggtggaaatcgaaccgcgagcacgggaggattggcgcggggcgagcgggtgcggtcaaggtgggggcggcgaggcgctgcagcggcgtcagcggctctgccttttgaacaagaagccaaggagtggaggcagggagctcgctacccgggaggggaaaaagcgaaaggaggaggaggaaagggagctttgctccttccggtttgggaggaaagggatgagagcgagccgcgcctcacggttttggatgcatgcggcatggggcgccgggcccgggaggatgacgccggcgacgactgcaaaaggacggggacggtttgaaggcaagcgcggacacggtggtcgtcggggcaggcgacgaccgagggtggcgatggcggcacccaggcggtcggccactcgcacgggtgtgcgggaatcgaaggaggcagccggaattttgggcggcgtcggcgggaagcgacgccgagagagagagagagagagagggggggcgctctctgagggagtcacgtgcggcgcacgtgcgatggagaggctggcgaaagaagaggatgggccgaggatggtttcggcccgagcgagttggagggaggcaaaatagacttttactggaaggtttgatttggagagaagtttgatgtggagattgaatttgaatttaatttgtgtatttgtacacgagggttcaaggtggatccaagggaggggtcaaggaagggcttcaaaagcgggaattttggtattcttgggatggatttatatttggcggcacgaaggattatttcagaggatttcaaaaagggaagatcattattcaaaaatggaacaagggagatagggg

SEQ ID NO: 23999 - DNA, 1426 bp, Oryza sativa
gacgtagaatcagaaccattggaatactgagattctccctgatagtactgcactggcgggtctatctcttgacgcaaaccttctcttgcttgatcctctaaggacattaccttgtgcttcttgtagtcctgcatttctttttctgcatcttctagtaacaaggctttattgaccatgtgctgaaacgttggaaagtcgtgagctaaaggtttcactcgcaatttcgcttccgttccttttagaaaccttttgatcttcttcttatcaatgtccacatcttccggggcatatcgagccaatccgttgaagcgactcaaatactcgttgatgcaagaggatccttgcttgatatttgcaaattcttccttcttcaaatcaattatgctttcagggatgtgtgctaagcgaaaggcttctgcaaactctgtccagatgatggtactagcatctgtatgggtagcacagtagttatcccaccaatttgtggtatgtcttcttaactgatgtacggcataaaagggttttcttctacggagtgcactgcaccaaatttaatttcctttccacatctttgatccagtcattggcttcaatggtctcagttgtttgggagaaccccggtgggcgagatcttaagaattcgttcagtcttgaccgacaattatcttgaaccatatggggttgatgctcttgcgtgtgttgtcgttgcataacaactatattctgaatcattccttgtaatatctgggtttgcatggccatgagtgggcaaaagtccactgttggggggctgatttctgtactgcggcatcattagttgatccagaaacaactgcatgatcacttctcaatctgttgctcatctgctaggctaattgactgatcgggaatttctgactgagctgacccttctttagaaccagggcggttaggggcacggatctgacggatagaacaatgtgccattggcttcagagtgactgagatctgactgaaccagaaatgggataagaaaagaaggaaaacaaaaacactacatcaaaacggttttcgaaatcacagaagacataggtggtgtattccagtcggtatcccaactggtctaacacctgaacacggactaccaaacaaaactcacgcacgcactagttcaccacaactcctaccgagcgggtgacggtactagggtctgcctaccaacgagggcttaactaagactcctagaggcttgagctcacctttcttcaactgggcgtgaagacaggtttactctaggataaaggtcaaaacactcgactagcttctacttttggacacgaaaagatttttcgcaaaactagagctaaaggggacaacgacaccttagctttcacaaatagtttttttttttggtactcaaataatgccatcctattaaggggtttcg

SEQ ID NO: 24000 - DNA, 677 bp, Oryza sativa
ctagctgtgcaaatgcatcccttggggttcttaaaggagtatcttcttcaatgatttggacatcaccccacacctgttgagtgagaaaaaatgaacctaacttctctccagctcctaattcagaataatatatcttcaattaaatttatacttaccaccccatcaacatccatccaatgacgcttcagacgaaatctttgctgcccacgggctacaacatttaatgaaccatcatccatcctcccaagttgtcttatctgttaaagaaataacaaaataccagcttaccttgtgaggctgttcgaaaggaattatacatcactttatacataaatcatactaaggggctaatgaccgagcttgacatgtaaacaagacatcacagtgcatatcggcctcatcttttcacttatgcttatgcttatcagccaaaatttgaattttcaaccttaaatttgaagccgattttgaggttttctcatcgaagtttatttttcagcctttgcttttagatcactaaggacacgtatataaaagttttattcacaaattacttttcgtttgcaaatacgccgtttggcttattccgcagataagccaaacgatggggctttatatgttctgttggtcttctagatcttgtgaagtatcagaaaactagatgagtacatgattct

SEQ ID NO: 24001 - DNA, 1390 bp, Oryza sativa
atgtggcagtggaggcggggaaggagtctgtttggtggcggcgggcgacggcgcagctgttttgcggaggcggaggctggcgtcggtggcagcggtgacgtcggctgtagccgtgaaggtggtggcaacgtcggaggatgcgggtcgctggcaacagcaagtggaggcggggaaggagtcgggtgcgaggtgaggatggcgtcggcgaggtggctgggtgttcggcaacagcggctgcggtggtggtgaccgtgtctgcggccaccgaaggcatggcggcctcggacggctagccgagggcgtgggagacgactacatctagctggtgcagcatcgtttgggtggaggggtcggagaccagcttggcgcagagaagcgcagccgatggcagcggaggctggctcggcgcgagaggcgcgggcggcggagatggaggccggcttggcacggaaggcatggccgatggagggaggctggattggcgcgagaggcgcttccggtggaggaggccggcttgacgcagagtggcgtggccggcggtggaggaggcgacctaggtgtgaggaggagctgtcggtgggtgtggcgcggtcttcggcgcacgaaggctggccggcaggggacgccggtgcagaggtcccacatgtcggcaaagcttgtgtggtggtggagcatcagtgcgtcagccgtggattcacaggtggtgaacggtgggtgaaaacccagtccagccttggtcggactgacaacgatgtcctgagggagttgttgcgctgtctcacccctcaaggatgattgccgagcgaaagcccagtcttggctcttttaagtcttgacagacgacggcagcagtttttccgtcgcttctcttcttgaagacgttgttttggcatcctataggggcaatctcgcatgtgtccctttgttggtctagtggcggtcggtcacgcttagcagcggccggtccggtgttagccttctcctgggcttgttgttggcgatgtcgccgtgtgggtggtggtatatttggttgtaatcttgtaattttttcctgctctatcaatagaacttcgcaccgtctcgtgcgagtcgttcaaaaaaaaaaaactttctagcaaaggaaagagatctaagatagtagagagtccagcattggaagagtggagctagtatggagaggacaggctacctgcagtgatgaacggcgtcgatcaccaccggtcgccagacaaagtggggagcgagaggataaattagctagaggcatttcggtatgggcatatgtgaggaaaattgggttaccattttaatttggaagaaatttcgaaatgtcattctggcatcggcccctaagttggaaatagcattccacgaaatcaaattgaagggc

SEQ ID NO: 24002 - DNA, 1271 bp, Oryza sativa
  unsure (1)..(1271): unsure at all n locations
gccgggatcgttcaagaacttgacgagcctgaagacggtctggctggcgcagtgcaacctcaccggcgatttccccagctacgtcacagagattgggaaaaaatgggggggaaaaggaaaattggggggnnaaagtatttctcgacccctgtcccagaattcattcaccggaagcatacctcctgggatttggaacattccaaagctgcagtacttgttcctgtacaccaaccagctcaccggcgacgtcgtcgtcaatggcaagattggagcagcgagcttaatttatctcgacatatctgagaaccagctgactggaacgatcccagagagctttggaagtttgatgaacctaactaacttagccttgatgacgaacaacttctccggcgagataccggcgagccttgctcagcttccatcgctggtgataatgaagctgttcgagaacaatctcaccggtcagattccggcggagctcgggaagcactcgccatttctgagagacatcgaggtcgacaacaacgacctcaccgggccaataccggagggggtctgcgacaaccgccggttgtggatcatctccgccgccggcaaccggttgaacggctcaattccggcgagtcttgccacttgcccggcgctgctgagtctccagctccaggacaacgagctttccggcgaggtgccggcggcgctgtggacggagacgaggctgatcaccgtgctcctgcagaacaatggacacctcaccggaagcctgccggagaagctgtattggaatctgacgaggctttacatccacaacaaccgtttcagtggccggcttccggcgacggccaccaagctccagaagttcaacgccgagaacaacttgttctccggcgagatacctgacgggttcgccgccgggatgccattgctgcaggagctggacctgtcaaggaatcagctctccggggccatcccggtgagcatcgcgtcgctcagtggcttgtcgcagatgaacttcagcaggaaccagttcaccggcgatattccggcgggattgggctccatgccggtgctcaccctgctcgacctttcgtcgaacaagctctccggcggtattccgacgtcgctgggatcgctgaagattaaccagcttaacctgtcgtcaaatcagctcaccggcgagatcccggccgcgctcgccatctccgcctacgaccagagcttcctcggcaaccccggtctctgcgtatcggcggcgccggcgggtaacttcgcgg

SEQ ID NO: 24003 - DNA, 2134 bp, Oryza sativa
caaggtcgccgacttcgggctcgcccggatgctggtccaggccgggacgccggacaccatgaccgccgtcgccggatcgttcggctacatggctcccggtaattcccctcaaccaacctcgctgctcgtctcacgattctcccttgatttcttctcttagccgagcgacttaccttgtgctgaccacgatcgtctcgtgcagagtgcgcgtacacgaggaaggtgaacgagaaggtcgacgtgtacagcttcggggtggtgctcctcgagctgatcaccggcagggaagcccacgacggcggcgagcacggttgcctggcggagtgggcgtggcggcacctgcaatcgggcaggagcatcgccgacgcggtggacaggtgcatcaccgactccgggtacggcgacgacgccgaggtcgtgttcaagctcggcatcatctgcaccggcgcgcagccggcgacgaggccgacaatgagggacgttctgcagattctggtgaggtgcgagcaggcgctccagaacaccgtggacgggaaggtggcggagtacgacggcgacggcgcgccgtttctgccgatcaggggtggcagccgccggaagcagctttcggacaccaaaggcatcgacgacggcaacggcagcttggacagcatagtatgagaacaatggtcaataagaagtataacctgatccaatggttaccatctaggagagatggcacgctagttaggagagcaggtagataccagacaaatacattcgccatccttcagttatttgcatgtaatgagtattgtaactttgtaaatgcatctataaaattttgggacagtgagagtgcagtcacatacatatatgagatcaaacaagagcaattagattatgtccccttctttattacgaagagaaaatacagagcaaaaaaatcttggttctcaacatcaattaagggggaaaagaatctgacagaacaggaatggaaattgcctgtgcctccatttccctgttagtctgctactgccatccaacgttttatgccattagaaaacctccaaactcattggcgctatactagctatatcccgctgcagaggcacttatgtttgccctcagaatagccaaaaaaagatggtaagatttcaaggggggagccaggagtattatgtggattttgaagggggaaatgagaacctacaaacggagtttgattcatcattcatcaagatcatccttaaagctagtcgatctcggcatactgggagtgcgaggctgcgagaagagcagctccaatgccagaaccatcgttggccagcttggtaaccaccgaagacgagacatcatccccaagaaggtctgttagagttgattctaagcaactgctgaacttcttgtaatgttcatagagcccaccatccaaggcaatgacagtcctaggcatcttactgccgtcttttggcatcttgtcccgacctagcttctttaggaccccatatatgccagcagcagccaagcgtgcagcacgctctgcaactatgtcacaaatgtgactggtaatgtatcttacttccagggaagtatctgggacctgaataaaagatcaaatcataaataagcaaccagtactcattgaacagtgttggatgttgcgtatccactttgggtcaagaaatttcataccccgacgatatcctttagcttagctccaacagttttaaggtcatgtgacgagtcatgatgcatggctgacatatccggtgtcctgtgatacaacaattgagatacttataaaaaattctaccagagttgcataagattgaggggttagaagcataaagaaaaactggtgagcaaaaaccaaaccaccctaattatccaagctagataacttctagttgcacacaattatgagaatcaaccagaaccagaagaaagtagtaatggataaaacaacaaagtgtatgtttgtcaccttccatggatttgctaactgatttagcatgataatttcaagatatacaaacaacttccccttccataatctatctgggtatattatcaacagtgcgaatattataatggaaacgatgccaacgtctttatatcatgtgcactcttatccagggctgcaggaatt

SEQ ID NO: 24004 - DNA, 1393 bp, Oryza sativa
taatccctgcctctccatggccttgcccaactcagatacaacatcttcgccaacctaattcaggagataatatagcaaaatcaaattattcttattggatgcttgacagttcacacagatatgatcaaccaggcaaacataatactgagtactattaaagatcctcaaattaaatatgcttcctgatcaaggtcgatatttcttttcactaacctagttaagttgattacaatgtacacaaagggagattgtagcaaatagctaattgaaatactccattgccatattcaatcaagctttatcaaggaaccttgtgacataattcatgtgtttaaagaaggatcaggattgtgttctagtcagggtatgtccaaaagttatttttgacttttaccgcgtcattgatggagaaaccctttgtccacttgatgagcgttcctgacgatattgatgtctggctcactgggaaggaaaaggtgaagcccagctctctctgtctcccttctgggaggtggaaatcatcaccttcagtatcaacaaattttgacaatgcagaagcaataaaatcaaacagttcctgcattaatagtcagaaaatacataagacaagcatggaatgtacagctccaagaaatttaaaatcaagcagcaaatgcttaccatggaagttccaaccatcagatgtggtggaattgagacttcctcgtactgttgttggacgacacgtttctccttgccaccgagttggactcgcaggacgcggaagttggttcctccaagatccaatgcataaaacaacccctgttcatttctgcaaagggaaatcattatgatcaaagaatgaaattactacttttggaagaaggcagcaggaaacattgtatgcttatgggtgagtgagttctaacagactggtagaaggatccgatagaataagaatgaatcattatatttaagaaacttccttcaggatgtgcctgccacatttagcttaacgatgtggaggttacagagaaacttattaccagaccaactataccatgagataagctcgactgatggatctaattggtcagattgctaacaaggaaaccacaatgcaaagaaactctctgccatacattagttaattacctgtcactgaagccttaacaaatcaaaccaacaagaaattaattaatcacatatcataatcagaaatcctaaagagccaaagtaggaacaaatggacgatcaaattaattaatcacatatcataatcagaaatcctaaagagccaaattaggaacaaatggacgatctactatagatcacaaaaccgaagatcatctgagaacgataggatatgttgacgggagacctatctttcctagcttagataggccaatttatc

SEQ ID NO: 24005 - DNA, 1128 bp, Oryza sativa
ctcctgacttgggaagccaagcacacgtcgtcttgatgatggggcctgtcaaatcttgccgcctgacacggggggtgcccctgtcagtcaccatttaatgggtgaagacttctgagctcctattacaccgggaaacgggagccttgctttgaccagagcgggaggaccgactccggttgggataagaggatgagaacctctcaccatcattatttgatgggatatgtcgggctgcacgtcgcctgacacacgcgatggtgcgcctgacatcttgggtcccatcagtcattcgaccggtcacagaccggttgagtgcactgcacaccgcattaaatgcggtgtggcgcgaccgctcaggacgccataaatgcgggtaggtgggcacctggaggcggacacctaacccactgtacgtggtgacctagagagggggtcgggggagcccgaaccctagtcacgggagggggcggtcgccgcccgaactcgggcccgatcccccctctggggggagccacgtggcacctggggcggccttctcccctagtctcggccagggagtggccgccgccctacctcgggcccgacccccctcgggggaggaccacgtggcattggagggcagcctcctccatccagtctctgggaaggagtgcccgccaccctacctcgggcctgactcccctcgggggagggccacgtggcatcgggggggcagcctcctccgactagtctttggggaaggagtggccacgtggaatcggggggcagcctcctccgactagtctttgaggaaggagtggccgccaccccaccttgggcctgactcccctcgggggagggccacgtggtatcggggggcggcctcctccctctaaacctgatacccccgggcccatatcatcgacaggtaacatgcaacaattagctaaatgtatatttttgttgctatgatttgtaggacaaatcacaatgagttgaaattagttgttagagttgggtcgtttttcagcttgctagatgaagggtcaaagacctatatggagggtaaaacatcgccaacccaacttgttgacatgcataactatggcttgctagaattagtaaatttcatagctgaacacttcatat

SEQ ID NO: 24006 - DNA, 1484 bp, Oryza sativa
tcatgatccatgtattgatgttggtgtggtgttcccagatgtgaatcaatgcaagtcagcagttacacatcattgtatcttgaatgatcatgcttttgacattatcaagaaagacaagaaaagatttagagccaaatgcaagagtgcggatcaaggttgcaagtggctgtttttgcatctactagtcccaagtacattggatgtaaggtaagttcagatttgtatttttttagttcttttctgcattaagtaatttcagccttgtccttacttaacatgaattttgtctatgcactctatggctgcaggttaagataagtggaccaaagcacacttgtggttcttttaataattgcggtgaaacaatggcttcaaataaatgggtagctgaccgagtagttgagttgctgcgggatgacccctcattaggacctaagaaactgaaggaagagctgaagaagaaatactcagtgaatataccttatttaagggttttcggaggcaaggagagagcacttgacatgataaatgtgaggtgggatgacagctataacttgttgcctacttatcaagatgagcttctgagatcagtgccaggcagtgtagttaagttggacactgaagagaataatggtgatgtgtgctttaggaggttcttagtagctctcaaactatgcattgatgggttcttgcaaggatgcaggccatacattgccatggactccactcacttgacaggaaggtctagagggcagttggcatccgctgttgcaatagatggtaataacaggctatttcctgtcgcttacggagtgattgagacagagtctaaggaaagttggacttggtttgtccaaaatttgaaggaagctattggtacccctacaggttcgtattttttcttacatctttcatctttcatccttcatgttgcatttgcatattattccagttgctaactacaattttgtaccattgtaggtttggttattagtacagatgcaggcaaagaatagagggggctgtagatgatgtatatccaggagtggaacatagggaatgtatgagacacttgtggaagaacatgaagaagaagtaccatggtcctctgtttgcccaaaatatgtgggcagctgctaagagcttcacaaatgtgaagttcacctaccacatggacaagataaaggagaggtgccctgaagccctaacctggttagatgacaatcatccatacatttggagcagaagcaagttttatgaggagtgcaaggtagattacatcaataacaacctctctgaatgtttcaatagttgggtctcaaaaatcaaggatcgtcagattgttgacttgcatgacaccataagaaagatgatcattagcaagtttgtgtcaagagccaagcttgcttgtaaaatggatgaaaggataatcccatctattactaacactctgaatgcaaaaagcaagaccctcaaaaaccatg

SEQ ID NO: 24007 - DNA, 2347 bp, Oryza sativa
  unsure (1)..(2347): unsure at all n locations
atgatttgaactatggcagtctctcatagcaaagcgtagcgacatggtagtgatgtctactgatggtcctcttggtgcgtatgtcaatcctcacggttttgtccatgaaacaatcacagttagcagggcaactgggcttgctcttgatggcaatccttcaacggttcacagctggtttccagggtaaatctacagtttctccttgttctttgtaatcttcatgtccatcatacaccctttaactgtaaaaaactaagttcatgcatgattttcttcttgtaaccaactttgtttctgctgctatgcagatactcgtggacgattgcatcatgtacggactgtgagtccaacataggctggttgttcaaagcaaccaagaagaatctgcgaccgagatccttctgggggatccgtagctcccaaattgcagatgatgcacaagaactagatcaggacgaatgatgctccgtgtacagtagtaaactttgtgtgcccctccctttttcttatgaagttatggaaaacactttattctctggtccataggcctagttctccgtacctgagtagtggtcgttgtgacgatcgctatagaataaccacttcctcctgtgtgtattacacaaccattgccttatgctaaagttccgtcacagaattttctgaaatgtagtgttactagaaatccatagtacaagatgaatgatgatatgatcagatgtttcaagcaatggtttgacatgtcttatgagcacatagaagttgggcttgataccttcacttgaggcaaatactcgtgctgtagtggtaattggtaaactggtactggtagtgagctagcactggcagtgccatgtttttgctatctgtactgaaattggggccaattgcacctgacgagcagcaactcaatatgggcatatggcatcctttttttccctgcgtattgtccttttgtttcagccacagtagcaattggccggtattccattgccacctttgatgagagggagggagagagagacctcacgggtggcagcaaaggcaaaggagcagcaagaagccgacagagaaagtaaggccatggtagaatgacaggtgaggaatcgatcagacgggaggaaaacaacaccgaaaaggaatgcacttctctgcttttgtatatgcatgcacctctacctacccattcgcgatgcaccaatgaaatacgttgccaaataccttaaaatacctagtctattgncaggtgatagtaatattgacactagtagttctctaatctctagttgctagtcttgtttatgtctattttttcttgtagcatagtagcacatgatcgtagtaatgctgtatgattgatgattggatggcatggaactatgaacggatcaaacttatctcgataatatggtaataacaaggagatgtagacatgtactccagcattgtagtcagacagccgaatcacgaagctagtgtggaaccatgacagaagaaggcactactcagaataaatccagtcacgggtttaaaaaaaaaacagagagagaggagaatcatcatcacaaagctaatgcaacaacagcacaagcgtacttccgcatgagaccaagcaaggaaaaaagaaattccaaactgtccccaagaaaattcctgccccaggagagcacagcgccggcctgtacaggtcatcgttcccaataagacagggggaagctgagaggcaaagagcaccaccaacaacgcgtgcactgaattgcattgcacatgggacatggcaaacaccggcgcgtcgccacccgcgcatgcacgcacgggcgcgggcgcggccacgggcacatcctctcctgcgactcgtgagccgtgtcattccatcgcggcttcctgctcgatccgctccctgccatgcccgtgaccgtgatctccataaattcccccaccctgtgcgcgatgcgtctatcccccacgataattagtaggcctgccacctcttgccgcgagcaagacgaccacaccaccaaccaccatccatggcggtgtccgtgtcgtggtcgtgggcgccgcggttcttggcctgcgtcgcggtggcggtgttgcttgttacgtcgggtttgggcggtgcggccgccggcggcggcgggcgacgccatgggcacacgaaggggttgcggccggggaaggcggcggcgaagccgtactatccggtgaacgcgacggcggtgaggcgatcgagcggcagttcacgcggtgggtgcggtccatggtcgggcgacgccacagcacgttccagcgcgcgctctaccgcgggctgctgcccacgcgcaccctcgtcgtcgacaagaacccc

SEQ ID NO: 24008 - DNA, 2954 bp, Oryza sativa
cgtcactcacgtggctacttaatttggtctctgtaattttcttccacacccccaccgtatccagagcgttcgtccgaatgcctacaccgatctccccgtgcaccgtgcagtgagaaggtgaccatctcgccgctccgcgcgttcgtgaccatcgagggcgccggcgcggacaagacggtggtgcagtggggcgacacggccgacacggtcggcccgctcgggcgccccttcggcaccttcgcctccgccacgttcgccgtcaacgcgcagttcttcgtcgccaagaacatcaccttcaaggtgagcaccactactacactacaaatgcggcatcatttgtgccgtggcgtggctcattcgtttcgtctgtcgcgtgggcagaacacggcgccggtgccgaggccgggggcgctggggaagcagggtgtggcgctgcggatatcggcggacaacgcggcgttcttggggtgcaacttcctcggcgcgcaggacacgctgtacgaccacctcggccgccattactacagagactgctacatcgagggctccgtcgacttcatattcggcaacgccctctctctctacgaggtacacacattgcttctttctcttggttgcatacacatttcctccatgaacattatagcagggaattgcatgcaacccgggtgattaggttgaaggtttgttgctaaccaagatagataatttaattagcgcctgaaatcgagtcaaacaggaaatctatgctcaatcctgtgtgtcagtgtccagtgctacagcccaaatgcacaacagatacaccgtgtcagtaaacactggcccgcagctttctgacagggcactggcctactgtggcacctactacaatgcaccacactggagtcacacagaagaaagaattctactatcgaccactgttaaaactcacagggttacagtagaggcaaaccactattatcggccacattagccccccgatcttgtgactggccctactacagctacacgaaccagatggtgccaatgcgttgtgcatgcccgtgtggcacttcgtttaatgcgaaatccaacgcaaatggaatgttgatgagcccactagtaatagcatagtgagtaatcagcctttcggtttttaagaggagtgtggtaaaacctgcatcgcttgtcgttggcgccggcacggttgccggatggggttttctggagcccggcaggttctctggtccccctggccccaggcgccgtgaccgctacggcccgtgacgcccatagctggacgtctcgtgccgtgcgtaggccccaaaccgtagcgtatgtgtatagccaccagtctcctctgcaaatcctgctcactttggtcgtacactttaaaatctggtactagtccaacactactaccagtagtaaccgacttttttttttggtcagaaatcaaaaattgacctttgggacgatagggtcgtccaagctccaagggaaacatattatctgctgtaccgtgctctaactttaagtgattgatatgtgtactatcccacatctaatatgtccacatgtcaatgacccattcacccatatcaaaggatagttctgtagagaatactcatccgtcgtgcaagtgcgcaacgcacctagcatggttcgaatgctagactttgtaatagtattcaccgtatttcagacattcagtaatactccacacaccacactagtggttattctaacgtgtgttacagtgtgtgatcgtaaagaatactagggtttacgcaaatatttgatcagaaatcctttgccgtgtattactttggtcatgtatgtactcagtactcacgttggtgacacgattgcagggatgtcacgtgcacgcgatcgcgcggaactacggagccctgacggctcagaaccggatgagcatcctggaggacacgggtttctcgttcgtcaactgccgcgtgacgggctccggcgccctctacctcggccgcgcctggggcaccttctcccgcgtcgtcttcgcctacacctacatggacaacatcatcatcccccgcggctggtacaactggggcgatcccacccgcgagatgtaagtagctaccactagtacagaatcgaacatcgtgaacgatcatatcactactattataatgatatgtgggtctcatcctatcataccccacccatcaatatttgtgatgatagcgtcataatggtagaggatgtgaaccccattcacccctcacatccatctcgttcttgtgttttttcgctaacgatgctggtgttttgtgtgtggttggtggcggtggcaggacggtgttctacgggcagtacaagtgcacggggccgggttcgaactacgccgggagggtggcgtggtcgagggagctcacggaccaggaggccaagccgttcatctccctcagcttcatcgacgggttggagtgggtcaagttgtagcaccacgtaggagagaaacacagctcactcgactattagttaacttgtgaagagaaaagaatagaacagaagaagtggcagataaacactctgatttgattcgattgcagatttcaactttgcagttgcattgtgagacagtcctatactgtgtccggccttcgcctcggttttgttttggactgcaaacagtataacatcaacttaggcccactggcccaggcagtagagaggtagcaatcgatgcgatctccctgctcagcctagaagcccatagagaattgaagtggggaaataggcccagaaaaaggttagagtagtgtagcagaagtgagcccaacaatcacaggtgtgttgcttccatgttccaacacgtatagccttttcgaacattattccttttttttcaaacattattctagacagacattttaatggatttctgcaaacttttagtagtagtagtattatagacccagtgaccaatctct

SEQ ID NO: 24009 - DNA, 688 bp, Oryza sativa
aatctgggcgccgagcgagagagctcattgggcaacaagacgtcgatggaacagcggtctttcgcaccccccagcagaacgcggttacagcaatcactctcctcgacaccctcctcaaggaagacgcactcaaccaagccgatcatgttgtcaacatcttgaaccagacgaagaccatgatcgctgcctcggttccagccaactccgcaagcacccgcaccccgactggtagccgagtccctcacttccgatctcatgattatcatcagccaaccctcagtatcatcggcacaggatctagtcacaggagcaggggtcacgacgaacgatttgttcactcgcctcccgaacgtcacagggagcgccgggtcgaacggcctcgctctccacctcaccagcgtcccgtcgacctttgcaacacgatcaaccagcgccgtgcagcacgaggtcaccgccattcaccagatcgctacgacgacgacgtggacggagtagctgccttcactaatgacctgcgttgagtggattggccagccggctttaagccaactggaatcaagaagtatgacggcaccaccaaccctgagtcttggctcaccgtctatggtctcgcaatccgcgcagcaggaggagacagcaaagccatggtaaactatctacctgtggccctagcggactccgcccgatc

SEQ ID NO: 24010 - DNA, 6348 bp, Oryza sativa
  unsure (1)..(6348): unsure at all n locations
gccctccgggaaaatccttttcctttttctttttcttttccctccctttttccctctttttttcttttcggatgggccgccggcccattcccctccttcctccccctcctccttgctgggccggccgcaggccgagggcccagtccggcagccaggccgcccgctgctcctctctcggggtcgccgacaggtggggcccacctgtcgggcccgtctccctcctcccgccgatcccggcgcgccgccgcgccgaaaccgccgccgcgcccacgcctccgtctctcccgggccacgtcagccacgcccgcgcgtgcgccgcgtctcccgcgctctttcccctctccctcccgttcgcgcccgcgcccgagatggccgggattcgaaaaccgaatcccgcctctctctcctcccccactccccacgtcggccggcgattcccgccgctcccggccacgtccggccccctctccccttatttaagcatcgccggcaccccctctctctttttccccatttccccgacccctcccgtgctccccatcgtacccgcgccgtgcaaccacccaccgacgcttcttcccgctactccggccgccgctagccgtcgctaggctcgccgccgtcttgcgccgtcgccgccgttcgattcgcgtggccgagatccaccccgtccacccctcctccgtcgaagttcatcgccggagccctcatcccctcgcgcacgggtgagcaccacctccaccgccgccttcggccatggtttccgatcgccgtggttcatctccctctctctaacccctcccaaccttttctctaggtcctcccggaacccgtcgccgtcatcctcccgtctctcgtcgttgccgttcgccgtcgctcctccctcgcgccggccgagcccctcggtgaggatcggtctccctctcttcctctctctccctttgccgcgccgcccgccgcgtagcgccgccgctagggtcgctcgcgccgccgcttcggccgccgccgccgtctttgcgccgtccgccgccgcctcccgtcgccggttgccgtcgctggcaaccgtgcgcgcgcgccgccgccctcgccataaccggccggccggcttgaagccgagccgagccaccagccgcgccccctcccgccttgtgccactgtcagtggggcccatgtgccggcgcccctccctctctctcttgagccgctgcccagtgggcccacctgccagccgccccctccctctccccttgtgccgctgacccgcgggtcccgcgtgtcggcgccacccctccttgtgctgacgtcagccctggggtgaattattgcgcaataaatacattaaggcttttctttaatagtaaaaacacagagaatcttctaaaaatcataactaattcatccgagctccgattaagtccattcaagtctcagtaaattcataaaaatgtgtagaatccattaaaaatggttttgtttcctgtttcagtagtcttatagcatgttttgcttgtgtgctttgtttgtcgcgtagatttcgcccgtttcgtcgattcgtggtttctcgaagacgttgctgtggtctcatcagtgcgagagcaaggcaagtcatacattgcaattgatcatattgtacctaatttacaaatgtcccgcatttctattaaatattgcattgttttacaatatcatgtgggatgggtcctattactcagctatatgttgtttcccttatgccattgataacttgggtattaaaatgactagatgttggtttaggagatgcttagtcatgcttagttcaactagtgcacaaaaggggaccacattaaagcatagacttgattattggtaaaagctttggattagtgccaccgcattggtgttggctaattaaaatacactacatggtgggctgtgggtgcatggttttgctagacgtgcccatggcgattaaggaccggttcgcgggatgccctggaagaatttatcgtacttaccacaagccagcgtgggcaacggctgggcttgtagtgtagcttttctctagccgacgtacccaggcgagggtgggcgtgatggagttgggtcggccggggtgtccggttgatcggctgccggattcaccgcggcacgaaaggggggctgcccgttgcctgctggggacgggggcgaaccctaaggtgtggtgcgatcggttagagggggttatgcgaagggtcctgtcacggcctctttccggtatgtcgtggtggcatgtcggcgcacgggaacgtgtcgtggggctgtgtcttgtgggtacagttgtacacctctgatcagagtaaaactattcgaatagccgtgcccgcggttatgggcggtcgaccagattcaccgtgattagtttcacccctagtttagcttaatgaactggctagttcaggtggtggtttgggcctgttgcaacgtggtgtaacgttggacagtgattggttaatatggattaattactacaactgttttactgctttcaactactgctttgaaatgccggctttatgcaaaagaacctttagcctcccttggatatatcttgcatcatacctcctcttccggtgtgacttgctgagtaccgtgggtagtactcagtcttgctctcttttcccccacaccagagttgaagtccttctcagttgaagatgtctcgaagaggttggtttcgtcgctgccgtcaaggattgcctgtggaatggagtcgcccgctgcaggagtcaagtcttcaggcttagctcgcttttctctttttccgctgcatttgtaatcttttatatttttgtaagacgtggatctgtatgtcaacaattgtcgtttgtgtaccctggctggtcctggacaggggtttaatgcacattcagcttagaaattctggttcgtgaatttctgggcgtgacaagttggtatcagagccgaccttgaccgtaggacaagccaaatggaaaaacctaagagccctctgaatccttttcattgcatatattctttgcaattggatttgtttcgggaaaaatttggggttttgcctctttggtttgtgggaaaaatcttggtcgttcattcggatcggatccttaaaattagctcggtctagggttttagaaaaattttatttggagttatatttgacagtcagttggggatttatcgggtgatatgcattaggtcgtgtctatgttcgatggggcaattttatgcgcatcattttccatgcaactagtttatgcattaagctatggtttagtcagtcgcattagtgtctttatccgggttcatgaaaaatgttctatgcataaaaatcatcatgctcggcaagttacttgagtcattcgttgctttatttaatttggttttgagcatgtgttggttcctatccctctgtactctttagatgtcagacctattctccgatcgcaagcgccgctccaagcttcagagtcgccgcccttagctttatcgtcttcttagtctgtttgcgtgctagtttttggtgtttaggtttgttgcttgtgggttagtcggcggtcgatatcatgtgtgagtggtatgacagcctttattaggagttgtgtgcctctttttcagtgttttaatcaagattaagataatggcacttaatttcataagaaagattagtttccgagccatctgttttcttcctttctcttatttctacctatcccctccagatggtgaagacaaggaatgatccccgtgactccagcgacgccaggggcagcgaagagcagaccgatggagctcatgtcagtagtgcatctggcagcagaccatctccaccgcccgaaaacccaacagtcactcaaatgatgacaatgatgatgcaacagatgcagcaacattaccatcagatgttgcagcaggcgcaacagaaccagcagtttggtcctccaccatcacacgtgtccaaactgttagactttcttcgtatccagccacccactttctcaagcaccaccaacccaatggaggccaatgactggctccgtgctattgagaagaagctgaacctactgcaatgcaacgaccaagagaaagttgcttttgctacacaccagttgcaaggtcccgcttctgcctggtgggataactacgtggcgacccgtctagatgcaacggaggttacttgggcagagttttgtcaaagcttcaggaaggcacagattcctgaagggattatggcacaacagaagagagagttccgtgcgctctagcaaggaaccatgtcagttacagagtacctgcacgagttcaaccgccttgcgcgctacgctcctgacgacgtgcgcaccgatgctgagaagcaggagaagtttttgtttgggctagacgatgaattgaccaaccagctaatctccggagtctatgaggactttgagaagcttgtggacaaggctatccgccaggaagagcaacgcaacanaaannaanaaaattttaaggnaancccnccgnaaaaaaaagaaagacagctcagatcagctttcctcaggggaacaatcagaagcctcgtttcatgacgggacagctaggtgggccttccaccctgatcgtctgtcagcaccatccctatcacccgagtaacttcgacaacgactacaacggtggcagtcacaacaacagtaagcagcacaaccacaactcgactccacccccactaatggcaccagctcagtcagatccgccagctgtgtcagctcagtcagaacaacccaagaagggggctgtaggaaagccaggacactgcttcaactgtggcaagcacggccactttgctggcaagtgtccgaagctgaatcgcactggacccaggctcatccaggcccgcgccaatcatgtgtctgcagaggaagcacaggcagcaccagaggtcgtgttgggcacgtttccagtgaactcatatccagcaacagttctctttgattcaggtgcctcgcattctttcatttccaaaagatttgctgggacacatggattatcggtagtggaacttaaaataccgatgcaggttcatacccctggaaatgatatgaggacagcacactactgtccctcggtgactatagagatcaagagatcaccgtttctatccaacctcatccttctcgaatctaaagacctagatgtcattctcggaatggattggttgaccagaaacaagggagtgattgactgcgcaagccgcaccatcaccctaaccaacgacaaaggggagaagatcaccttccgttccccagcgtcgcagaagtccgtagcgagtctgaagcaggctgctattgagggtcagacagaaacagtggagaaaagttctaggaagttggaggatattcctatagtacaagagtatcctgaggtgttcccagaagacctcactacaatgccaccgaagagagaaatcgagttccggatcgatttggcacccgggactgctccaatttacaagaggccgtacagaatggcagctaatgagctagcagaggtcaagaagcaggttgacgaacagctgcagaaagggtacatccgaccgagtacttcaccttggggtgctccggtgatctttgtggagaagaaagacaagaccaagaggatgtgcgtggattatcgcgcccttaatgaggtcacaatcaagaacaaatatccgttgcccagaattgatgacctgtttgatcagctaaaaggagctaaggtgttttccaagatagacctgcgatcaggctatcatcagttgagaattcgggaagaggatattcccaagacagccttcatcactcggtatgggttgtttgagtgcacggttatgtcatttggactcaccaatgcaccggctttcttcatgaacttgatgaacaaagtgtttatggagtttcttgacaagtttgtcgtggtattcattgacgacatacttatttattcaaaatcagaagaggaacatgagcaacatcttcgtctggtacttgagaaattgaaggagcaccagttatatgccaagtttagcaagtgtaacttctggttatcggaggtcaaatttctgggtcacgtcatttctgctcaaggcgtggcagtggatccatcaaatgtggaatcagttacaaagtggaccccaccaaagacagtttctcagatccggagttttcttggacttgcgggctattaccgtcagttcatcgaaaatttctctaagattgccaggcccatgacacagttgctaaagaaagatgaaaaattcaaatggtcagctgagtgcaaccaaagttttgaagaactcaagaagaagttagtctccgctccagttctggg

SEQ ID NO: 24011 - DNA, 1273 bp, Oryza sativa
caggtaaatgatcctgaaatagctgagctaaaaaagaatatgagggtcggaaaagcccgagatttccatgaggatgagcatggcacaatctggttgggagaaagattgtgtgtgcctgacgacaaagaactgaaggatctcatactcacagaagctcatcaaactcagtattcaattcatcccggcagtacaaaaatgtaccaggacctcaaagagaaattctggtgggtcagcatgagaagagagatagccgagttcgtcgcactctgcgatgtttgtcagcgagtcaaagcagaacatcagaggcccgcaggactgctacaaccccttcagatcccggaatggaaatgggaagaaatcggaatggatttcataacaggtttgcccagaacatcgtcggggcacgattcaatctgggtggtcgtggatcgactcaccaaagttgctcattttattccagtacacaccacctatactgggaaaaggttggcagagctttatctttcaagaatcatgtgtttgcatggggtacctaagaagattgtatctgatcgaggaagccaattcacttcaaaattttggcagaaactgcaagaagaattggggactcgtttgaatttcagcacggcttatcatccgcaaactgatggtcagaccgaaagggtcaatcagatcttggaagatatgttgagagcttgtgcacttgattttggtggagcctgggataaaagtctgccttatgcggaattctcttacaacaacagttatcaggctagtttgcaaatggcaccgtttgaagcattgtatggccggaagtgtcgtacgccactcttctgggatcaaacaggtgagcgccaactgtttgggacagaagtgttaaccgaagcagaggagaaagtcaggaccgtcagggaaagactgcgaatcgcccagtctcggcaaaagagttatgctgataaccgccgaagagagcttactttcgaagcaggggattatgtgtaccttcgtgtcactccgcttcggggagtacaccgcttccaaaccaaaggcaagttggcaccacgctttgtgggaccatacaggatcttggaacgcagaggtgaagtcgcttaccagcttgagctcccatctaatatggttggtatccacgatgtgttccatgtatctcaattgaagaagtgtttgagggtacctgaggaacaagctagctcagagcacattgacatccaggaagatctgacttatgtggagaagccgatgggctgcaggaatt

SEQ ID NO: 24012 - DNA, 34639 bp, Oryza sativa
atataactaggatgtgtctaattagatactatgttgctatatcttgggatgaaggcctttttttcctttctagttaacatgcagatccaaccttgattttcgttagcacatttttaagctgttaaatgatgtgttttgtgtgagaactttttatataaaagttgctctaaaaatatgaaataaatccatttcttaactttaaaataaataaaaccttgttaagcatgtgcttaatagctttctcgttttatacgctcatatttactcaattagattcaaacgcttgaatggagagaaagtatgttgatcggatgataattataaaatcttggggttttaaaagcgctgaatcgtattgggtggggaagagtctagcaagctagcaactgtgcttgtgggaatatatactgaaacaaacactttatatgaaactgatttagtattattttcaatacaaaacaaacacattatcaaaatatatttaatgttgaatttaatatatgaatctgatttagtattatagatgttgataattttttctataaatttaattaaagttaaaagaattttaaaaaaagttaagtattttataatatgaaacggagggagtactcagtactagctagggtctgaaagtcccagagagtgtcttatacgcagatatcctccccgttccatgacatacgatgttacgtagctgtagctggtagatcgattgcagttgttctctcgttctttctatccatacttgcattatattggcgtattccactgttcctactcaccttgtactagttggctgataggcgtagttttctatgggtgcttgaacgaaggatttgtaaatggtttgagttggattctccgagggtgtttatgcttatacttatcagctaaaatttaaatttttaatcttaaatttgaagccaattttaggattttttttatcgaagtttattttctaaccattgcttttaggtcgctaaaaacacgtatataaaaattgtattcacaaattatttttcgtttgtaaatatttcgtttggtttattccacgaataagcgaaacattggggccacgagtttctcgcactacaagtaatttgaaaatgaaggtagtacgtgtcttcgtacataagtacaagttatttattagttttagctaaaatattaaatgaaattatgtacgataaccatatgtagtgtacttcctctgtctaaaaataggtttattttttatttatcccacatataacaatatgaaggaaaagattacaatacctcaactttatcaaattttaatgtaattgttcaactatatctacttctcagtgcatttatactctattttcacaaactctaattaataccatgattttaaaaataaatttattttgaaacaaataatcttatttcggaacggatggtgaaggatgtacatgtatacaagttatttatcatagtggctactatagcagatagctgggctggctatgtgcggggagcactgaattgttaatggttcgacggagtctacatcgatctctactcgcttgcagttgcagggcgaggtggcgggggacgtgtagtggactacataccatgttttcttatgctaggtactactatattatttataggaaaatattgtgtatgtttctattatacagttgtagaaggtgtgatgaaaaaacaaaacactgtgcacggtgtgccgtactcttaaaacactatgatgatgcaaatcataggcaaccacggatagatatttaattagcgaaaataattttcttttaatgtttatgcaagtaatataatattagcttttattgggtttagctttctcacctgtggtgttacagcatgaaagctcaatttttagcaggaaggctggaattaaagaagtgttggcatttagtcgtgagtgcggccgtgcggctgcgagtgggcctggctccaggcctgttcggttacacggcctcgggctccgttcctggggcggtcacatgttgtgggcccattgcaccgtgggcccatttggatccccaccttcgacaagacgtaagcccagagtccacagatccgggcccacaagctggtctcgcgccggtcaacgggcagctcgtgacgcacgcgagtcgcgtactagtactgctgtactgtgtgcccgacacaacctgaccagctgttgtacttgcacccagcctctctgtgcacgagtactcttttccgataaaaaaaaaattcaatcctagctataaatataaaaatatacatgtgtttacattcttaattaagattatttttttttatgaaagattgagcattcatgcaattcaaaacaaaaaagttgcaaatttgcattgaagttcccacccgacgcacgatggactttacttcctttatatctttcataaaaataaaaaaagaattcccatatatgattatcaaatttggatttattttttcctcatatgatcatgatcaaagttggatggaggatgtacatttaaacatacataaattctctgcaaaaatacatgagcgataaaaagttaaaaagtataaatgatatatttgaaactactctagtaaacgagtagaggaaatctaagcatctctaatctatatttcctataaagttacaacccacaaactctaaagcttaacatacagccatgccacattatcacccactgaacatattcaacctcatacaagcatgcaacattgtctacaatatatttaattctacaaatcaacatgcaaacatatccaatcatcaccactcacatcattttcacaatatttttacaaatctatctatcatttttataatatttaacataaacttatcaatatgttccacattaaagcgcgggtcatttgtttcatgataaatactgataaactctaatatttcatttgttttctttttatccctagcttgattgtagcaaaaatatatatatattgaaaattacttagtaattcctgcagcaaagcgcggggaatcacctagtaattattacgattaccactatggctttatggagtgccaacgtggtggaaaatatttgtgggacctacaaatcagtctatccctctccttcatctcctccttcggcatgcagccaaccttccctcaccgccatcacccatgtcccgcatccagtcccatatgccgtccacaccaccatcgcctgaatatttgctcaagatggaccctgttcatctccaccgccggcgctactcgagaggcctccctcctgagctcactcctccaggctagcctcgcctcgtcactcgcagggtctacgactccacttccacgtgcagacttgtacacttagtctgcctataacctcttctctgtcgccccttcattcgaaaaccgttgtagttgggttcgttggcgttgtgggcttcccccatttcttcactctcctctctaatagggcctaggtcagcccccttcactacgctgctcccaacggcgtcgtctccactggcagctgtctccaagtcgcttgagcacgattgcacgaagttgagtcgggtggcgccatcctccctggacagtgtgactgttgacggtctttaaatcataatatttgaccgtcaatacttgtatataatgaattaacatatggcatccaacttagtggtagggattattactaatcaattccactagtgttagtgaaatatgttatgcagttattttgaggagaaaacacatccatcatgcgacaaaatggacctccgcatatttaggatgcgtttacccggattggagggcccataagtcgataaaaaccacttagaattgggccaaaatatagtgcaagttattggggacccattaagcaacctaccggccaaatgagaggctgggaggacactttttgggttcggccgaacccaccagttcggccgaacccgttctgcggccgttcatcgccagattacacgtgtacgctcctgatcacttcccaatggcagttccggggcattttggacatttcacataggctgtaaccgtcatacctgcctatataaaaggaggagctcactctcatttccaacacacaactttgaactgaattacaagatactctattgtatcttttatacattagaataaggtagagagtgaggggaagctttggaggagtgcccggaagtttggcgctcatccaacttctacctcgacgagtgtagcttcctaggagcaattctggaggagtaccggagctgtcagtacactctgctctgggttcggagaacttcttctgtaaagtaagtattcgtgttcctttcttatgttatttaattatttagtctgagtaagttatatttccatctttgcgggttcattgtttagtattcatactaagtgctctagtactaggactccagatagagaaggaagttcctgcgcaagtattagagtagtaattaataacttagacgtggtgtctaggttagagattacctttatttgttgtgtatcccacggatttgtcagaagtaggcggcaggtggtgacagccctgaagcccgtcctagtaatcctccatgttcggatacatcatagagctatagccggaaccacactggcagaccagcagggatcggtgcccgaagcaacagatagaaaattacctttgcttagcatagataattaaaactcatagaaagtcctgtctagcttagcctgcctaccactagttgttgtccttggatagtcttagtcttaggtagattacacatgtttcctgagttcgatatccttttgggtcacccgaaaataaagtgctacagtggtattccgtacacttgcggatttatctgtggttgcaagaaataccaactatgaccggcttgtgcaggatgcgaagatgcctcaccacttcatgccgcgggggagatcgagctgacagacttgtgggtcccacggctctttccacgctcgcactccacgtaggcaaagttgcaaataggtaaagaaatcacgtgacaattttacaagttcaaacctagaaaatgtatttggagatttaattgttaaacctaatattgacacatagttaaaaatttggtgatgactaattcttgctattggcgtaaaattttcgcaaaaaaatcctaaagtaatcgacaaagtttacggtctcatctttttgcttatgcttatatgcttatcagccaaaatttgaattttcaaccttaaatttgaaggtgattttggggttcttcattgaagtttattttttagcctttgcttttatatcattaagaacacatatataaaagtattattcagaaattatttttcgtttgaaaatacgacatttggggctgttaatgttgagcaaggattgaaaacatgtgggagaaaaaccttacgtgaaattaattagagaaaaatgcactggcggttcttaaacttatcatgaggtttcacttagatccacgaacttgcaaagcgcatatcgaggtctctaaatttggtttattgtatcatcctggtccaaagggtcgtttgaccgtggtcttgtctacgtggcacgccatgtggacgatgacatgggtttatttttcctttccccttttctttttcctcctattcttttatcttcttcctctactagagccacctcaagctccccgcgttgaagagcccgaagaagatggaaatgaaaggaagaagtgagaaaaaaaagaaataataataatattgtgccatgtcgtcgtctacatgtcatgccacgtaggcaagaccacggtcaaatgagactttggaccgggatgatataataaaccaagtttagggacctcgataacactttgcaagttcatggtactaaatgaaacatttttacatgtttaaggaccaccagtgcaatttactcaattaattaagggcccctttgaatcataggaatgaaaaaacggaggaataggaaaaacgtagtattctgacagtaatgtaagtgtaaaacagaggattacaaaatattggaaaaacgtaagaatgactgtttgattggaccacaggaaaaacacaggaatttgagaagagataaagactcaaaggatttttttttccatgagattctacctcttgttaaaattcctccaaaacttgtatgggaaaatgcattccataggaatttcataggattccatggggttcattcctttgattcaaagggctttgtaggaaaaattcttataggaatgaaatcctctaaaattcctatgaatttcctttgatttaaagggaacataatactccaacatatccgatactcccttcgttaaaaaaaaactcaatcctagatttgaaattagacaaacatgtgttcaggtttaaacttaggattggattttttttttttaacggagggagtaagtagtactctctccatctcatattataagggattttagatgaatctggataggctccttatctagatttgtagtactaagatgtatcaaatccatctaaaatctcttataatatgggatggaaggagtagtagtaaaagagacggaaggcagcaaaatccaaattaaggctgtttttagttcagtccaaagtttagaatttggttgaaattggagacgatgtgactggaaagttatatgtgtatgaaaggtttgatgtgaaggaaagttgaaagtttggaaaaataactttggaactaaacaaggcctaaccctagtgagtgagagaaggaaaaggcgagcgacagtaactgaacacagatacgtacgtaaacccaggtggcatggccagtcgggcagtccaaactactgtaggtgacgatattatcgaccaagatagaattgaagtaggagtagtaaaaacgataggatggggcgtgacagctagctgcagcctgcagccgctggcggtaggagcagtcctctgccggaaaaaggaaaaatgcgagcgcacaaaattaaacttgtgccctcctccctgcatcatgcagctgcaggcacgtacgtacagtacacttgccggccatgggcgccatcgtcgtcgtcgtcgttggcatatgcaagctaagctagctgtcgcttcgctcgcactgtacgctcactgttcgcgtgcatgcacaccacaccagccggcgacgagacaaatccgcggccggcccctgcagagtccgtacgccgacatccatgctctcccgtgggctccgccaccattgccattgctccagcgaccactggagctctctctccctctctctctctctttctctctcatcttaaggagggcaagtaagcacaaaaagaggggcaccgttatgtaccacggcgcaggtatcgagaggcggctgaccggccggcctttcagaaaagaaatgaaagtttgacaggcatgtctgaaatggtctttagacacgaatgaaaaaactaattttatagctcactgcaaaccacgaggtgaatttattaagcctaattaatccatcattagcacatatggttactatagcacttataactaatcatagactaattaggctcaaaagtttcgtctcacgatttttgtgcgaactgtgcaattattcattgtatctatatttaatgctctatttggatgtccaaagatttaatgttatatttttaggaaaaaaaaattagaaactaagccaagcccaaggttgaatgaagaagatgaggacgacaacgacgacacgggtggtggtggtgggcgcgcgccgtcgtatcgcacttactccaccggccggccacgacatggatggacagggggaggtcagttcacttcactgccgccgtcaactccatccatctgtaggagtacgcagctagccatagctcctactcctggctcctactcctggctcctactactaggagtagctgcaagtacgcggtcgctgtcgtcgtctacctgcagccagccactagagcaaagtactgtagagagagcggttgattgcacttggggtaatgcagtgcgcccatggcatctctgcacctgtgtgtctgtctctcgccatggctggctggcgctctctatctctgatctgtgcctaggtggtacagatgttttcatgctgcctgcccaccttgcctgccaatgtttacactacagcaatggcccgatgcaccatggcacattgattaattagttgagcattctggtacattgatcgtacttactattcaatattggccgtaaacctaattaaaccagtgcaaattattgttagcacatagtttcaggttgtaaaacgttttaactttggttaaaattaaattgcttcaagtttaactaaatttgtaaaaaaaaataataataacattttcaacccagaacaaatttattatgaaaatatatattgaattattgatttaatgaaactaatttgatattataaatattactataattgtctataaacttattaaaaataccataatacattattaatatatattcaattatttgactattaaaaataccataatacattattaatactccctccatcccaaaataaatacagttttgcattgtttatgcccaatgtttcatacttcgttttatttgaaaaaaaaattatgatatgtattttcattgataaaacatgaatagtactatatgtgtgactatattttaaattttttgaaataagacggatgatcaaacgttggacacggatatccacaactgcacttattttaggacagaggtagagtgatgtttacaaactataaagattagataaatattgcaaaaacacactcaaaatttgtataatctgtttgtagacattgcaagaatgtgtcatagctaaaaatagaccctaaaaattagtaatttgctgaaggccactctcagtttaattggatagagaaattatttaaaaagaccagaatgcttcaaagaccaaaagcttcttacatgaggctactgtgaagacagaataagatgtactccctccgtccaaaaaaaaagacaaaccatgggtttccgtgtctaactttgattgtccgtcttatatgaaaattttttgtaattcgtattttcattgttgctagatgataaaacatgataatattttatgtgtgacttgtctttttaatttttttcatattttttttaaataagacggacggtcaaacgttgaacacggaaactaggatttgtctttttttttggatggagggagtatttgggctaatggcagatttacagttgcatagtaactttttaaatttttcatcccaactccatgatcgaagcatgcggccccagagagtaatggttatgaccttgtgagtggcatgcagatccgtcggtgttgagcacgtacgagagtggcgacgacaaccacagtgaccttaggaccgacgacgacaacggcactagcctttggaggtgtggatccagcaacgggaaggtcggggtctgcgtcggcgacgacggattttgtagtgctcatcaacgacagagccacctctcaggcatctcgagatgttgttgcctatgctcctccaccatctatcgcctacagattttgttcgtgtatgaaaaaatagtctaccacgggaaaatgatactactttcgtcctaaaatactgtagtttagtccatctaatccataccaatacaaaagaaaaaaaatatataatgcacctattagcaaactccaataaaattatctcatactttaacaaatcattaaaaaaccactttcacaattgtattatcccatactataacaaattacaatagatctataacccactttcacaattgtattatcccatactttaacaaattgaaatggattataacccagtttcacaatcctcaatactcctatattgcttaaaagataaattctttatggataaatagataaaaatataaagtctccatgaatcttccaaagaagaatattaaaagcgaacacgcaaaacgagataaccattaacgcatgattaattaagttttaattattacaaacttgaaaaatggatttatatgatgttttaaagcaacttttatatagaaagttttcggataaaatacaccgtttagcagtttgaaaagtgcaaatgaaaattgaggaaaaatctgtattagggcccctttaatttggaggaaaaaaatagaaattttggaggatttcaatcctatagaaaaatttcctatgaagccctttgaaacaaaagattgaatcctatccatctttcgaaatttttatggaatggacaatcatgtagagatattggaggaaatttagcaagagttttaacctattggtaactttcttttgagtctatctctgtcatccaattcctacgtgtttttcctgttgttcaatcaaattatcattcgtgtatttttttctacgtattacaattctattttacacttacatttctatcaaaatcctacgttttttctattcctacgttttcttaatccttcctttagattgttcgggggtgaggacgacgtgctcctgtcacacattgctttcaagggttttagatcttgtttagttaccattttttttaagaaaaaatcacatcgaatctttggacatatgcatagagcattaaacattgataaattaaaaaactaattgcacagtatgcatggaaatcgcgagacgaatcttttgaacctaattagtccatgattagccataagtgctacagtatcctacatgtgctaatgacgtattaattaggtttaataaattcgtctcgtagtttccaggcaagttatgatattagttttttcatttatatctgacaacccctttcgacgtccagtcaaatatccgatatgacacctaaaaaattttgttttcgcaaactaataaacaaagccttactggttggccatcaagtaggttaacgacgcacgtacggtgtactaatgctctgcaggctgcgtgctgacgcccgtagtgctagacatggagtacagtatcccaaaaataccacttaaggggtgtttatatggaggaacgtaaacttttgacatcacatcgcgtattatacagggtgtcgcatggggtgttcgggcactaatataaaaactaattacacaatccgtcagtaaacagcgagataaatttattaagcctaattaatccatcattagtaaatgtttactataacaccacattgtcaaatcccggagtcacattccctcctagtttggtttaggtaagtagtactccatccgtctaaaaatataacaacttctctaccaacattctcttctcaagaaatcacaaccctccaccattcgcttttctcatctatatccatttctcaacccatcatcatctttttttatttaactttacctacttttctaataattatgtagtacaactctaaaattttttatattctgttacggagggagtacactttagaaatgtcaagtcgatcgacagctggtcagacacgagtaccgttcatacagtagtggcttgccagtcacatctgaatatagcgtactggcaggctgatggacgtatacagattcgctggttggatcctattttgaataactcggttgtacgtaaaaagtactacctccgttcttttatagttgtcgtttgggagttgtgccccctcacaagcacatatttctagcgactaataaaatgggacagagggagtatcttggaaatttacccttttagcacgcaccaggtaacaacatactccctccctccgtaaaaaaaataataaatataaatcatagtataacgaatctgaaccgaggtatatttatattcgtagtaatataatatgttatatttaaagtattaaatatagattaaaaaaactaattgtacagttaggaggaaaatcacgagacgaatcttttaagtctaattagtccataattagttataagtactatactaacctatatatactaatgatggattaattaggttcaaaagaattcgtctcgtggttttcaggtaaattataaaattagtttttcattcataaccgacgaccctttaaacatctcatcaaacatccacacttaaaattttttttcctgatttaaacaggccatactactagtactggttgtatcgatctgctagggcaggaccgcaggagtagactgtctgcctgcagcagctattcttcaaaagcgctacagtgtacacccccggaggcaatgtcagatcctgcagttcacgtgaaaacgacataattaaacggacacacattatttttaaaacggttttgctaaattttctgcgacacattttctggttgattacagtcgtttgttgagacattggatcggttataggattcgtgctagcatacttaattacgcgtaactagttgtgctttataggttacaggtcgctaattagcggtctactggagaactttactactattttttcttcactgcatgcactcgatcaagtatgagtatttgtaccgaccagcgaaacacatatgtaattaaagtataaatatgtaattagtatatattagtagtatatttagacagtagttacatcctacttacacaccacttacatatataattagtatgtaattttgtgacttacatatgtaattttagtacttacatatgtaattctgggacttatattgtaaatacactaaaattacatatttaatttagtgacttacaatctaaatacatgccgactaacttttggtgaaaaatatggcgtcataaaattattttgacataattaaacggatacacataatttttaaaattattttgacgtatacgggcacacatttaaaatattaaacgtagactaataacaaaataaattatagattctgaccgtaaactatgagacgaatctattaagcctaattaatccgtcattagcaaatgtttactgtagcaccacattatcaaatcatggcgtaattaggctcaaaagattcgtctcgtaatttatatgcaaattgtgcaattgatttttttcattcacatttaatgctccatgtatgtgtccaaatatttgatatgatgaaaaagttggaagttcgaaagtaactaaacaccccgctgttcgtggggcaaggttaaggccagttcgagctgttcgtgtttcggaaaattgaacggattagtagggtatgattaacacgtacacccttcgtcttataaaaaattaggtgattcctcgccctttgttatggaaatttctaagtaatttttaatatttttaatcaagctaaaagtaaaattatattagttattaacaattaataaaactggtttatcaagctatgttcagagaaaaatatattagtaaactttacatgagattgtagatgaaatatgatatcccgcactttaattatatggatgaatatatgctgaagattataaaaatgatggatacatataatatgttaaaaatattgtgaaaaataatatgaaggaagatgattggatgttgatttgtagaattcatgaattatagatgatgttgcatgcttacatagattatgtatgtaattattgctagcagatgatgaggtggcatgtttatatgttgaacattagagtcaatgggttataactttatagtaagtaagataggatatcaaatgctcgttcaaattcatctctaagagttactttttacagagaaagtattaactattgtagattataaaattaattacttttaaaggtttttatataaaaaatttattcacaaaacataccgtaaaaattatgattacagaagacgagtgaattgttgtttcgagttgctaaaaagaactcagtcaaagtgatcatttcgctcgcttatataacaagaatgggccgtgctgagctagggcttggtgttcggcccgatcctagcctagagtcctagaaaacagaatttcccctctttaattcagaaaactaagggactacatatatatttattaataatatttcttccaaaaattcgacatatgtaattatagtatatcatgatgtaattatattgtaatttgcacgtaactaaaatgtaactttcaaaattcctccgtaacatgctattttcgtgaaacggaggtcgtggaaccgaatcctcttacatatgagtgcgctgtgattttttcgttgctcaattgcacaaatcctgaaacaaatctaacaattcaaaattatatacatgtcttaatggggtgctcaggaacctagtttagaaaaaaaaaaagctatagtttatctattttcataatgtgcgtaccccgtcggttcaaaattcactgctacaaaacttcaaataggtgtcggcactataggtgccagaagtgttaaaaccggcacctataggcttttcccaaccttcgcggtccaaaaacacaaaaaaaactgacactgttaagtgattataggttttggttctataaaaaaactaacacctctctatacttgaagtgtcggtttttagtaaaaacgacacctttaattaattataggtgtcgggtttttaaaaaaccgacaactacaataaataaaaggtgtcggttttttaaaacaaccgacaccttttaaaaaccgagccgtgagccgagccgccgagcgcttagtcaagcggataatgtcaccgctctcatcattcttatccacttccgctctctttctttcttttttctctctttccgctctctgctctctcataccctcccctcgcctcttctcctcttcttctctcgcacccttggcggcccggcagtggaggcggcaccctctgctagatccggccgagagcggcggcctggcaggaggggaggcgggggcggcgcctcccctccgtcagatatggctgggaatggtggcccggtaggaggggaggcgggggcggtggcagcaggcggtggcgggaggggaggcgacggtgacggtggtgcctctcctccgctagatctggccgggagcggcaacccgacaggaggggagcgggggcggcggcagtggtgggagggaaggcaacggctggcgggaggggactcggcgactcatgtgttcttgtgtgttttgtgttcttgtgtgctcatcagttatttgtgtatgacttgtgtgttcatctcatgttcttaatgtgttcttcatgtacatgtttcatgtgaaattgctcgatgcattggctcaattcgggctgatgcatcgagccggctttttttttattcctgaggcctcaaaggtgctagttttaaaaccggcaccaatgactgaacatggtgctggttgggaaaactggcacctaaggccggttcccaaccggcaccgattagcttctctgtagtagtgacactactacaaaatatgtaaatggtgcccgttggaaaaccccctttggtgtcggttttcccaaccggcacccggttggcggcattgattaccgagggtcaagggtgcctgttccaaaaccggcacctttgaggcacccatgagccaaaaaaaacggctcgatgcatcgagccgatacattgagccatcaagccgatcccatctactacccaaatcccaaaatttcctcaaatcctcagaaattacattcattaagaacactcatcaacatcacatttatcaataacacatcaacatcacattcaaatacattcatcaagaacgcattcatcaaattcatcgagaatcggaaagagaggaggaggacgccactgacgtctcccccgtcgccgccgtcgtcggatggagaggaggagggcgccgttgccacggcaccgccgtcgccacctccactcccaccgccgagccgccgccgccgtatcccctttagccgatgggccgccgccgccgcctcacctcccaccagatctggtggaggggagtgcgccgccgccgggttgtcggagcaccgccgcctcccctcacaccgccgacccgcagccgccctatccccttccgccgctgggccaccgccgccacctcccgtcccgccagatttggcggaggggagggcgctgccgccgggccgtcggaccaccgccacctcccctcatgtcgtcgacccgcagccgccctatccccttccgccatagggccaccattgccacaaaatataataggtgccggtttttacttagaaccaacatctataattacttaaaggtgccggttttttacgatttcaacccgcagaggtgggaaaaggcctatagttaccggttttagcactactgacacctacagcaatggcaaatatttgatattttgtagtagtgtgattagacaccagtatcaaactaaatccgatctaaattagagaaagtcctccacctccattctgaatttctgacgtagctcagtcccgatcaccacttcacgaagcctatccctgatttatactccagtaacatccagcagtagataaagcacagtaaaattgatccaagccaacccaacccacacgcagagcagaggacgccgtggccacccgtaagagcaggtacaatagcagcaggttacatgtgagctaaggagatgcggaagagaccagagaggagagagaagtaaaacaggctacaaatttataatcagctataacacagtctccaaaatattatgtgtatgagaggtgggatcgtatattaatagtgtagtatatacttataaataactattgtatgaatgagtagtatcttaggctttgttctcaactctcccatctcgttttccatgtgcacgcttttcaaactgctaaacggtgttttttttaaaaagtttctatacgaaagttgtttaaaaaaattatattgatccatttttttaaaaaaatataatacttaattaattacgtgctaatggatcgttctgtttttcgtgcacggaacatgggtttccaatccagtctgccaaacacagcctacttgctcatcatcttgccaaaaattagtagtactagctgttagagtagtccgtgcacagcttaggccattactaatgcgtagctctgggtcgtcccctcaccggtgggcgttcgctttttcgtccgcgccggctccccacgatggagcgcgtcccccggttgagggacacatctcttgccacttttcggccgagcaacacagccgagagacgcattggggggcgacagctcctgtgggcacaggttccccgtacgtattcctattccaccccttggccggaggatggggataaggagggagacgtgttcctgttgccggaggaggaggtggagaccaggagcgcgtgcgcgggggtgggggggggtcggaggaaggggaggagaaggcttcatcggtggcggcgaggtcggcggtggcgaggtcaagcatgcggcggaacttgaggaagatgaggtaggcggcccttgccatgagaaccaagtgcgatggccgccaccgccacgccattgtgccccctcctcctccttccgtggcgtagcaggggggtggggtgggggtgggacagagggcacgcctcgcgtctccggtgagcctgacccgaaaaagccgtcttcccgtcgtcgctggcgctgggtagccccgtgacgccgctccccgggtccgacgaggccgaggaccgtgccattgctgagcaaggggatggggggagggcacgcctcgcgtctccagcgagcggcggcgcgctggatctggcacagtgcggcgtgggaataatgggagaaggagtagagacgggcgacgggcggaggagagtggcgagcggctgcggcgagagggagaggcgagtggtggaggggagtaggcgagcacacgcggagggcaggaggcgcgccggtaaataagagaagagagagggagaggagaggggtagtataataaaatacctacgtgggctttttaggctagggacactcgttgggccactaggggtatcctccattgtaaggagagtttcgtagagagtgctctcgttgcagtatccctatttgtacatgcccttgaggttgtgtttagatccaaactttggatacaaacttctaacttttttcatcacattaacctgttatacatacacaacttttcagttacatcgtatcaatttcaacccaaactttttaactttgaaagtaactaaacacagcatgagtgtcaatgcatgtagtacactgtactagcagctttatgtctgacaagaccgccacctgagtggaccccacgacgcgtgacatgatgacggccgcgagacggtcggacgctgagcgattgagacatggagacgtcgtttcaggatgcgttgtttgcattgcatgtgcacggggacaaacgtaatgacgtcgcccctcgagtactctacgtgttcccctccctcgtcacgtctcctctccagatactactactacttgtactagtcctaccgtgtgcttgtgcatgcatggcccatgcacgtcatatcgccggtcagtcatcttcacgtccacatgcatcaccactggtcactggagtactattccattccacgtcggaatatgtttatttttactcatcctgattaattgtcttaaaaataaatttaggctgtatttagatctacgggtgtaaagtttgggcgtgtcacatagaatatacggacacacatttaaagtattaaacgtagtctaataacaaaacaaattgcaggatccgcctgtaaaccaagagacgaatttgttaaggctaattaatctatcattagcaaaagtttactgtaacaccatattatcaaatcatggcgcaattagagttaaaagattcatctcgcaatttacatgcaaactgtttaagtagttattttttcgtcaacatttaatactccatgcatgtgttcaaacgttcgatgtgacgggggcaaaaaaaaaatttacctgtagatctaaacacccccttagttttaagtgaccattgtatcaaagtttataaaagtagtagatagtaattatattagaaatagataaagagagaaatacgtgtcctgggatttaagaaaccggtggtattttgtttttttacatatattcatatgtatgaaattgatgaaagaaaaattagtactccctccatttcacaatgtaaatcattctagcatttcccatatttatattgatattaatgaatctagacattcattaacatctatataaacgtaggcaatgctagaatgacttacacgaaacggagggagtagtaacttgtttttatagaacggtgaaatgatcgaatatgcatctccgacgacggccctgcatcgatcactgcatgcgtgtgctgggtattcactcttctgtgccgacccgactcagaccaatctcttgttcaacattcatgcattcacgtactaacgtactgcatgccttgttcctaaaatataaagattattaggattcagattttataccatgatatccgttttttttgtgtgttgattctcataaatcgcatcattttagtgatttcacaaccaatcggatacttagaacatctaagcaatttaaaattttgaaaaataacaatcaaagtgacaaaagctattttttttacttaacatcagtatttactaaacaattaatttagaaatcattttattataaagtactcatgtactactagctagcagtagttgtcactgcgccatgtcgactgagacccaggccatctcttgttcaactatgtacttccttcgtctcattttaaacgtagttgtggatttctgtatccaatatttgatcgttcatcttatttaaaaaaatcataaaaaactaataaaataagtcacgcataaactattatttatattttatcatctaataacaataaatatactagccataaaatattaagacatacgatttaacgttagacatgaaaaccaacaactactcttaaaatgagaacgagacggatgaagtacgttattattactcgtacacacatatagtacacaaagctagctaaagcttgcatacgagtatatgcttgttctgggctcttggtcgtgtcgtctacttgctgtctgtatggattgagacgatgctaggcagagagcacattaacgcttacgtgtccatgtacttgtgctgctcgagttgtacgaactacagtagtgtactacgactcgagtcgtcgcagcgaaaaggttgcattgggccggtccatggaccggttaaagcaaggtaacattgcgttagtacattagtactctgtacaatattggactatgtgctagtacaagtactatactctgatgatgtactaactggccagcctactatcggccatagaactattaattgtattttgtcaaaaaagaaggggaaaaaaacttgtggagtttgattctaacggtcttaaattgttaggagtatgcatgttggtccggcatagattttccagtcactcgggttttacgagtacaattgaacggccccaccttgtcattcaactgcatgctttgatgaccgtgctagtctgcaactatggattcgaagagagaatatttttttaggttgcccggtagacccacacgcatacacggaggaggctcgtccacacgcatacaactatggattagaggagcatgtgtcgctgacatatggtctcgtaacggtgcactacttaaaaaaaaggccatagggtcaatatcaatattagtaaccgacatctatgaggaaaattaaactggcacctttagctttgctcgagcaaagaaaaaaaaagaccagctcgaatcgagccgaactcactaagcaccatcgctgcaccatgcgcccatgcgagttgctcccaaatcaaattgaaatccccaaatcatccacaaatcatcaccaaaatcaattgacatcacagataatcacccacaaatcgtcaccaaaattgtcgcttgggctcttaccatccaacatcacaaatctctcaaattgttccttgaggatctacaccttggactcacgaacactatccgtgccttcatgcaagttccgaagcgtgtcccaaatcactttgtcactctcaatgccatccacacggttgaactcacttccactcaaggcgctaagtattgcattagcggcttgagcgttcttgtgctcgttctcgtcgtcctccttggtgggatcttcgggattttgcaaaacatagcatttttcgactattctccaaataaataggttaatagacttcaaatgtatcttcattttatgcttccaagcggcatagtccgtaccattgaagtacagagctttgtcgctataggtactcacataagatgtagatgtagggggatagtcataagggatcttagctcccttatcaccatcgttcccatcccccgcttggcccgacatgatctctccaagcggttaaacctaattaggagattaggctctgataccaattgaaagtgttaattaggcctagaggggggatgaataggctaattcaaaaattcaattaaaagcgaaagcagtaattttcggatatttccgaaattttcggatatccgaaaattttcggagtcagcacaaatagcaaagtaaatcctagatctagttgcctacaacaagaatatgctagcacaaatagcaactagaactatagcggctcaaacaagcaaagctagtggagagggaggaagtaaaatcaccaaagatgaagctcacgaagttgttcccgaagtttgaatccttgaggggattctactctccgttgaggagctcactaagagccgggtcttagctaaccctttcctcaagaggttgcactaagcactcctccttccactaagggtatctcttctctttcggaggtgagatccgaccttcacaaacttctcccggtcaaccataagtagatcggtggctcgggagcgacacctagccgcctaggagtcttcaacctccaagagtaacaaatgaagcaaagaactcctggagatgatgcaagtgctcacaaatcttcacgaagtcaacaacaagcactcacacaaactcgaatccacaactctcacacacacaccaaatccgaatcgaacacgggtgagaggggaaataagaaagcaaagctcaaaagtgctagagagagagagcaagccaagggcacaaataattggaatggaaccagcagcactcacaagtgaggggggctatttatagccagaacccaaattctgcccgttatgcacaataattgagattttcggatattccgaaagattttcggacatgtctgaaaattccagctcagcaccaacaacaaagtcaatgagagatttttcggacattccgaaaacttttcggacaagtccaaaaatttccagaaccaaaaacaccgttctggatgttctcggaaaagtccgaaaatagctttcgaacaagtccggaaaaacacaaaagcatttttgaatttgctgaagttttctggaaactccgaaaatctattttggaaaagtccaaaaataaacagaaccatatttgcctccacagtcattttcggaaagtccgaaaatgtttttcggacatatccgaaaatttccaggagcgaaatttggttatgtgcattttcggaaagtccaaaaatgactttcggaaaactccgaaaatgtctagaacaactcaaattgaggagaaacacttttaaaaattgattttgagcactttgatcactcctcatatgtcaatgcatcatccctcttaatagtgcggcattcctatttactcaaatgaaaagaaaagttacaatataccatttgctcctttgccacatcacatcacatcaacgtatttggcgggatatgcattacgctaactcattgaggatataacaaccttcacatttgcttaaataaaaattttagtcctctttaatcgcattgtaattaatcaccaaaatcattaggggcctagatgcactttcactttaactacagcttctcagaatctgcataaaaacctgaacgatttaggagagtttttattctgaaagaaaactgtaggtgccaaaagctccctaactaggcccttagctaacacagaagggttcatggttctgcttgtcaaatagttgtaaaactactcttcttatgaacacaaaagctggctttggagaatgtatataggtagacgacgtaagcttaagaatttgtatttttattaaccaatgaaaaaggttataaatcacttaagttgatatgtggtttatgataatttaaatactatatagattgataataaaaagctaaaagtaaggtgatgactttatgagagaaaaaatgagagaaataatttggacaacagattaatcatttaaaggctagaaacaattgatatgatgtggtctaatgagagaagatagaaaacattaactaagtagggataaagtatataggatattgtagaaaataaatagatatatgctgaaatattatgtaaattatgtgggatgatgatttaacatgtttgtatttgaaaactttagaatatgataaaatatagagtaaatttcacaaaactacatgtactttaacaaaattatcgtaaaaactacaaatgtaagacgttgtatcaaaaaactacaaatttaacacaaaatttatctcaaaactacaaatttaagaccaagtatcgcaaaactatagatttaatactggagttgtcacaaaattacatattttacagtttaaatatctaccactactattatgttagagttataaatgttgtagttttgtacttataacatggtgcaaaacatgtagtttgtgataattttattactaaatctgtagtttggtgatcttcgaagtttaatatatagttctttgataaatttggtcataaatttgtagttttgtaatagaccttcttcaatttatagttttgtgatagattctttaaagtatatatgtagttttgtgaaatttactctaaaataaatgctaatagatgatgatgtgctatctttgctggttgagtttgtaggttacgtttagaatgtagtgggttgtaactttatagataatagagatgtgctaattccttttttcccattgaaatcaatatatatatatatatatatatatatatatatatatatagtaccaataagttcaggagtaagataacatttaaatcggctaattatcatattaccaaaaaaaatcattttcattaatattttctactctcgtgtgtgggttgtttgagtatgaagtcaaatgaatacaaaaccttgatggaatcaatataaccattacgtaaaagtataattaggatcattgcgataaataaacacaataaacttattggaagtggtactagttttcttatgcataaagatgaggggatatctttattttttaagtgcgatcataattttgatatgggcactataacaagaacgttgattaggttctccaatgtaaatatctatccaattaagaaaatgttttaccacctcatagcttgtgatctttaactattttcagttaattgtgtgcctgaacaccaatgcgttcagttctctatagataaagtagataaagatgacattgtgtttataattgggcacatcgctccacacaatcctattgagactgtgaggatttggataaggagcataatgatgaactaaaagcactactaacaggagattttgtgtaactatatatatgtacattagagaactattttatttatagtttaagaaaatgatcatttttattcttatgtatagtgtgattcatatccatccgttaaagatgagcacgatcgagtatacatgtgagggcactatagttgtattggatggtctttgtggaggaaggtaaagttattggagtacacttagccgctgataagtcatggggagataatatttctactgaatctgtgatacatacggaatggttagaattggagatggtatttagtaaatatgtgatacatgatggaattactaggagtgggaatcataagttcaaatatttactctctttaattttgaatatgaatatgaaaagatcaattgttgatgcatgtgttttattaattatatttttttttgttttagttagctcttcatcaggttcatccaaggacacttagactaaatgtagactaaagtgtaaagatgatcttctaatttggtacagggtcgtttagaaaacttaactttaatcctatcgctatactttaggcattggtttgctcgctgctatcagaacgcgctctactatgtacccagacaacagggaggactacggtgatatcaagggttgtcaccacctctacaccaatctaagtactgtgggatacgcagcaaacactagtaattaaccatctagacaccatttctatgcaattaattactactctagcgttagctaaacacaaagtaaccactatctcttaatgaataatagtgaacagtgatccaccaagctaaataggtactaactaagaagtataccatacaagataaatctcagttacttaattaagatattctcaactcgagcaaaataattgctaaggtataaaagaaataaagagagttatcaacaattccgaaactcctccaactctttcgtcctcactgtctcttctttattctaagtatacataaataaatacaaagagcctcttataattcatctgtacatcttggtggtgttgtgaatgaagaggataggggtatttataggccttagaagtgtggagattctaagcatcaaaagagcatcttcactcttgagctgacaagtgtcctccatggcagtggcaaatctaggatttagtatatgggtagtccgacctaattttttttttctaaatacagtaaatctaacgatgctaatatatacaatgcaagtatagataatagaatagaccaaatcaccaaaagtttaatatgatatattaataaagcatcttaaagcatatataattagtaattaagtaaaatttcgatttaaagaagcttctatggctataaaagtctaaagaagattacatactatgttttcttcttatcgggtctactttttctcctcaacaacttgttcttgagtgtgctcctcaatcataaccgaggaagaaggcaatttagaagcattcttctttgcagcgtgttttcaaaaaaagagatgcaatatctccatctttcttcatgcttcaacaatccacaatttagtactacaatttaatatcacaatgcacaagagttcaaaattataaatttgaaaattgaaaacagtacacaagtagaaaacctaaaattgttggcgcgggcggctaggcgacggtggcggcgcactgtaacaaggaggttaggaggcaggtcttcgtgagtccgtgactccgttttctagttttccccatcttcacgatggctcctcgcagtggcataacacactgcagcagtgcagcactacggcggcaaaggcggcgggttggggaggcgtcgggctatcacgcgttggcatcatggcgtcagcgcgtgggccggcggttgcgcggtgctctgatcagatcgtgtgattcgcattggcgctcgcgagggcgtggaggaaagaggcgcattgggcccgacgcaagtcacgcgacgtttaagtttctttccatcccatcgatccaagcgcgtgcgcgctccggcaccgggcgggatcgctattttctctctttctatttttaatattagggtcgatcgccgatttttgggtggtccagggaccacccggaccaccctatggatctgccattgcaccatggtggtttattccgatagaaatgttcacaaccgccttggatagtcgataactactgacctataaatattgagggccaggtgggctgtctctgggttggccgacccaaccgctagctggcccttctggccctaggctttctcctaggccctggtaggtaagtccttggcccagtcacatggtggttgggcccattttctagtatttcgttggatttgtgggcccaagacttcatgggcttggatattaatgtaattcttcccctctgtcagggttacggataagcgaaactgctaatacgcgctcagtcgcgcgccccctcccgcgtgcgactggacacgtgtcgcgcgtggagaggagggcggcggacggcgcgttttttttggcgtacgtttccttttttttttctgtttttccttccgtatattttcagtttacggtttcttttttttttctgttttttctttccgtatctttttcaatttttctaatacatatgtatgcaaactttatatatgtacatatacaaactttatatacacgtatacaaactttgtatacgtgtattttttgggttgttatatgtacatatacaaactttgtatacacttatacaaactttgtatacacgcgtatataaagtttgtatacacgtatacaaagttgttatatgcgtgtatacaaagtttgtatacgcgtgtatacaaaatttgtatacgtgctaatacaaactttttttatgtatgtatatatatacacacacatacacatagtatagtactagtagtagtataaaatactagtatagcagtataaagaggaaggatagtatactagtagtagtacaacgagacataaggggctggactgaccgcgcgcggctgtaggcgcgcggtcagtcgctaatcagccgtccccacggataaggcataccctctatcctaggagttatgagatatacgaatacggtatatatcgtgatatatggaaaggacaagtgtaaagtaaggaaatcagcaaatcggtatggtaaatatcctttatgagtagggctatatatgtgtcctactcagataagagaaacatggtattgtatcgtgcagggtccgatgtctccgagttctacttggagataaagctgacctgcggtataaatacacaccccctgaggggttcagggcatcgaatcctaagggcaagacacccaccaccacataagcaatccggaggacttgaagcctattcgccgaaagatctcatcaagcccctcttgacaaggatctcgtcggtaatctcggagatccgttgtcttctctgcactctgtggttttctctataatcccacataaaccggattagagctattaccttacgaggggcttgaaccagtataatccttgtctccttgtttgcttgatgtcaaatcgtgtaaatcctcgtaccaacgtaccctagtaccctcatcatctagtttacgagtatcccccgtcgacaccctcctttatgtatatttcatctcaactttggttgtttgtcacctgtatccaaatatataccaacactcgtggaaattgttaaaattaaaacctaccactatattggatgttttatattttcaaaattatgcatgtattgacggtgtaaatttggtatttaactgccatcaacagtatcatcataattatattggtgtctttatgattcattgtagacaaattcgacaatagttacaatatagcagcaaaatatgtatcttgtcagatgaagctggtagagccatgtcttaccatggctaataaagcatgtcttcttcaaaccatgcaaattagttaatccatatgacacatattcccatgatctcgcctgcatgtacacacaagactctggcccaaccacatctagcttccatcctcactttttctagtcaccaagttgaaataaatccagataaagaatgaaatagagttcgcatctaaattttcggtttctattgaactagtctgatggtagtattaacatacgcataccacatggtatattacttttcagcttgagttacatatgacttttagaattgtccaaaaaaaccatatgaagaacttacttgaagcaattgaaatataaaattagcaacacaactatattggtcacttacaggctttcaagctaggtacagttttttcacttgatacatttatatgtattatatatacttattggccatttagttttattaaaaatgatcactcatggtcgcatctatttctagagtttgttagcttttgggcatattttagtttttttttctgttttagaagcaaggaatgaatttgttaaagtttatatgatgtgttttatattctgaccaactaaattgtgcacaagccaatttatttaatacgatcgcaaaaatcacagagttggaaaataccattgtgtgttatggttgacacacgggtctcacatatataggattgtattttgcaactaacttatctgtgtggtggtattgtccaaattatcccattgtgcacggcatatgctcttcatttttcatagataaggaaactatttttaggaatattgtttgcacgtgataggggttgacgtgtgcatggttcttccttggaggaggtgaccatggaggtgatgaagaagttaccatatttatcactcttcaatccatgcaacactatttaatttagaatgattaacatgatgatatttgttatattttgttgttcttgttttctgtgtcgggctttttagtttgtttttgtgctatagggatgaaacataaaaccttttaatggttgtaatgttttatgctactagactatatggctatattatgcttactgcttctttctggttgcttaaatgagtaatgggagaaattgaaatgtgctttgctagaatgtgagaggcatgaattgtgatgatggatggtaggcaattaggaataaaattgacgagagtagttgtcccttcttttgcctcccggaaataaaaattcaaccatctcacaaaaaagttgtgataatcttgttgaggaaattatctacttagatatttcggcaagatcaaatatcgctactacataattaatttttgcatacggccaaatcgattttcacaggtggctaggcagcccgcatgcacccaggtgtctgcgaaagtcatatttttccatgcggccagcacaaccgcatgcgaatctcattttcgcatccagtcacatataccgactgcgtggaaaaataatttcggtgaaatatataaaaattcaagaaaaaaattagccaaaaccctagcccactgctggccaaaaccctagctccccaaggcgggtcgtcgttgccgtagcagctgtcaacaaggaccgagggtcggggatggcagatccgcacatcccgatagcgatgccaccggatccaccaccctcgagctccgccatcgccacctgccatcatcgtcatcatccttgtcctcgttactcaaaccagccggtggatcctcgcgctgcgcgagatggagaggcggcgagatccacatgggaggggaatggggcgctggatctggccctcccgtcaccgccggcggctgatccttgcgtgtaggggccagagaggtagagggatccatgcgggagggggagggacgccagatctgccccttccgtagccgccgctggcggatctgcgtgcatggggggtggagcggcggacggatccgcacgggagggggaggggatttagggttttctctgattttgggttttcttgaacttagctttctaaattaggaacaattagtaatatgtgtgtgctaacgctatggcaacactgctagccaccaaaaccagaaattgataagcagtaatacaagtgacgtagcaggtagaaatccaccaaattggcagtaaaaaaccatatcgatattgtgttaaaatgcatataaagattatcacaaatttcgtcattgacatcgtactacatttcatcaaagttaccgaagaaaaggaatggaatgtctcgcaggtataaagacaaggtaacaaagataataaatggatgagtttgtatcattgaaaataagcccttctttcgcccaagtcattgaagatggtaattgatggctttgctgcattctttcgcctccctttccgagatcaagtcctaagcaaccatcataaaaatttggaaatttcaaaggcacatggattaaaatgtgggtaaacaattcgaaaggattaaaaaaatgaaatagtgattaagacctgagtcctactaaaaagcacccaagagatccttctgccagacacattatagaatatttctttcaacattaaacacataaaagaatgacaattacaaaaacgaaacgtagtagcagaccacttgggtgatcccactcgataaaatagctcagtcgattattttgattttttttatttttttagtaattgtccctaatattctcaattgaagcccatagtaaatagcagtaatcctatattgtttcatcacattgcgatggcgtttgaaactcatatagttatgaagataaaattaagtgttttacataaaacaagatggtattaacatattattaattaagatttaattattacaaacttaaaaaatatatttatctgatattttagagcgactatcatataggaagtttccgctcgaaacgtttaaaaaacgtgcacgaatatccaaatttttcatccagcttttgttcgatgcgtattgggcctcaactacattgcataaaccattattggcccattattcgatctgtattgggcctggatagaacttctgggcctatttggcccactatttgtcggtccgaactttctcccgtcgagggggcggtggtcagcgccaccccgcttggtggtcaaaccaccccacaagctttggcgaaattcggaacacggtggaggagttcgccgtccccgagatgccgccgccgccgccgccgtcggtgcgcacgaggagcgtcacctccgtcgcgctcccgacgcacggagatggcggcggctgtcgccgcgtgccgctctccccgttcgacgcgtactgggtcgcgctgccgcccgtccgccgcgtcttcctcttcccgtccccgccgccgttcggagacgtcgtacgcgcgctcagggactccctcgaggcggtgctcccggcgttctaccccttcgccggcgcgctggtctactcgccggaggaggaatcgctgtccattgtcgtggaggccggtggcggcgtggcgttcgtggaggccgagacggacctcgacctcgggaggctcgtcgacgaaggggaggagcacgacgaggacgcgctgcggcagctcgtcccggacatccgccgcgacgagctccccgcgcccgtcatggcggcgcaggtgacggagttcgtcggcggtggcgggggcgtggcggtcggggtggccatgcaccacgcggcggcggacggccgcggcctctggcgattcttggagatgtggtccgccgccgccgcagcggccgtggccaccagtgtcagggaggccctcccaccgccgctccacgaccggacgctggtgcggttcgacggcgacggcgagctggcccggctgttcttgcggcagatcgcgccggacttgcccaaggtgagctcgctctgttctgttcccaccatgctctagcttaattagccatcatgaccaaagaaatcgaaatgaaattgatataccatgacaaattcaaataataattacagtagtattagcaattcagcatgcgcaatgaggagtcaagtagttaacattctctcgtagaaaaatttggacaccttcggtatttgacatggttccatttgtaatcaatgaattctgttaaaaattctgacaaaaagttcagaacaaaaatatgggaaactgtagttctgattactctggagttcatgttcttccattcaaaactatcctgaaattcttcgtgtgttactcttgattcatcgtcagccataagccgagatgttggttgccccttcttttgctactatgattttgcaagatttgaaaattcggaggtgagatgttaatttgaatcagtgccaatagagcgtatgacatctgtattggcttcagatcgaattcttcgtaatgctatgaaaattgaaaaggacgggcttgattatctttgatcatggagatggagatgcctcagttacatcttttgtaaaaaagaaaagaaaatgtatcgtgacttttgacctctgcaacgactaagatatattacaaaagtgcctaaaaaattacacataaatctggtgatttctgcatttgaggatctagtgattatgaatttggaatagtcaatcttaaaaacgaaaatggagcatttcgtcatgaaaattagcattttttaagttcaatgagtaaactgtgaagtttcttactccccccgtttcacaatgtaagtcattctagcatttcccacattcatattgatattaatgaatctagacatatatatctatttagattcattaatattaatatgaatataggaaatactagaatgacttacattgtgaaacagagagaaagtaattacaaacttacaatgtcaatttgataagcatatttgagagtgtcactgacaatctcctgcagatcgttcacgcgcccctgcgccaatgccctctcagccggcgaacgttcacgttcgccgcgccggcggtgaagctcctgaagcagcgcgccaccgtcggcggcggcaagacgccgtccacgttcgcggccatggcggcgcacgggtgggtctccatcgcgcgcgccagcggcctcgccgacgacggcggcggccccgtgttcgccgtcttcctcgcggacgcccgcgcgctcatgtcgccgccggcgcccggcgcctacgccggcaactgcgtcgcggtgtgcgcggcgtcgctggaaggggcggagctcgccgccggggcggacgcgcacgcgcacgcgcgggcggccgcggccgtcgggggcgccgtcgacgccgcgaggcgcgacccgctcggcgaccgcgcgcggtggcacgacaagttcgcgcgcatcccgcccgggcgcgcgatgatcatggccgggtcgccgtggttcccggcgtacgcggtggagttcggcttgggcaggccggcggcgagggcggagctggcgtccatgaaccacgacggggaggtggtgctcgtcgccgggagggaggctgggtcggtccaggcgtcggtggcgatcgccgccgacaagatgccggcgttccgtgagatgtttgtggttgggtgcggatggggcgagcctgactcgaactagttctttttatgtctaattatagattttagtataatgaaataaaatgtaattttcgtaaaaccctatctattatggaccaggtcacccaaaaccatcgggattttggcaagagatatataaccctagtttttatggttcttacgttttataaaaccatgtccttaaccaatttaacatacgagaaaaagaacaatatgccacttttagtgggtttcaacatgccacccattagaatggtaaggataaaatactacttaataggttgctttgagatattttaccacattaaggagttttaagaccataatgcccctattgttgatagagaggaagggagagagaggggagcggcagctggtgctcaccggcggcggtcgcgagcaggggagcgcggttgcgggctgcgagcacgcggggagggcggctagcggcgacggggaaggaggacggtggcgctacgctgggaggaagatgggcgac

SEQ ID NO: 24013 - DNA, 40901 bp, Oryza sativa
  unsure (1)..(40901): unsure at all n locations
tgtcctcctcccccgtcgtcatcggaggcagcgagtgcgcacacgcgcggcgagctgcaagcgccgccgtcctcctcccaccgtcgacgccgccctagtgccctacacatcgtcgcctcctctccctctgatgtgtcgtctccgccgccacccgcctccacctcgtcgccctattgtcctcctcctcagcgccgcccattgcagtccacccccgcgcgctcgccgcccgccgccggcgagcaccagctcggccttctccccggcgcttccctctcccttcctctctatccatagcaagggtattgcagtcttaaaactcctcaaagtggcaaaataacctaaagataacctattgagtggcattttatccttgctattctaatgggtggcattttgttgaaaccacacgaaaagagtggcatattgtactttttctctttaacgtactcctatatcaaaatttaaaaggctatacttatattaagagtaaaaactacatatatttatccaaattatcataaagctatatatttaacatggtgtatcataaaactacagatttaacactaaatttatcacaaaactatgaatttaaagtggaatatcataaaactacatatttaataaaaaattatcacagaataacaaaacttgacatttataacccaaacataaaattagtgctaaggatttaaaccctaaaatcttaattttgcgataattttattgttaaatatacgacgaatatgatgatttgaactgatgataaatcattcatacgattgaaaaataattttctccattaaattagggtacagtcacttgcaacttgttcattatagttgattgattgaattaaggcctggttcagttcccaaattttttttcccaaaaacatcatatcgaatctttggatacatgcaaagagtattaaataaactaattgcacagtttgtatggaaatcgcgagatgaatcttttgagcataattagtccatgatttgcctatatgtgttaatgacggcttagttaggctcaaaagattcgtctcgcggtttccaggcgagttataaaattaatttttttattcgtgtccaaaaacctcttctaatatccggtcaaacatccgatgcgagttccaaaatttttcttttcgcgaacttaaacagggtctaagtcccacgcttgagttatgtctaacattgcgggagatgtgtctgacatcccgttagttgaagtatccttttgcagtttactttgattactggagtagtacattctaccttttgaggggtatatgggtcttctggtcaccaccttaatttttgttaaagtgacaatgatcccttatattaggtccctcggtcaaaaaaaaaaaaaacacaacatagaaggtagtaatgtgatatcttctaattgaacaaatctggacaactaggagggtcctcctaggttgcttttttacatggagtgagtatatatttagactagaaaaaaatacccgtgcgttgcaacggataaatgctattttaatcttattattattatatgttttaaaatctactatgagaactcgtttggatcatttatttagaaaatcatgagccgtaattaggagtccgatcattttaaattagcatgcgagttttttaaagagattttttatatgattcctcctatatttctaaaagcgaacgaatttaaaaaccgactcaaatacggatttatattttcaaaaggaacaaacttaaaaactgactcatacacggatgatgtaccaagtactagcaaaaatatcttcaatatttataatagtagagattggtgtaatatgccgagagagtaggttaaaccgttcaaggacaaaacgaaaattatgttgcaacgagaaataaaaattccaattcatgcctaatttttcagttctcaattaatgcataccaatcccgccatagatgcagaagactgctgactactgtacgtttttgggaacgttctgcccgtattttgcctgaaaatctcgctctctatttactcacaaatactctctccgtactcgtaaagtaagtcgtttaggacagcgacacggtctctaaaacacaacttttactttttgtttctataaaaatatttattgaaaagtgatatatgtatatttttatgaaagtatttttcaagacaaatctattaatataatttttacattttcaaactcaataacttgagagttattgatgatttatattctcaaggtttgacttaaacaatatcctaaacgactttttttataagtacggagggaatatttgacatgggtagaataagattcagccaaacgttttaaaatctttgacaatcaaatttatactagagtaggctcataaaatctaattaagtccaaaatacttttcaggaaaaatctatgaagataattattaaaataaatatctaaaacgctatttatggtgaaagtttcgaaagtttaatcaaatgttgtcatatttataactagaggagcatttcgaagtaactgttcgttgcttagtgtgatcataaactaagaaaacacaatctaagacaaataaaaagaacaaataccatagatatgcggaaagtacgcatactcaaagacaaggttttcaatgctttatttgatcgaagcattagagagaactgcctcatctttccacttacgagcataagctaaaatttaaattttaaaacttaattttagaattaataatatgggttttcactgtattttattaacgtgtatataaaagttttacttgtaaattattattagtaatctgtaaattatttttaattactaataagacatacaaataagtatatgcataagcagcataaggcaaataatgagcttgcaaatctggcgaatttttctgaagtgtgaacatggatgcttctgctatcatttaggttgcgttcgatttagaagctaaatggttagcttttctcagcatacttgcatataattaattaactactaactattataaaattgagaaatagatttgtttaattttttaaagaaacttatataaatatgtacaaaatatatcgtttaatacttcgggaagtgtgctaaagaaaaacgagatagttgctggatacaatgagacttgctactacgggggtgtttatatccaggggtgtaaggttttaacgtgccacattgggtattatttagggtgttgcatgaggtgttcgggtactaataaaaaaactaattacaaaatctgtcagtaaatcgcgaaacaaatttattaagcctgattaatccgtcattagtaaatgtttgctgtagcaccacattgtcaaaatatggagcaattaggcttaaaagattcgtctcacaaattagtcgcaatctatgcaattagttattttttagcctatatttaatactttatgcaagtgtttaaacgttcgatgtgatagggtgaaaaatcttggggtgtgatctaaacatggcctacgtactccattcgttttatattgtaagtcgctttgactttagttctagtcaaatgtttttaagtttacccaaacatataaaagtttttaacacaaaataaatatactattaaaatatattcaatattctatttaatgaaactaatttgatgtggcaaatattgttaaaaattttcaaaaaattggtcagaccttaaaaagtttgattaaaaaaattaaaacgccttataatatgaaacgaattaagtgctactccaaccatttcgcgttacaagtagatttgactgttttaaaagcaaacttttttaaagtttgaacaaatttataaagaaaaagtgtaacaacacttatagcgctaaattagttttgttacattggacattgaatattgttgattgtttttgtttaatttttttaaatatgctatattgttttataaagaagtttatcaaatctaaagaagtttgacttaaaaaagttaaaatgacttataatatgaaaggaatgtagttgcattttagttgaactcaacttttaaaagtagttgagttttaaattttaaagtagttgtattttagtacttctataaattttaaacgtagctgcattttagtacttcctccgtcccataaaaacctaatataaggcctcgtttagttggggaaaatttttcagtttggttgtcacatcggatatatggacacacatttaaagtattaaacatagtttaataacaaaacaaattatagatcccatcaggaaactgcgagacgaatttattaagcctaattaatccatcattaccaaatgtttcctgtagcaccacactttcaaatcatggcgcaattaggcttaaaagattcatctcgtaatttacacgtaatctgtgtaattgttttttttctatatttaatatttcatacatgtgtgaaatattcaaaatattcaatgtgatatgtgaaaatttttgttttggaactaaacaggagtgagtgggaatgtgacaccagagcgtatccggataaatgtatatgcgcatatggtttttttttatgagtgaatacaagcttgcctaccatttgtcacagccggatccgtggcgcaatggtagcgcgtctgactccagatcagaaggttgcgtgttcgattcacgtcgggttcaaacccccgaaccatatccgggtttatttttctttttttcaattttttttaccttttcccagttttcattttggcgcgagcctttcccgccaaaagaagccccctcttccgcgctactgccctaatcccgccgccgcagccgcagccgcagccgccgcctcattccccgccgtcggagatcgccaccccgaaccacccgcgccgccgccgtggttagcgcgacaatggctgcgccgcccggtgaggctccgctcaccgccgccaccaacatcgaggtgcgtttccatctctctctctctctctctcaggcggttgctgcccctctcgccggccggcgggcgccgctgctgctctgggattaacttccgttctccttgcagccgttctatgtcctccacaagggcggcgccgctgcctcgtcgtcctcctcgtcggctccctcgctgccgtcgtccggccgggcgcgccgccggatcgacgtttccgggctggcatctcccaaccccaaacccgggaagagatcccgcgacgacgacgccgctgaggacgacgacgacgacgagctgtacgagcggctccgcctcgacgccttccaccgcgtttggtccaagatccagtccaccatcaatgtgcaaactcaattcccccatattccatcgattcgtttactactcactcgcttaattcctcagcaattgcagaatctgacgagtgcgatttctcatcttgggattgatccaattttcgattgctcgtgtgggcaggaggttcttcgggggatcagcctcaagctgttcgaccaggtgctgcgatgggtgcaggaatccttctccgcagtccgctccattgcgagaccttccgcagccgaggtgcggcagccataccctctcctcaccgatgtgatctgcaggaagataccgacggcttttgttctcaccagtgagaatccgccatcaatttgttcagctggttggtaggtgtggcgaagaattgctcggtttgatggtttgggcttcttaattttgcagagaatgcggagttcgttgacgacatcacgacattccgggatcttgcagagtatcttgagtccaatggatgtcacctggccaagctgtcggcgactgaattatcggaaaaaaatggagttggttgttgcttcaggagcttgttgaggcagctactttcagatgttccagatgtgagtgacatggcctgctctcaagtcttttttagctgtactttacttgagagtttgagactggagtgcatagccttacttgttgtctgttctggttttgtcactcgaataggtagcggatatatttgcacttgcatcttggtactctgcagctgagaactatgatcagcctatagtcgtcgtaattgatgatttagagcaatgctctggtgatgtcctgggagagcttgtgatgatgctaaggtaaaatttatgtttcatagcattcaatgggtttaaacaactgcggttacatcaaacatgaagtacataaaagttgttttgaccacggttctataccttaatatggttgcttaacatatagcccctccgttctgaaatatttcttgttgtttagttcattttttaactagccaacgtcatacaaaaagaaacacagggagtatttgtttttatcttctctctctctctctagaaagagaggaaggatcctctcccatttctattatcagaagcaaaacagtgaccacaccatccagattacaagattaaggctaaaacagaccccaccttttagccctggatagcgtgatcccactattttcagctaaaaagtttcaagatgctaaaattttgaacgcaatcatgaagctaaactagagagcaactgctacattttcagattacagttcctaaatcacacataacaactcggtttcataaaccctccccggtttttgagccaaaacacagcattttactttcataagcatccatgtcttctgtcttgccatcatgacacttccccttctatcccccttctagtcttctacttcagccttcttgtcatgcttcattataactgatgatagcataaaagcataccaatttgttgtatgatatttttttctctgttttggtgtggaactcaccaatcccttgtttaatcctcttttagaagatattcttcttacaattaagaaaatgaacctggttttatctttcatttatatccttagtttcacctaataaaatttatagtcttgggtatgattttaacctgaatattctatctgttgcagcgagtgggtgattaaaattcccatcttctttgtgatggggattgcaaccacccttgacgcaccaaggaaactactctcatcagaagatcttcaaagattagagccgtgcaagctgaccttggggtctccttctgatagaatgaacgcacttgttgaggctatccttgtcaaaccatgtgctggattctgtatcagtcatgaagttgcagttttccttagaaattactttttcaagcatgatgggaccataacatcttttattagtgctctcaaggttggttcttcatgttaatcttaatctcttttcactgatgttaacaagttgttatttatgtttttccccttatttttgatggatgctagtactaaatcaaattttatgcagcttgcttgtagtaagcacttctctgtcgaacctctgagcttcttgtgcatgggaatgcttgaagaggatcgtgaggtctgttttattttcttccaaacataattcaatgttagctaattatgttcttctatcactaactggaaaataaatatttttaagtttccatatctttcggtacaaactaatatcttgtattgacatggatttatttctttctgtcttatcccacagaacttctggcatgataagtttaatgcactaccccaagaattgcggaaatatgcatctggtctcccgtcatgcacaaggtacaatactgactttaaagattttcaccagtaatatactttgtctaaaaatttccattgcagggaaaaggactcaaccaagtctggcgacaatatggttgacgggttgtctgagcttatgaatattcaaaaagattggagttcagttctcttggtaagttttctttgttctccagaactttcttatgtttctagaaaacagagttgcccagctattttttttctttaagactcagattttcaagttcatttgtctattgaccttgtgatgtctaaataaaagctaacgaaatgtggtttactcgtgatctaaacttgatgggtaccaacaaatgtgttaccatttgcaattagagacagtggaattctggattatcacttcctttgtacttatgaatacttggataatatcatgcaagcctttttttctgcttaagttatagagccataccatcgaataatgtatttcgtatgttgtgattatgcagtgcttgtatgaagctggaaaacatggtaaagtgcaacttttggatattttctgtgaggctgtaaaccctgacctgcacactcagaaggcacccaatctaccaaatgagaagtcaggaactagtagaagatttatagatcaggtgatggatacaataaggtatgttgatgggagttggtttcaggtttttggatgcgaagcttctgattcattgctctagattatctagcggcatttagtagggtattgttgattaatatccattgtagcttataattactatgggagcaaaggggaatttgggattgtaaaattttgggggcagcgacataatagtaccgactgatggaggtggaccctttactgtaatgcttagctcctcttgatgagtgtgttttattggatcaggtaccttccagtggaaacactattttgtcttctagaagtttggagcatccatctaaacgggatggataaggtatgcttattgctaatttttgtagaaaactttttggatatgctatgaactgccataccatatgggttcaagtttcagatggccactttacttggttgctgtctgcaatctttattcaaaacattctgaagggagataattgcttttggtcatttgatgttcgaagtaataccttttgtgtcgagatggcttgagcatttgtcacagtttttgttttgaccaagtcagataactcattcctagtttttaccagttgaaggcttctggcatagagcctagtgtactaaatgtactttttaaaactgtggtgtgactctagttgagaatgtgttcattctaatcccagataacaaacaaggtgaaagagcttcagtccaccacaatcagtacagacagtgtgaggatcacaaaggataagtggcctaggtacttcctgctttattccatatttcatttaaaaattttattagccaaacaaatattaagaatgccaaaacaagttgcaatagcataatgaggttgagtatctctagtggacgaatctgtactgcatttttcagtttcgattatctgaaactggctgaaaatcattttcatggcatatcaggagatcaacaaatagtactggaaatagtacagtagcactgaatgataaagtggctatgctgttggatgatgttaccaggtaaatgttattataagattgaatcaactaagtactattttaatcttatataacttactagatctatttattcagatgattagtacaattgaactgggattatctttctctattttgtttgcttttcaataacttaaagttctttcagcatctaatgcctagatatttcaaacaggaaatttctggtctctgttgagtgtttaccttttcatgaaatcgtctgtttcaagaatgttagcattcttcaatctgtaagtttttcctttacagaaagaaagccggtaccattatgtactacttacttacataataatctataactatcaaattaactgttttaaattctatcacatctcattgtaggctttaattggaaatccgagaagaatggtccagcttgatctagtcaagtcacacaaacatcttaaatgctcttgctgcaggaagaatggaattgctgtgttggcatccatgcatgatacatcaattatgtaagtcctggaaagtattcttattgagcggcgcatctggtggaaatagccatatggtgaaaacttaatcaattggcatactaagttctaatgtttggaatctaaagctcaaaataacagacgtcattctgttgacatagcatgccatgttaaccatcctttatcctgatgtgatcattaaacccattttttaatgtatttttatgctgacacgtattatcctttttaatcttgcaggtgcaatctagcccaagaatatggtgatgtaatcaaccttcatgactggtacatatctttcgatggcattatcaatagcgtgcattcaaaaatcaaaaggaaaccgcacacatctccctcgaaaaagaaatcaaaacccgttgctgcggagagtgaagccatgatccagtatccttgaactaacctttttattacaatttaatatactaaacgtccacaaatatatttgtacagatactagggcagcatttcttgtaatcattaaatccaggtaatccttgactcattggttccagagcaaggttttgcagagctgtcaccgagctacagatcaccggacttcttcggatgccgagcaagagaaggccagatcttgtgcagagaatcgcattcggcctttgagaccttcaacgctagtttaccaactgcaaaccagtgtttttcagacttgtgatgctcacagcttttgcacatggcggttgctgatgaatgatgatggcatgtgagtttatatgatgttatcgtgcaaatggaggaaatatggattattcagaaaccccaacgacggctggaaacttgatattcggttgacaaaatgaagcagctaccgttgcccatttggaatttatgactgcttgtttgcactgcatactggatattgtcttttattcttgcagtcagtagcattagttctcggctttgttctctgtacatctgatgcagcctaactcatcaagcttgtaatttttgtaattcgagtatgtgaattctgacgcactaacaatccatacgagtgcccttcaattttcgtaaaattgatctcgatatactggtagtaatcagcgtttcaaaagtttagacaaatggttaactaacttgcatggcatcaataacagcaagtcagcaacagcatgaaagctgcaaagcttcatttcagtggagcaattgccaatcatcactacttacaacaattagcaaccatccacagatcgaaaaactaccgttagcatagactatgaacccctttgtctatgtcccataaatggattattcgtacttctaactcgactgacgcggagaggcaattcatcttgtccaaaatgcaatcatatgctcgagcaattcagaatgaacagtagatctcgattagttacgcatgcatagtaaagtacaattaccaatggtctgaacagaactaaaaacatgcagccataataaatatgaacattatctaaaaaaataaatatgaacattgacttacaaaaaaggagtaaatttgaagacataattctatagttaggaaaactgaaaattccaacggttttcgaacacagtggcctaattatcgaatggatcatctccgacacctccatctgcaccatcgccgtcgccgtccccaccgccgtcgatcaacatcggcgccgccgccacctcgttgaagctaacaatggtgtcgtcctcaaatttaaacacgaattcaccatccattatttgggatatcatttcggctactcgttcggaatcaaactccgcggcgcctagctctagctgtgcgtcgccgtccgcgccatccgtcagctcctgcggctgatgatgctcgtgctgcgcctggacgccgccgccgtagtcggcgagctccgggtggtcgtagttgccgccggcgtcggccggtggtggcgccgccggcgagttcttcggcggcgccattggctctggtgggatcgccgcgctgggcaacaggtgttccaacgtattacacgacgcaggatccgccatcccgaggtagccgtcgtgctgcaccggcccgccgatcgatgacggccaccacgccgtcggcgagctcggcagcgccgcgcagctgatcgtgctaggagacggcggcgccgcggcaccgtacgcgacctcgtactcgtcgtaccagtcctgcgggagctccgacgacggtgctgacgcctgtgacgtcgaggccatgttcgcctggtccgccatggacgtcatctctccagccaagcccggcagagcgacatcgccgccgacgacccgggcaggccaggcagctgcagtggcagtgccagcggcatcgtcgacgacgacccagccaggcctggcaattgcggtggcagtagcgacgttgccgacgatgatccggccatgttcagcaatggccgtggcggtggcgtaggcggtggcagtgcctccggcgtggagggcttgtccgtgctcgacgccgcggcggcagcgttcaccggctctgtgtcctccttccttctgatcttgtacaggcggtacacggcaaggtcctcaagcttgtccaaaatccacaaaattaatttatcaagccaaattagcacaaattgaattcgatcaatccgcttgatcatgaatactccctccattttatacgttttatattataagtcattttaatttttttctaatttaaacttttttcagtttaatgtttgactaaataaatttatagaaaaaatatggtagtatttcaaaaatatatatattatcaaaatatatttaatgttagatttaatgaaactagtttgatgttttagatgttattatatttgtctataaacttgaagtttaactatgaaaaagtcaaatcgacttataatatgtaatggaggccgtataatggaatgttaattacaagacaaaacacaatatttagacggagttgctagaaatatagtcgatttttttcagccacttacacagtagttacacctcatttacaccccacttacatatgcaattagtatgtaattttcgaatttacatatgtaattttagtacttacatatgtaattttgagacttacattgtaaatacactaaaattacatatgtaatttatgaacttacaatataaatacatgccgactatttttttataaaaagtatgacgccataaatatagctacaccctatttagatatagatcgtaatgtaatgtatttgcggactgatttgaatttaaatataaattaccaagtactacctggtttttggagctaggaatgatcttggtgtactcgtgcatggcccagttggtcttgacagggttttggtcgccctcgaacctacgctcgtagaacaccatggtgagcttctgaccaacatcgatgccgccaaccttcttgctcctcaccgtcttgctcccaccagatgccttccacgtcccaccgtttgccaccctcatcggctgcctcttgttcctagccttcgctgcgaatagcctcctgctaaagaagtagatgcatctgtcctccatgttctcgatatacgtctctgcacacgccatcgccggagaagaagaagacaatgatgaacatggttttaaatcctcagttatagctgctgctattcttcggttataaatgttaaaagaagggtccaactatttgcttttatgtataatttaactgtaataactccatttaacccactataggtattgctgtttgagaaacccaaccgctaaatgtcttatcccactatttaaaatactaatgacgaaggaaacaacaagagaggggtagagtgacggtggcggcgaagcgggcgtaccacggaggagggcggggtggaattcaagtatcctgatatgctcaaagacgttattgagggcgccggggacctcacctcggacgagcttgcacatgaggatggcgaaaagctctaggtccatggggacgaagtagaaaccgacaggcatgccgtgccggttcttgccgtactccggcaccaccttctccttccccttcaacttcccattgttgttgttgcttccaccgctgccgccgccgtccccatccgccggctgctcgcgcgtggtgtgacgaggactgcgtatttgaggggtggcgcgagatgttctcttctttttgtgggagtgaggcggtcatttgattcgaattcaatttaggggaacgtttttgatttttttttaatccaatacatgaactcgccgccatcgggcatcgggttgcggacaacggcgtaagccatggagattgggctgacgttggcagatcatcacgaaggtgagactgacggtgggctcgccgccgccgccgccgccgccgcagccgccacgggcggagggagagaagggcgggtggaccttgcggtggtggtgattcatggggaccgcggcggctcggtcgcgcgcgacgccgctcctggttccatggcgatggcggtggtggaggcaggccggcgggtagagagccgccgctcgccaacggcgaaggggactatatagggcgtgtgggtagagagttttcttctttcttttttttttcctttttctttctttctttcgtttcttctttttaatggccagacacgtgggcctgatgggccttgaatttgggcctatgctaaccaggagttccaaaaaaaaaaatccaaatttgaataaaattcggatttacacgttattatttagaacaataatgtaaatcattattgttaagataagtgggaaaacaagtgttcctgcttctagtccgaacaggctgcatgcaacccaatcgaattttcggttagtggatccatgccattattgctttacccatttcgaaaaatgtcattactattaaacgacctgtatcattacaattcgagagctattttgagatatgctagtacttacccgtttggtgcattcattaaatttctgcgttaattggatccatgtcattacaaatctgtcattttggatgaatgacactactattctcatcgattcgtatatgtcattcaaattcacacaaaatttaagctgctcttggatttcattatttagttgcaaatgtctccagcaatggcccttttaattgttgtcaatgatttttttttatttcacgcaattattgtgacacttgggttgctgaagttagttacataaattgtccagctctgattgtaaactgtcctttggcacttgtaccacactccattttcttgcagacgcatactaaaggaatattctttgttgcagtggtagtggctcatcagcacggtcattgatgatatctcttggtctgaaggatcattcccaggtattatttgaacttaccttcatatatgactgtaattctccatgtttttctcctgaatcttgccaaatcagcaagcatggtcgattgtactgtgcatattagtgtgttctgaggttagaccccgttattttgcattggaatcaatagtattctcgtgtatgtatatgaaacaattttgttacttctgcaggcaacaatgaaatatattgtttccaccataattgagaaccgcctatggtaatactacctccatcccaaaatgtttgacgccgttgacttttttaaaaatgtttgaccgttcgtcttattcaaaaaatttaagtaattgttaattctttttctatcatttgatttattgttaaatatatttttatgtatacatatagttttacacatatcacaaaagtttttgaataaaacgaacagttaaacatgtttaaaaaaagtcaacggtgtcaaacatttaggaaaggagggagtagtttaatttgcataccgagctggggttggaatggctgggcacatgtctattcacttcatcaacagagatgttgacatgattagtgctgagcaattaacactctcttaccaatctagaatttcgtaactatgatttcttcggagtcgatgtatgacaaactagttatataaccaaagttatagcgagaattgcactactagctttgatgagtattccatctacgaacttctgaatgctaatggttgtattatgttgctttgctaatttgtggcctaaaattggtgaaagcaaagcacttttcaggggcatatttattcggaatttcaaggtcgcttcttttttgatggaattttgttaataatctataccctctctagagcaacacataacttgtactgttgtggtgcagaggccaggagtatcctaagaacaatgtattgactgataagaaagcccgttgttggctgcaatataataggtgaacacgtcacttgtagttagcgttataactaaggtatacaatagagatatcctatgcttaatgtaacataaatattctattgtttttatgggcccacatcttctcctcttctctttctttttcccaaccttgcgcggatgcaggcaacggacatgggcggacacggacaatggcgagggcggcggctgcggcggacacaggtgatggcgtgtatgtcactacggtggatgcagacgaaggtggcggccgctgtggacaagggcaagggcgacgacgacggctgcggtggacgaggacgacgaacacgggtgtggacggtgggacggacgtgggcctccgccgcggaggacgaggacagtgggatggaagcgagcaacggcaacggatacgagcgaggatggcaggacggatgtgagggacaaggacgtcgaccacaggcgaggatggccggacggccgcggacgacaacggcggtcgtagtggatgaggacaacgaccgtggcggacacgggtgtggatgtgggatgaatgtaccctgccgtgcggaggatgaggacggcgggacgaatgcaagcaatggttgtggacgcgaaggacgaggatggcgactgcaggcgagggtggtgggatggccgcgggcaacgtcggtagcaaccaaggacgagaacgaccgcggaagatggtgatggcggacgaggatgaggacggtggccgccacggccgtggatgagggtggtgggacgatggcggccacggaagatggcgacgatggtgacgcagaaagacgcgcagaggaacgagaactggtagcgatggtagcattacgggcccacacctcgggtcgcgcgtgtagccaggtggttaattagtcgcctgcccattctctcttttcctctcatttttccagctcaacaaaaaatcctatgtggacctcctaccgccctttattgtacatgttcttagtgaaatagtaaaattaccaaaggtctatacgaaactaaaaacatggagcaaatagtaaatatgaacattaacttacaaaatcgagtaaaatttgaagacaaagaatttatagccagggaaacttgaaattccagcggttttcgaacgagggccctaattgtcgaatgggtcgtctccatcacatccctctgcaccatcgcaccgctgtcgatcatcatcggcgccgccaccacctcgtcgtcgtcaggaaagacttcgttgtacttaaggacggtgttatcctcgaatttgaacttttaccatttcggcgattcgttcggtgtcaaactccgtgccgcccagctgtgtgtcgttgctgtcggccatggcgccgtagccgtcctcgccatccaccagcaatgccggctgcggctcctgcggatgatgctgattctcgtgctgcgcctggatgccgccgttgtagccggcggcgtcatgcggaggcgagagccggtggtggtggtcgacggctggtggtggcgccggcgagctcttcttcggcgtcatcggttccggcgggatcgccgcggtgggcaacaggtgttctagcatgtaccacgttggatccgccgccatcctgaggtagccgtcgtgctgcaccagcccgccgttcggtgacggccaccaccccatcggcgagctctgcggcgcctcccagctgatcgtgctaggagacggcggcgtcacggcgccgtacgtgatctcgaactcgtcgtaccagtcttgcaggagctccgacgacggtgtggacgcctgcgacgtcgaggccatgttcgcctggtccgccatggacatcatctctccagccaggcccggcaatcgccgacgacgacccggccatgcccggcagctgcagtacaggcagcgacatcgccgacgacgatccggccaagcccagcaattgcagtggcagtagcggcgttgctgacgactgtccggccatgtccggcaattgcagtggcagtagcggcgttgctgacgacggtccggccatgtccggcaatggccgcggtggcgtaggaggtggcagtgccgacgacgtggagggctcgtcgacgccgcggaggcagcgttcaccgattctcttcgtcctccttccttttatcttctacaagtggtacacggcaaggtcctcaagcttggcaaaatccacagaaattgatcagcccaaattagcacaaattgtatccaaaattcaaactcaaacaacaaaatcgatcaatccacttgagcatcaatcagttaattacaagacgaacaaaacacaatgtttaaatatactctctctattttatattatatacaagttgatcttgactttttctttttgtaagtataactttataagtttaaccaaaacataacaataattaacattaaacaagcatattatcaatatatatccaatgtttatatttaatgaaactgattttatattgtagaagttgttaatttttataaattttattaaacttagagagtttaacttgaaaaaaaaatgtccaaatgacttataatataaaatggtgaaagtagattgcaacgtaatgcagattgatttaaatttaaatttcaattaaattaacaaggactacctggtttttggtttttggagtcatcaatgatcttggtgaactcgtgcatgccccaattggtcttgatggggttccggtcaccctcgaacctgcgctcgtagaacatcatggtgagcttctggccgatgtcgatgccgccgaccttcttgctcctcaccgtcttgctcccactagacgccttccacgtcccgcccttcgccacctgtgtcggccgcctcttgttccctgccttcgtcgcgaactgccacctgttgaagaagtagatgtacccatcctcctctttcccgatgtacgtctctacacatgtcatcaccggagaagaagaagaggaggaggaggacggtgattgatgaaggggacagaaagagagaggtagagagggggcggcgaagcgggcataccatggaggagggcggggtggaattcgaggatcctgatatgctcgaagacgttgttgagggcaccggggagctggccgcatacgagcttgcacctgaggatggcgaagagctccagggtccttggggacgaagtagcagccgacaagcatgccgtgccggttcttgccgtgcttgggcaccaccttctccttccccttccacttcccattgttgttgccaccgccgtcgccgccgccttccggtggctgttctgcaatggcgggcgagttagttggttagagttgtagtcaaccaggaggagagaggattaattagtcggtgagatagagagagagctagccgagtcgtgatcagtcgcggtggcggcgctcgcgcgcggcgtggcatgggctgcatatttgaggggagggcgtgaggcgactgtttggttcgaattcaatttgggggaaatcgaaggggagtaagagtaggaatacgatgtaaaacatgatgtgagagaccggctgctatttccaattgtggcagccaggcggacatactatttggtgtataatgttttgcacgtatgtcaatactaatactccctctttttttttttaaaaaaaaactctcccttgacgccgtccgcgcgcgttgatctcctccacttccacttccgattcccacacacgttctccggtcgctcgtacgctttcctttcgagagcatatgcgtgcagcatcccgtttctttatctgtttgttacagtattgctttggcgctcgatcgattcgctcccgatcttcccaacgtcggcacctccgatccgcctcgatctcattctcagttaatttctcacgcgccagcagccagcagggcgccaatcaagtaaccggcgactcatccctcctctcctcatcagaccgatccatgaatcacaaaattcagattttagccaatgttctagcgctgctagttttgaagttcatctatgagcttgtgactgctaatggttgtacttatgttacgttgctataatttgttgcctgaaattgttgacagcaaatcacttttcaggaccatatctgtgttcgcaagtcagcgatcccaaccggaacagtgcgcacgaaaaacggagaggcaattagcgcgtgattaattaagtgttagctatttttttttcaaaaatagattaatatgattttttaagcaactttcgtatagaaactttttttaaaaaacacaccgtttagtagtttaaaaagcgtgcgcgcgaaaaacgagatggggaagttgggaacaggggtcacttcttttttaattgaatattttttagtaggaaaaagtacgaagtaccccacgaactattgtggtcgaccgaattacccggttgttgacagaaaacacgaggcctgggagatctgcttaactccagtgcaggtccaaagctcgcattcgaatgtatgagtgtgccagttgatttgatcctgtaatcaacaagaaatagaagcaaagaaaccgcagttaaatctataaatgatagccgatcggctaggtaccgatgacacatcatttatctttgagccgatgtcatatgaatcaatcggcgattataaataaatagtaaggaactaaatctattcgatcggctgtagatattaacgatatatagttcttatattaatatatacttaaatcaagtgattgggataggtcggtcatcgtgccgagacagtataaatcacttagatcgaaatatatattaataacaggattatatatgtctatagcataaccgatcagatagatctagcgtgtatcggctaatactccgatactactctacatcaagatattaaaataggtataatgtattaaacagaagcttaatatatttagattgcgacgatatcttgacacagagggcggatttaacatgtcagtgaaacatatagagcgaatatggttaaatcagataagattggctgaaactccgatactactctaatcggtaaccagagtacaggctagagattgatattctaagcatgacttantagatcaaactcaactgatgcaacataaagtacgaaaagaagacaatatctagacatcaagccggtggaagttcatagagtggtagatatcttatataatctaggtcaacgtcgctatttaaccaatcgggtgccttcctgttacaagatgttagccgattgtaggttagatgacgatattgtcgaagattatgtaagatatatgataacttgacgaattacatagccaagattagagtatcataaagatggaagcactaatcccgagaacataattcatcataacaagttttacctcttgttgaagatcgaaaccgatgcagctcaacccgaaagcaagaactcgtcaaaataaaactaaagcaaaaaggtggcgatgcgccgagattgtattgaacgtgtatgttgttaattacatagggctcggggtctatttatacccgagaattacaagatatgcccataccggacacgactattatctctaacaaactctaagataccataagtctttgcggcagacttttgcccgtatttatctataaggaatttacataagatatcctaattaatagatacaattgccttcccaggactctatccgtgcgtggcaatcatcttgaggtacattaacttgaacccgatgtcgtgtacaagtcatattgtcggaatcggctgtatcagcttacttagcccgactcaaacccagccgatcctaatcgtagccgatctggactccagccgattcctgctctgtttccgaactcgatctccgcctccgacttcgctttgatcaaatcttctttcctgacacaaatgttaccaaatttggtcgttaacacatgccccccaagtccgggatatttgataatgttctggatttgccatgtaccggctccgagcaagtttcgcactccgccgcttttgactgttattccagcactttaaatactaaccgttacccccgagaaatctcacgccgtgacttccgttttcaccgctcaagcgaaacctcttctctctcttctccggtgattcccccggtgcaaaggcgatttctaggcgacttcctcctcaacgagatctccgcccgcaccaatgtcgtcttctgccagcccatctggtgcgctatcagccgaatacactgaggtaagttctcatcggctaaatccccttccttagcagcagatcgattttctcctacctcatattgctttccttctcttggttgcctcggatttgtagcatatttcccaccaagtcgcaattcccagtctgacgcatgaaaaccactactttctcggcccaatcggcaatcctgaccccaccgagttcattattggtgaaattaataggatccccttcagattaaccaacccagatctaggtcactggaagaatactttcaagtcctggccgtctctagagaaagttccaccagaaaagagctggactacatggttcaaacgtgtatcagctagtaagagggtttactgggatgaaattggaatcggccaagcacttgaccttactatagcaaactcggccaaagatgaacccctgatggcagctgcttcctacttctggtcaaacaccattaatgcctttttgttcaatcaagggccgatgaccccaactctcatagatatcagcatgatcacgggtctggatgtcacctcatcagccaaccctatgagcttgaacacaaagaaccaatatgacttcaagaccaaaagcataggaggttggtcaggctatgtagcggcatatatgggtcagggctcggtcacccctcaggaacatgtggcctttttgttaatgtggctagaaaaatttctgttctgtggatcaagttgcggccccacaaccaactggcaatttctagctgaagctctagaaacaaagagacaaatctccttgggcaaaattctcctcggctacctataccagatgttgaacaatgcatcggctaagatagccgtcggctcagtagttggagcaggtggaccctggtggctgctacaaacctggttaaacctgatagttatgaaggttgtcaatcggccatccgtatcagaagctaaattcccaagactagagccgattgtaggagatgatggagaagagagtactcatcggagatgcacatcatacggagaatacgcttctacgccaactgatgctggggcaaaactatcggctgaactgctcaaagattggttctgcagcttctatgaaggctttcaaaaagatgctcgagtttggtttctttatgaagattctgcagaacttgaacacccattggacttcagattcgaagacatcaaccatgaaatataccaatcatccaggaaaattttctcggctgtaattagcccatgcatccttcctgttggcattcattaaggaagaaacatccaagcttacgaattctatcatccaatgagctcagctagataacttggaatgggccaactcccaatcggcttattctttgccgacaagatccaataccgaggagaaatttcatcgaccttaatgatggatcggctactcaaccttcaaggatgtcaagcccagaaatttagcccaaattttcagactattttgtgtgttaaatccctgtccaggaccagccagggtacacaaaacgacaagtaatatacagttccaaatgtaaataaagcgtaaaatacttacagaagaggcacttagtcctcacaccgaaacaaaagcagcagtagcggaaaaggcgatcctagcggggcttcagctccactccacaggcaaaactcaactagggtctgagccttggtcttccaacttcgtcttcagcttagaagcactacacttctgaaaaggggaaataatagcaaggctgagtacaaccaccgtactcagcaagccacaccaatgatgcaaacgtgcaaagggatacaaggacggtttgtggctatttgcataaaggcggttgtaaaacattttatttagcaaacagtaaaactgttgaataataaaggtaaattagatctccactgatcaacgctacaccacgttgaacaggcccaaccaacccacctgtactacagtgcattgactcgatttattaagtgtgagactattcacggtgaatctggtcgatcgcccataactgcgggcacggctattcgaatagttttactctggccagaggtgcacaactatacccacaagacacaacccaccgacatgtcaccgcgtcatcatgtgcccatgatgcacacgtcaccatgtcgagtgattgtgacgagacccttcgcataaccctcccctaaccatccacaccacgctaaggtttcacccccacccctcaaaaggtagtgggtggtcccctcttgtgccgtggcgaatccggcagctggacaaccggacaccccggcctacccaactccatcacgcccaccctcgccaccggtgcctaggaaagggtcgagctatacttcagatcaagcagttacccactcccgcttgtggcaagcgctgtaagtcttctagggtttcccgtgaaccggtccttaattgccatgggtgcgactcacaaaaccatgcacccacagcccaccattcagtcgcattttagttggataattacgaccatgaaacatggccagatgtctcgagcacgcagctcaacaagatactagaatgtctaatactgtaattatcccatcgactgagctagtggtaattaagcatggctaatcatatagttctagctaggtcatcaaagtaacataagctaagcgatttatcacccatggttgacaaagaacagatatcaagtaaacatggcacaagcgagcagataggtaaaccctgatcccatgtaattagcaaaacatgcatatttatttgcaaacggtaaaacatttataaattgggaacaacatgctcaaggggaatgtgtgacttgccttgcttcttcacttggattttcttaactcttttcctcgcgaccgcgatcttccgaaacgacggattctacacgctggcacgcaaaatgaggaaaaaccctaataaaaccaagcaaacagtacataaaaagtaaacaaacatgtagaactcaattttagatgaattttgcaatttgaatggcctaattcggagttcgaatgaattagatatgaattttagaagttttgagccatttaaatagatttctataattattaatgatttattgcgcaattatcaattattttctcaaaggaaaaggcattcgctgacgtcagcaaggggcgccggcgccgacacgcgggccccgcacgtcagcggcacaaaggggcgggcgcacggtggactcggtccaccgcggcctagcggcaccgtggacccggaccacgggcagcgaacagagcggcaaggggcgggctcgccggccagcccgacaaggcggcggcacacgcacggacggccgtcggcgatggcagcacgacgcggcgccggacaagggaggcagaagggaaaagggaggaaggaggcctcaccgtgcgccgggcggcgaagggcgacgagcgcggcggcgagctcctcgggacgattgcaggatggcgctcccgcggcggctccacgggcgggaaacggcggacggaggccgggatgacctaggagggcgatggaatgattaggggaaagggaggaggcgcgaggcggtggaaaaaaaagcggccggaggccggcaacatggggagtagctcacctcgacgggaagtagaggactccagcggtgaatggcgagggcgaaggggcggcaccagacgaagaagccgatggaggcgacggcgcatattaaggtggtctgggacggcagcaggaggcggccggaggcggcaaatgcaacgtcggcctcaggttggcggtgggggtggtttttcggtggtggaggggataaacggatcggtggccgggcttgcccgcgcggcagcgaagccggctgcggtggtggcagggcgcgggtgcggctcaggtggcgacgacatgcggctggaggcggtttagggtggtggtgactcgggtgcatggtggaaggggagtttcggcggaggtttgtgcaaatggagcggtggccggtgtgcggcgaggcatggcgaagccggcggtgtaagcggcgcagcgcggcggtggctacggcgacggcggcatccagccagagctcgccggaaagcggcggagcgcgggctcgcgcggggagcacgggagaggaaacgaggagctcggggaggagagggaaatggaagaggagagcacgagggtgctttttataggctcggggaggagaaatcgtggccggacgtgacggatttgaagcggcaacggccggcgacgtgggcgacatcgtgggcgaagtggggattgatttggcgccaaaaattggggaaaagtgggggattttgtggaggaggtggagggaaaccgattttatgcggtttgggcgcgagggcgtgagcgggaggagccggaatcggcggcgacgtgggcggcaatggcagcaatggcagcaatggtggtttcggctttggaggccgaaggtagaggaaggacctgacaggtggggtcgtcgggcccacctgtcggggagggagagagggaggagagccagggggttatttagactttgcgcgaggggaaattgatcgggccgagaagggaggggtcggcctgagagggagaagggaaggagaggggcgagtgggccaaggagggggaaaagatcttgggccaaaagcggcccaaagacaaagaggggaaattttatttgttttctttttattttaattgattaaatgaaatttgtgctattaaaattatttcttaagctccgaaaattcacgggaaatttcagagagtattttagggcacaaagaatattgcaaaatattcccggccaatgatttttaagggaaaattttaattctcccattaattcactcgaataaattgctttaacttttaatataatgatttttaagaaatgcattattaaatgatttttaaacccgaacgaaaatcggggcgttacaaaggaccccctctgggcagtattgacaacatagaactggcaatgttcagaagtaaaaactttgacagatggtggggtgaatggaagctgcatttattccaccaagcagcttcaatgtatatgacagacctcttcccagatgttgtccctcaagtaagtctttaactccacttgatttaaatagctgtttggccgattaatctcaactaatcctccttttgatttgtagacaacagaatcctctcctccccgtcaaagcaacagtggtaaggatatccaatatgccccaggtttaattcctaacggaggtgggctatctcctccggttattggatatgatgcccccaagacctcagctcttcttcaagggctcatcagggaaccagccgataccggcaaaaagaggaaaaccagatcatcggctgtaagcatcacagccccaactaagaagaagaagacaaagaaaaccaagccagccgatgatctgcctaccctagatccatccattgaacaagctctggatgaagagatatttgaagatgaagttgatcaggccacagccgaagtaagcgatactgaaagaacatcatcagataactattttgtcttatagccgatcactcccaggtcttgtaattgcagaaaaagaacactacggtgaagaagaaatcggctgcaacaacatctaagccagctccaccggtaagatagttttaactttcattggttaatttccagctgattctgactaacacttgtttccttttagccttcccctcctccttctcctcctgcacaacaatcgtcaagtgaccagaccccttcagctgtggggagtcatcacatcgaggaggaagaacaaccagctgctcctgctatcccagtaagtttttctttgtctcaacaagcattcagatcggctatgcctgtttaacctctaactgcttctaaatcattgctgcaggtcttagccgatcttttctctttcgacattggagactaccttgatgaaggagaagaagataccacaagcaaagccttagcccctttatctgatgatgtaaagaaaactctggaaagtatcttggatcggctagaagcatcatcactggatagcttggtggttgattgtggctcaatcagggctcggctacatgagattcaggctctaatcccagatgagttagccgatattcttaccccagccgtttactttgagcaacaccaattcaaactggaaagatcaactatctgaaggcccaatcaagtctaatattgatcggctcgaggctcgcaagattgaactcttagcacaacttgaagaatgcaacgctgagctggacatggaacacaaaaaactagccgatctcccaaagtctattgaagaacagaaagcaagactcaaatcggctatcaagcatgttgctgatctgaccaagtctctgaaagttatccctggaaccaacgctcaggatgcccaagccatagaagaagtagagcagattaggcagaaggctatatcggccatccagcgatacttatctcaataattgttgtgtaataaaacttagaatttttgtaatcggctaacactttactgtcttaacaatcctttgtgccgattaatatgactttgaaatatgctaaaaaattttgcactgcattttgatatatatgtgcccccctagttttacaatgtcaagagcattgataaaattatataacaactaagggcgatataacaatatcggccattgtacatcggcaaaccacaaccgattacaccatgaaaaacaactaagggcgatataaccatatcggccatctcaaggcgatgtaaacacatcggctgtcatgcatcggcaacacgagccgatcatgtgttaacccaaacacttgggtaatatttcttcaaatatttgccattgagcgctcgcccatagacttcgccatcaagcccttgcaacatatatgctcccttagacacaaccttataaatctggaacggtccttcctaattcggcgaccatttgccgaatttattatcacgagtaccaatcagcaaaatcaacttccatacaagttcaccttccgaaaaatctttaggtaccactttcttattataatgccgagcaacgcgttccttatccttggtaacctttgcaagggctcgcaatcgcgactgaaccagatcctccctctcatcggccataaggttgtaatactcatcggctgttaaatcgttttgtaactccgtccgtcgagagccgattctaacttcccatggcaaaacagcctcatgtccataaacaagtttgtaagaaggaacttgaatcgatacatgacaagccatcttataagaccacaatacttcagccaaccgagtatgtcattgccaaggataatcataaattttccgcttaatcaatttgatcaaacttttattagacgcctcggcttgcccattagcttgtgcataataaggtgaagaattcaacaacttgatacccacactatcggcaaactgaacaaactcatcagacacaaagattgaaccctgatctgtagtaatagtttgaggaagaccaaatcggtagattatatgctcctgaacaaattgaatagcatccccagaatcaactttcttcaaaggaatcgcctcgacccacttggtgaaataatcagttgccaccaatataaatttatgtcctttactcgatggtggattgatcataccgatcatatcaattccccaacctctgaacggccatggcttaataataggattcatagccgacgccggtgctcgctgaattgctccaaacttctgacaatcctgacaccccttataatatctgaaacaatcctccagcattgtcggccaaaagtatcctgcacgccgaagcaaccacttcatcttgtgagccgattgatgagtaccacagatcccctcatgaacttcgctaattgcaaccttagcctgatcggcactcaagcacttaagtaatactccatcaatcgtccgataataaagctcgtcatccaacagtatatactttaatgccttatatcttaatttcctagaagccgactgagatggattactcaaatactaatgcacatcgtacctccaatcatcggctgatatcgctgcaatttcaactttaacatctttgatcattggcttataccccaacgccccttgagctaaatcattagcttcaagattttttttcttgagatacatgctttaaagtaaccagccgaaactctttcattagttccaagcacttctcattataaactatcaacgtatcgttcttgcattcatattctcctgccaattgactgattactagcaaagaatcccccatgatttcaatgtatcggcttcaacttccttgagtaattgcaaccccttgagcaccgcttcatactcagcttgattattggtcgcatatggtttaatagtataagcaaactcgaaacatgccgccctaggggaaattataactaagctgatgccacaaccatgagtacataccgatccgtcaaagaataaagtccatggcactatctcaaccgagccgattgaatcatcacgatgctctacaataaaatcggctatagcttgtcccttaatcgctttcggtgattcataccgaagatcaaactcagtcaaggaaaatatccacttcccaactcttctctttaatattggagccaatagcatgtacctgactacgtcggctttgcatataacagtacactcattagataatagataatgcctcaaccttgtacacgaaaaatacagacacaagcataacttctccacaggagaatactgagtctcagcatccaagagccgtcgactgagataaaatacaactcgttccttcccttccaattcttgaatcaaaaccgagccgattgacttctcaccagccgataaatataacctaaacggtattcctttctgtggaggaatcaaaacaggaggagagctgagatactccttaatattatccaaagccttttgctgctctgccccccaagtaaactgctgattggcttttaacctcaataagggtgtaaaaggttccaaccttccagacaaattagaaataaaccttctaacaaaatttatcttgccgatcatctcttgtagctctgtcttattttccgggggctgaatcttcttgatcgcattaacgctcctttgggttacctcgatccccctttcatgaacaagaaatcccaaaaactggccggccgacacaccaaaagcacattttgtcggattcatcttcaagccatatttcctggttctctcgaaaactttccttaaatcggctatgtggtcctccacttctttagatttgacaaccacattgtcaatataaacttcaaccagccagccgattaaatcatgatatatataattcatggctctttgatatgttgctccagcactctttaaaccaaaagtcatgacgacccattcaaataagccgattgcactagggcatctaaaagccatcttatggatatcttcctcagccataaagatctgattatatcctgcgttcccatccacaaaactcaaaattttgttccctgatgcggcatcaaccagctgatcggccactggcattggatattcgtcctttggtgtagctttattcagatctcgaaaatcaatgcacaccctgaccttgccattctttttaataactggaactatgctagaaactcattcagcatatcggcagggacgaataaaaccggcatcatacaaccgtttgatctcagctttaacaggttcaagcatattggctttacatctcctcggaggttgctggcatggtctaacccctggcttgataggtagtcgatgttcaacaatcgatcggctgagtccgggcatctcataatactcccaagcgaagcaatctctaaactcttttaggagttctatcagcttggttctaaactctggagacaaattttttctaataaatgtcggccttggccgatcgcctggacctatgtctatttcttccaactcatcggccgacatgaaatcttgaccttgcttgtcatcgagatcatctactgtatccttggcgtagacatttgaaccctccacgacgccctcaaagtaatagcatgggttctccatcttcaattggctgtatatcagaatcggacacttttagaaaatctccatcccagacttttccagataaacaatcaaggccatccatctcccaaagggctaaatcggcactggcaacattgactgacctgtcggctggcacgatctctgtcttgtcgccttgccattgaatcaagcattggtgcatggtcgaaggaatgcaacaattggcatgaatccaatcccttccaagcaacaagctgtacgaaccattcccattgataacaaaaaacgtggtaggaatagtcttgctgccgactgtcagctccacatttagaacacctctggtttccgatggattaccaccaaagtctttgagcaccatatttgtcttgatgagagcctcggtgttcctacccagcttcctaaacgtagcataaggcatcaaattcaccgcggccccaccatcgaccatcatcttagacatcgtcttcccattgacgtagccgtttatatacaatggtttaaggtgtcgattctccgtcccctctggtttctcaaatattgcctgttctggtgacagaaccaacttagccgatccttgccaacatcttcgcctcatcggttgcagcatcatcggctataggaacctgattcttgacacaccactcctgtcttggctttggtttcctcagtcgatggttgatttcctcttcaacctcctgaaaacgctccctgttcctcaatctctggacccttcttttctgattcttcgtgaaaataccagaaggacaccattgattcttcctgattacctcatcctcttggccacaatcttgattcatcggacccaatctctgatgaacaggaagtcttgcctgccttagccgattacctctactatatgaccggctcgagctctcgatgaaatcactacacccagggcagttttcaatggatggcaacctcatcccttcgttccagcagaatctgaagaactcacaaccctaatgaggatcaaaaccatcgtcgtattcttcataatgcttctcctgctgcttgtcatacttccactgatacttgttgataatcctagccgaattcacttgaaaacctgttgcacggaccctatcggctgcttgactagctgtatgcaccatattaacaggaaaaggattaccatcgaccttcatcggctttttggaatcgtcaaacctaatcttgcccccctcaatggcaacctggatttgctatctaaaaaccttgcaatcgttagtagaatgagatccagaattatgctatttgcaatatctcttcttacctaattcctcagccgatgggatcgtatgaccagcaggaagctgaatttgcttttctcagagtagtaaatcaaaaatcttgtcagccttggtgatatcaaaatcatacttttcctcttttccaggactttttacccattggcatggtatgacctttttgctcctcacccattcggctgcagctatttcagaatcatcttcctcgtcatccgatccatacatgtatggacaaacatgattttcttagagcttctcctgacttccgccaacctacgctcatgcaaggttaccttctgtatcagatgcgataagctatcaaagtcttcggacgagaatttctccctgattggaggaatcataccctggaaggccaaatcggctaactgagcattagttaaactcaagctaaagcatttgttcctcatctccctaaacctctgaatatactcgtgcacgggttcatcatgccgctgcttgatcgctgtcaagtcggacaacttcatctcatgaaccccactgtagaaatagctgtgaaattgcttctccaaatcggcccaactattgatcgacccatatggcaaagaagaaaaccaagtaaaagctgatccagacagagataaccggaataacctaactttcaaagcgtctacagccgatgcttcatggcactgagcaaggaatcggctgatgtgctcataagtcgacacgccctcttgtcccgaaaacttggagaaatctggaactttaaaccgattggggagagggactctttcaaaccactcaggataaggctgccgatacaagcttccagtctcttttggtttaagcccaaattgttctctcattacatcggcaatcacgtcggcccacggtcgttgctgagctgctccttgtggctgttgttgcatagactcgaactgaccatactgagatgcgaactggggctgagccaatccccctagctgatattgggcttgcagggaagggggctgatattgatagctcaagttacccccttggtaattatgaagattcggctggatgttgcgcaccaagtgctcaggaaccatctgaggcatcactgtaccatccggctgtgcatggtgaaccaaatgttctgggatgacctgatttacaaactgctgtacaggctgaccaccaggtactgcgaacccggccgatgcattcaccgaccccgggtgctgaatcggctgaacgacctgctgtcttaacggagtctgttggatcggctgctgaggctgctgccttggtggcgtctgctgagctggttgtacgacctgttgttggattgattgtacaatcggctggattggtggtgtctgctgaatcggctgctgctgcactggatcaaaaataggtggaggtggcagaaacatggcagcgacttgatcttgggttatgtcacgcccagaaatttagcccaaattttcagactattttgtgtattaaatccttgtccaggactagccagggtacacaaaacgacaagtaatatacagttccaaacgtaaataaagcgtaaaatacttacaaaagaggcacttagtcctcgcaccgaaacgaaaacagcagcagcggaaaaaggcgatcctagcggggcttcagctccactccacaggcaaaactcaactggggtctgagccttggtcctctaacttcatcttcagctcagaagcactacacttctgaaaagggggaataatagcaagactgagtacaaccaccgtactcagcaagccacaccaacgatgcagacgtgcaaggggaacacaaggacggtttgtggctatttgcataaaggcggttgtaaaacattttattgagcaaaacagtaaaactgttgagtaattaaagtaacattaaatctccactgatcaacgctacaccacgttgaacaggcccaaccaacccacctaaactacagtgtattaggtcgatttattaagtgtgagactaatcacggtgaatctggtcgaccgcccataaccgcgggcacggctattcgaatagttttactctgatcagaggtgtacaactgtacccacaagacacagccccacgacacgttcccgtgcgccgacatgccaccacgacataccggaaagaggccgtgacaggacccttcgcataaccccctctaaccgatcgcaccacaccttagggttcgcccccgtccccagcaggcaacgggcagcccccctttcgtgccgcggtgaatccggaagccgatcaaccggacaccccggccgacccaactccatcacgcccaccctcgcctgggtacgtcggctagagaaaagctacactacaagcccagccgttgcccacgctggcttgtggtaagtacgataagttcttccagggcatcccgcgaaccggtccttaactgccatgggtgcgaccagcaaaaccatgcacccacagcccaccattcagtcgcattttagttggataattacgaccatgaagcatggccaggtgtctcgagcacgcagctcactctgatactaaaaaggtctaatactgcagttatcccatcaactgagctagtggtaattaagcatggctaagcatatagttctagctaggtcacataagtaacatgagctagtcgattcattacccaaggttgacaaagaacagatatcaagtaaacatggcacaagcgagcagataggtaaaaccctgaccccatgtaattagcaaaacatgcatatttgtttgcaaacagtaaaacatttgtaaattgggatcaacatgctcaaggggaatgtgtgacttgccttgcttcttcactttgatcttccgaactcttttcctcgcgaccgcggacttccgaaacgacggaaactacacgctggcatgcaaaacgagaaaaaactctaataaaaaccaaggaaacaggacataaaaactaaacaaacatgtagagctcaattttagatgaattttgcaagttgaatggctcaattcggagttcgaatgaattagatatggattttagaaattttgagccatttaaatgaatttctagaattaaaccgaattattgcgcaattaataattaatttctcaaaggaaatgacaagtgctgacgtcagcaaagggccggcgccgacaggcgggccccacacgtcagcgagccaagggggcggcccacggtggactcggtccaccgcggcacaggcgcgggcgcaccacgtggacggccacgtggcggccacggcggacatgcggcagaggtggcgccgacgtggcgccacgacggcaccgacgcgggcggcgccgaacggccacgtggatggcccagattcactcgaggtgaatcgggcggcctcaggcgggcgcgagccggctcgccgaccggccgaccggggagcggcggagtgcggcgggaaaagggagggggagctcaccgagtagcatacgacggaaggaggtggccggcggcgagatggcaacgcgaggcggtgacggcagagctcgggacggacggaaacaacgacgctccgacgacgggcggcgctcgggaagaggcggatgagcggcagctgcaccctaggatgggaggggaggtgttagggaggacggagcggcgacatggccggctggagaggaagggaagggaggaagggctcaccggcgcacgggaatctggacgtccagtgagtttccggcgatgggaagagatggccgaggttctcctcgtccttgtggagccgagggaggcaacggcgtgggtcggcaatgactgtagcagcggggcgacgcggctggagtcggccagtggtggtggtggctcgggttgacgggggaggggtggttacggtggcgatttgggaaaacggagcggaggccggggtagagcttggcacggcgttgccgacggcgcaagcggcgaggtgcagcgacgactaacgcggcggcaacggccggctgaaggcggtgtgtggcggtagtggctcggcctcgcgatgggagggtggttccggcggtggaggagggagatggagtgaatgccggggtgcggtggggcgctgtgatgctataggtggctgcggcgcagcgcggcagcgacgggagcggcggtggcgggcggctggagatcgccggcgagcggcggctagagggagcacggtggggaggtgtctagggggcgcggggtgctcggggagaggggaaaacggatgaagggaggcacgtgagtcgtttatataggtcccggagggggagaacgtggccgggagaggcggatttgaagggggaagaggcgccggcgacgtgggcgagtggggtggttcggtgccggttttggagggggggaaaagtgggggaggagagtggaggaggtggggtgacgcggtcccgcggtcggggcgagcgcgcgggtggaggaggaggcggaatcggcggcgacgtggggaggccgtggcggcggtttcggctgagggagccggaggttagggatggccctgacaggtggggcccacctgtcggcggctcggggggaaggagagaggaggagacggttgggggagaagatgacaggtggggcctcgggttgacggggaggcaaagcagacttgagggagagagagagccgagcgggccgagggagaaggccggcccgagagggagagaggggggggggaattgggccgaaaggggcccaaagagaggagggaggtttttatttgttttctttttattttaattggttaaatgatcttcgtgactttaaaactatttctcgagctccgaaaattcacggaaaattccggagagtacattagggcacaaagaatattacaaaatattcccggccaatgatttttaagggaaaattttaattctcccattatttcacttgattaaattgcttaactttttattcaatttctaggaaatgcatcattaaatgatttttaatcccgaatgaaaatcggggcgttacaaatctaccccccttacaggaatctcgtcccgagattctgggatggctagaaagaaagccggtgctgatgggcggtctgactgatctgcaccttgaactgccacattctgcttcgaactgattgattgactggttgatcaaacctgcacgattgaactggctggattcgacctttctgttcctttgctttgccaaaactggaccgactggttctgcttgaactgacccagtctaggactgcggatgctcctgaaacttacttagtttggactgaactgttgaggttagcaattttggtaacctgagaattcaccacgctggctataagaggatgaaaatggaatctggcatttataaatcatttaccctatgtccgcttcgactggtcccaattcaaataacaagtaattccaggaaaacctgcttgacctgtctttcgtctgaactgcaaccatcctcgatgctacttctctaagctgaactgttgacctggcctcaagggtgtacattagaattgaacctgttgacttgagattgggagactctgctagtggctcgcaacggactcctttaattactaaccaaattgctgcactgggttgaacattcaagtgaaatgccgacgaggtaaaccaaaactcatctctgagacctacccccttacagtgggtagtcttactttcgcctgactgagaacctttgaactgttgtccttgaaaaaaatgaccaacatttctcggatttacagatgccctgactttgaagactgaaacttcatcggtccatcaaattgaagcaatggcgatgcactttcatcccgacaagatttggaacttaagccttagttgatgataggaaattccacataaaagtgactctcatttagctcatggacacactgactcttgactgcaacacactactgctggagttctttccgctacacttgaccttgcatcgagctttgcatctcccgcatcaatacatccatcatctaatcttggacaccaaatgttgatcacgagcagggttcttctggcactgggataccttgtagctttcaactgaaccattgattggtgactttaattgatcttatctctgacactgaccatccgctgccaggacggaagagaggtggaagagaggggttgctaaagataaggtactaaaccacttgcctactgatatgttgtgagtagacttttattcttcaagttgcttaagcaaacaacctagtatggtcgcatccccaccaatgatgcaaaccatacccctacacacaagcaaacaacacacaatctagaaagctaacggaactactcttctgggaaagattgggtttaggtcatctccgagaaaactccacttgatcttcgcagaacgacgactctgaactgatcttctcgctccttgcacgaagcttgaggctcgaattgacttgacttccgaacagacatgaagctgacagctggtcctctaggtttgacaactaaaagaattggagagattgggaggagaattttgaaaaaccgtttcacaaagaaatgccgaagggcgagaggagacaatttgcaagtagggttttcagaaaacttgtccttagggtttgaccatttggctcaacctacagtcaagttggctctgataccactttgtcacgcccagaaatttagcccaaatttccagactattttgtgtattaaatccctgtccaggaccagccagggtacacaaaacgacaagtaatatacagttccaaacgtaaataaagcgtaaaatacttacaaaagaggcacttagtcctcgcaccgaaacgaaaacagcagcagcggaaaaaggcgatcctagcggggcttcagctccactccacaggcaaaactcaactggggtctgagccttggtcctctaacttcgtcttcagctcagaagcactacacttctgaaaagggggaataatagcaagactgagtacaaccaccgtactcagcaagccacaccaacgatgcagacgtgcaaggggaacacaaggacggtttgtggctatttgcataaaggcggttgtaaaacattttattgagcaaaacagtaaaactgttgagtaattaaagtaacattaaatctccactgatcaacgctacaccacgttgaacaggcccaaccaacccacctaaactacagtgtattaggtcgatttattaagtgtgagactaatcacggtgaatctgatcgaccgcccataaccgcgggcacggctattcgaatagttttactctgatcagaggtgtacaactgt

SEQ ID NO: 24014 - DNA, 17132 bp, Oryza sativa
agggagccggaggttaggaatgcccttgccaggtggggcccacctgtcggccggctcggggggaagaaaagagaagaagacggttgggggagaagatgacaggtggggcctcgggttgacggggaggcaaagcagacttgagggagagagagagccgagcgggccgagggagaaggccggcccgagagggagagagggggggaattgggccgaaaggggcccaaagagaggagggaggtttttatttgttttctttttattttaattggttaaatgatcttcgtgactttaaaactatttctcgagctccgaaaattcacggaaaattccggagagtacattagggcacaaagaatattacaaaatattcccggccaatgatttttaagggaaaattttaattctcccattatttcacttgattaaattgcttaactttttattcaatttctaggaaatgcatcattaaatgatttttaatcccgaacgaaaatcggggcgttacaggttagccgattcgtagcctgcccgccatgctgtggctgatcccttgttaacaaccaagggttcactagctgtcctagcatcatagctagtgtagcaggcaaaggagtcgacgctggcgccgtcggctgagttgtggatgcaacggagggaactgcttgaacagatggctgaacatcggtgatcaaagattgataatttgggaagacacctccttgcaagtaaactgggcctgcagcctgatgctcagctaccgaaccatcggctattgtcttcatcatgtttgacaacgtattgactaataccccggactgattgatcaaagcatgatgcacagcgtaatcaacccgatcttggaagttattgaaaaaatcttgtgctagttcactattctggttaagatttcctccttgtggctcctgggcgtcatcaccttgaacgccatgaactccttgagaattgtcgccttgatcgctcgaggagccgttggtagcacctttagtactcggctgagtcgagccgcctggagcttgtttcacttctccatctttagaagaaccggtcccaggactatcagcaaccacttttattttatacttctgaacaagtatccccttgcgggtctgcataaatgagttcaggaactgatcccgtgcctattgcagggttgcttcaaactccgccttctgctcaggcgtgaatttctctggatcgatcggcatgacgtggtcatcaatgatgtcagtcaatccctgcttcaacgccttgcctttaacggaacctgggctagatagtggtggtggttgtttctcggccatgaggaagaactgacgtctaacttcttacatgtcccactgggcgtgccaaaagcgtgttgacagaaaacacgaggcctgggagatctacttaacttcagtgcaggtccaaagctcgccttcgaatgtatgagcgtgccagttgatttgatcctgtaatcaacaagaaatagaagcaaagaaaccgcaattaaatctataaatgatagccgatcggctaggtgccaatgacacatcatttatctttgagctgatgtcatatgaatcgatcaacgattataaataaatagtaaggaactaaatctattcgatcggctgtagatattaacgatatatagttcttatattaatatatacttaaatcaagtgattgggataggtcggtcatcatgccgagacagtataaattacttagatcgaaatatatattaataacagcattatatatgtctatagcataaccgatcagatagatctagcgtgtatcggctaatactccgatactactctacatcaagatattaaaacatgtataatgtattaaacagaagcttaatatatttagattgcaacgatatcttgacacagagggcggatttaacatgtcagtgaaacatatagagcgaatatggttaaatcagataagatcggctgaaactccgatactaccctaatcggcaaccaaagtacaggctagagattgatattctaagcatgacttaatagatcaaactcaactgatgcagcattaagtatgaaaagaagaacaatatctagacaatcaagccgctggaagtttcatagaggtagatatcttatataatctaggtcaacgtcgctatttaaccaaatcggctgccttctgttaacagatgttagccgattgtaggttagatgacaatattgtcgaatattatgtaagatatatgataacttgacgaattacatagacaagattagagtatcataaagatggaagcactaatcccgagaacataattcatcataacaagttttacctcttgttgaagatcgaaaccgatgcagcacaacccgaaagcaagaactcgtcaaaataaaactaaagcaaaaaggtggcgatgcgccgagattgtattgaacgtgtatgttgttaattacatagggctcagggtctatttatacccgagaattacaagatatgcccataccggacacgactattatctctaacaaactctaagataccataagtctttgcagcagacttttgcccgtatttatctataaggaatttacataagatatcctaattaatagatacaattgccttcccaggactctatccgtgcgtggcaatcatcttgaggtacattaacttgaacccgatgtcgtgtacaagtcatattgtcggaaccggctgtatcggcttacttagcccgactcagacccagccgatcctaatcgtagccgatctggactccagccgattcctgctctgtttctgaactcgatctccgcctccgacttcgctttgatcaaatcttctttcctgacacagatgttaccaaatttggtcgttaacacccgtgaacccaaaaaccagacatcgcttaccctaaactttcaataccggacgaattacccctccccccctcaatccaatctagagcggttttgtcctacgtggcgtgcacgtggcaggtccaatcagcattttctgttttttaatggtggggcctacatgtcatactctctcacctcctctttctcctcttcccctctctcaggcgtgggcacaggccgcgcgacagcgggcgttcaggtgagagaaagggagagagagaggggaagaggagaaagaggaggtgagagaatatgaaaggtgggcccaccattaaaaaagagaaaatgctgattgaacttgccacgtgtacgccggcactggaaacggagacgggagcggcgaactccgggaggagccggagttgtgggcggccacggcggagaacccgaaccgcggcatctggtcggcatagacaacgagcagccgccccctcagcacgtcgatagtgagccgtagtgcgacccttccgacggcgtcggagctcggacacgccagatacaacccgctcctcctcctccttccccaccgccccgacgcgcgtaaagctcggacacactggcaccaaagaaatttgacacgagcatccgtcgacccttggcgtcccacttggtgcactctgccataggacacccaccgacggtgcactccaggacggtgaccactgtggtggccgccagcaccatgatgacgagcgcaacaaagggggaggagaggggaggagatggaggtagggcccaccactccggctccctcctagagttctccgctaccgcctccacgtcccgcgccattgcccacccccacgccgttgcccaccacccgcctccgcgtgacaacagcccgccgtctctcaacctgcacccgatgacgcccgagagcgagagagagcgggggaagaggacaaagagggctctcgcctccacatcccgtgtcgtcgcccaccgcgccgccgtgcgcgctgaccgcccgctgctgctcaacccgtgcttacgcccgacgacacccgagagagagagggggggaagagggggatgacaaagagggctccaccaagagagaggggaagaggaaaaagaggaggtgtgagagaacgacaggtgggccccaccatttaaaaaaaatgctgattggacctaccacgcgtacaccacgtaggacaaaactgctttggcttgagtcgagaggttcagggtgagcgatgtctggtttttcgggttcggggggggggggtaattcggtcaaccacgatagttcggggtggaggtaattcgtacttttttcctttttattatcatatatatactctctagagcaacacatgacttcatatggtcactataggctaatttggagattgggcaagttcttttttcttgttattagtcccccttatgcatggctacacacagcaaagaacatgttgctattttccagatacgaattcttcctgaatagtaaaagaacaagtacgatttaccccctgaactatcacggtcgatcgaattacccccccccccaaaccacaaaaccagatattttacaccctcaagtatttataccggataaataacccccctgagcattgttcttagaggtttacacttgaacttgtacacgtggcgccaacgtggcaatccagtcagcaaagaaaataaaaaatttctctaggcccacatgtcatacatatccctcctagtaccccttgcgtgcgcgctctctctctcaggtggccgacgacagaggtggacctcgctcgggcaggcggcaagacagagcgagctcgagtggccagcggtggaggtggaggcggaggcagaactcgctcgggaagccaccggcggtagtggagcaagctcaggtggtcgcggtgggggcgacgagctcgagcgatcgacggtggaggcggaggcggatcgcgtcgtccacgcggcctccgctcccacccactgccgtcctcggctcgccgccgccagtgagtgatggagttgaggtcgaggttggagcttgcaacggtgaagcaaagttcttgatccctctccccctttctctcatgctcaccagatccaccggtgtcctctgcatgttcgccgccctcgctcccaatctccaccgcacaatccccacccccaatctcccatgtgccatcctcgtccctagcctccttctcaccgttgccgccctcaaccaccatggcactgcttgactagtagctcgagtgacccacgatggaggtggatgcggagcgagctcgacaagctgacagcggagatggtatgagctcgggtggccggcggtggaggcggaggtggagtgagctcgggaggccgccgccagcggcagagcgagctcgagtggtcacgatggaggcaacgagctcgagcgaccaatagtggaggcagaggcggtgaccgacggtggaggcagaggcggagcgcgtcgtccgcgcggcgttcgcccccgcccaccgccgtccttggctcccctccgctgcacccagccggctctgtcctcggctgttgccgtcctcggcccctcttcgtcgccgccaccagtgagcgatggagctgaggggagggagaagagaggggggatttgggaaagagataggatagagagaggtagagagggtgaaatgacatgtttggcccattgatttttttttaaaaaaaaagaaatttctgactggattgccacgtaggaccaaaaccactgcggattgagccagggggttatttgtccgatttacatagttcgggggtaaaggatgtccggttttgcggttctgagggataattcgatcgaccgtgatagttttttttttggggtggggggtggggtgggttaattcgtactttttccaatagtaaaataatatcttctccagtttctacttagctgcactgaggtgccaccatcactacactccacaaaattcaggttaccctgatgaacatagccctaacaatagcaactatttcagttcatatttccgcactatttattgatccatggaactattggtatgctacaacacatagagccatcgatcacgcaaatgcaggaccactgaatttgtgatcacaaaatgtcgtcctgaagagtaattgtcagaacaagcccaaaatgtttgctgggtaggacaggcagttccaacttatgaaactccttacgaactatcttctccttgtagtacacgacacccggaatcgcctcttttccgatcatctcaatgtcgtcgatcttgaaatccgacaacttgcacacgaactggtctggcctcttctgctgcttgaagttggctgacagcatggcattggctttcgtatcataggtccaaccattgtcacctggcttcagctccacccaagcatcaatccagccgtcaggtagagggaatggaccatctactttgtcttcccagttcatgtcgccgcagaagattgcattgcgcaattgtccaagaatctccagagactgctttgcctgagctactcgcttctcgctgtacttcagatcccacagaggaggtagagggcaggggctctctaggtgacttgtgcccacagccaaatggatctctcccgttttgacgaccgctacgcatagctccctcttcattattgatttcgaaaatgggatggggttcgattcgctcaccggtaatttgctcatctgcatttgtttgcaattgaatcagattagtgaaagaagtctagaagaaaaaaactgttgcaaccgaaattagggacagtcagtaatgcttttgaacagaaaaggttgaggctctaagcagaaaaagataataaattcatggtcccagatatataaaactcctctgttcataaaagccaggttgataacttgctcgtggttctttcttagtttcttttgatgaaatgtgttagtgttagcaatgtgaaaagtacttcattgttgtgcgccttaacagtagtaagccatgtaacaccaggtctagatgatcatatggcagaataactcacgttttttctaaaatggcaggatagtggtttcggtcgcttgagatacaacttcccctgcgccgagttcctatggggtagcactggtccagtgaagtgcaagcttttcctctcgcttgcgcttcggcggtactgttagacggccgatcaaatgtgcagccgtgggatggacagtcacaccatttgccctatgtgtgcgtaggaactggaaacggctcaccgtatctcggtggagtacatcttcgcgcgacaagtttggcacaagctgctgtccaagattggcctggcctcattctcaccctgccagcaagcttcgcttcaagatttggtgggagtcctctcgcaggagggtgtagaaccacaacaggaaggggttcgattttctcgttctccttgttacctggcacctgtggttggaaaggaacgctcatgtctttgagggggtactttccatggtggacacagtggtcgatcacatcgtacaggaagggcaactttggattgcagcaaagcctagtcccctaggagctctccttggcatatagacaaaggctctctcccttattcccttgttgttttccggaccatggtttgaaatttcagtaattttggcccccaccggcaagcacaaatctccccaaaattttcggttttttgtcaaatatttataactttggtcaaattttgttcaaactcagtaaaaaaatatgttaaaaattcaaacaattttggtcaaaagaacctgaaaatcacgaaattttcaaattttaggcaaccaccaaaattgcaaaccctgttccggagcccagttgtgtttcttagttagcctagtgtgctctcccccgtctcacctctaacccccccatgaccagcttcagcgggctgtagttgtaaaaactcttttttttttccttgctaatatatcaatgcgtaaggctttttcgcgttcaggaaaaaagaaagaaagaaagataaattgaggtggcacttagataactaatgcactttatctaaaaagaagtaaactaatgcaaaacttgcaattgaactcctgacaattcaactgcgactatcatattaacgctgaccttgtgagacgtttagacctgacaatatgggaaacgatacaagtgtgaaagagcttgcatcatcatccataatttctgctgccattgcatatattatattcatgataaaaaatggatattgctggctgctgaaagtagagagagagagagagagagagagagagagagagagagagagaccaaagagttctgtaacttccagaagcttcaacacatatggtacttgaagtttaagagaagcgttacctgcatgcagaaatgtgacttccgcatagccatctcatgtgacaacaggcatttatattcttgccaccacagtccgatttttccataagctgatatatgtaaggtgtaacctcctacagttcaacattgatacaaggcccattaagaaagaggaaagggataatgcacagtttgaattctgtacctggaagcatatgaagtctgggttgtgaagttgaataagatctccaagagcgcccagccttctgtgcagttcaatatcctctctgatccagacattgtatgtcatgattttgaaggtcttcttgtttaaattattctcaaatttttctgcatgacaagatttgtattttagtgtggccatagcgaagaagaagaataaaagtacagctttgaaggaaaaataaacttctaattatctagatagataacataatcacacacatatgtaaaattaactaccagatttggtcatatgagaactgcggcaactccaagatatagatgcaaaatacccgagcaatttgcatatcaactagatcttacacaattgctcaaacaattaataggaagaagcaccgaaagaaaaatattgcatgcttatggcaatttagtagaaaacaaatgacagaatgaaccaggtgaatagtattctgtatcaagagaatattaaattcagatcacatagagcaaacaaagtatttgtctcatcatacatccatcaatactgcaccctccattaacaagtagatgtcgttttaggatgcgtacagtcaaaggaagtcttaaatcactaatatatgcaaaagtattaagatttggcatgtaaaaatgatatcaatagatttgtcacaaagaagaatttaaaaaacaaatgacttaacattcgtgttgaagactctgatgatctaaaagacaagtaaataacgactggaaggattgatataaaacagagaaaatgtactttctctaagtgtatacaccaaaaaatttgtgcagaacactccaatcggttggatagactgtaaaatggcctccaaagcattaagtagccatctctcctttatttatatatcttgtaccctataagttacagttaattcaactactaatatataccaaaaccaaaattaaatcattccatgtattcccgtcccctccactccttccatgctgcgtcctatccatctcaattgtgaggtgcattgcacgtgcaagatcacaaacttgtaattaaattagctcatcatatgtaccgcaattatgcagcgtggccatgcagaagaggtaaagaattaatagcaattttgcagtcgccattaacattactacccgtttcagatcacatttattctgctgttgcaaagaggaatcagtagattcagaaagagttagaatctctcgtactcgggtgtatcgtatcctccaattaaatctatacaaattaatcgaccccaaatcgaaagcaacagcaggggtaatcgattctggacacagcgaagagggaaaaaaaaggctgcgaatcttgtgattccggagatcgattcgtagcaacacaaagccctcaaatcaaatgtacttttcttggcggcggcggcgtcggagggacgcggcgaacccgccccatctgccccctcgccctcctcctcctcctcctcgtcggcgcacgcctcgcgcacccgcttcttcctcgccctcggaggagggggcgaggaagcgggatcgtcgccgtcgttttcggcgtcgacctccacggggcgcgcggcctcgcaggcggagcagacgccggagccgcttgggttgaggagcgtgcaccgggcgcaggcccacggcggcggcgcgccgcaggaaccgcagggggaccccgcggtggcggcgcaggcgcagggatcgcactcccacgaggcctccgccgctgccgctgccggcggcggcggcggcgccgccgccggggagagggagagcatggtggttgggggaaaggagtggggtttttttgggggtctgagttgtggagagagaaggaagacgattggctttccgaatttgaattggagctattctgggccgtccgatgagcccatcggatggctcctgattcttagcatctttgcgggtgattttgccatttttggtatagggttggtaatgggccgggccgggctgggcttgggcagagctgggccatgtctgatccaagcactagaaattccttgctcgacgcatgccgaccttcttgaacagtggagggtattttagatgtctatcatgttattaatatttatttgtgctaatttagacgatacatggtttataaaagtatatatgaaagtataaatcttaagatcatgtcatgaagaatgtctagaacctctaaaatatagggccagccgtgcaaccagattctatagaaaagaaaatggagtaagttgttcaggatgtgagcgtttcgttccttccatggattctaggcaagcaagatcgtctaagaattgaagcctctctcggcaagacaccaatcaatcaatttcgattggcaagcattgccggtaccaaagtatttataagtgatatgagaaattttatggttttcaaaataatatctcgaggtactaaaactttacgatacaaattttgttacatatcaaattttatatagaaagcgtgatgccttccgattaccttcctcaagaatgaaaaaattactcaaatggtatagtactcttgctgctaatagctgctaatagagtaatacctcatttccactgtgcattgcagaagcatccaatgagccatgtccactgaattatggggggaaataattgagatggagacaaggggcagagcatatatccttttgggtgaaagctacatttcacttatctttttccatggcactatcgatcgatcgatcgatagagaatagctagcagtgtgtttccagaactctacaacatcatcacacgctattttcttctgtgctgatgaaaacgagtgactcaagtatatatggtttcaaacaaaaagaaagaaagaaaacgagtgactcaagtcactgttacgttccctccattaatttgtccagccagttcaatttttttcccccacaagttcaggacaggaaaaatgactacaaatttagggatgtgattcattttccttattaaaaatcaatttttaagaaagaaaaaaaataaacggctccaatcatagaagaggttactgtgtccaatctaccacctcgtaagaacatggagaacccaacttttcggttcttatatatttttcttcgattctatgactacaatttttaatatatatatatatatatatatatatatatatataataaattgtttatgtggcctaaaaattttatgacttgttaccgctatcagaaaatcccccgaacataacctaaatctcactatatatgaagctaaaactcaaggctgacgaaactcacgtgttttgattattgactcagcttgcgtggctcccttaactataacaaagctgaatcttccgcgaaactggactactagtctttacgtctaaaaaataatgtaccccaaactttagtccactcgttggtcttgtcactaattaataattaatctccgaaggatgagcatgaatcatatactatatgtatatcacattaacaaattcctaacccttgggcaccaagaaagatgataaaattaaggataagactttttggcctgcattagtcgtcatttcttaactgctcatgcaacgactttgcataatttccccataaatgttgcagactaaggccctatttgattcagcttggattattataatctagattattaggagtaaactgaaacaaacaagtagattattatgatagattattataatctactgaaacaagtagatttggaggagctttttctagattattgagtggctaaagactcactacccttacatgcctctaataatctagagaaacaaataacttctagtttattttatgtcagcttattacaatctagcttaaactaatttgatttaataatttagattacaataatcttaaactgaaacaaacagagcctaacacactacaccgctaatgctaatacagtatgggcatgtataattgtatatgcttactcaccgatgagtcagattgaagtagcaagcatatatatgcacatggtgagacgtcctcaaataataataataataataataataataataataataataataataataataaaaccgtcggtgtgacctactacaggacttaaaacaacaaattaaattaaatttaaccaataactttcggaaatcttctatactcaagtcatgtcatcaacttgttaatcttaagttggaatgatcagtatgctccttcaacttagacaatgcatgtggcttgaactaatacaagtaggtgatggtagtttgcccttactttggctacgttttatgaccacccggaaaacgtggtggtttattaatatataattaattatgtattaactaaagataacttgaaaaatatgttaatatgatttttttaaagcaacttccgtatagaaaatttttgaaaaaaatacaccgtgtagtagtttaaaagcatgcgcgtgaaaaatgagatggtgagttgggaaaatgaagaaaataactcaatcttgtactttttgattatgtaaaaaaactattagatttcttgtcaaataattaacctcttagatcgatctatttccttgtgtttaaaatgtagagtaagttttagatgtttatgataaaatctactagaaatgttttctatctagtcacacaatcacaagcgtatgttagcattctaaaatgccattttgaagctcaataactcatatataaataactttgttatttttcatttatactctatatcaaaaaatataaatgttatttgtgggggaagaataaaataaattttaaaagcatgttaggttcgattttatggattttcactggttttcatccggatcctcaaacaaacaagtatatgtgtctgcaatgctccctctatttaaaaatttaagaaatatttcttttgttaccaagacaaaatttttttaactcatttatcatgtgataaaactaaggaaatagtatatgcgtgtatgcaaccaataaatattaatacgactccttaccttccgatgaacaatttaatttaacacataaaaactacaaatataaccttagattttgagaaaaaaaataaaaataaaaaattcgaaaaaggatattttttttaaagcctgatcaatgcttaaccgtcagtccacagagctccggacacgtgtcccaaacagcgcagccacgtcaccaccgacccaaatatcccaacacccagttatcgcaccagtattgagccctctcaacattacttccctcgctgacatgtgggccctctatccaatgagcccacctgtcagtgactcaaagtcagatggaagcaggtgagaggatgctcttccagcagataccactcactgttcgaacggacgatactacggcgagcatcagcagcagagcacacagcaaacaacccggaaagagaacccaattccaatccaagcgtgtcagacttatccaaaagggacccccagctcgcgatccatccatccgccaccgtatttaagcgagccatttcgatcattcgagaccccaccgaagcaagagagaattttgaagacaaggtgaaagtttgaaaggggaggagcagcaatggcggacatcgcgctgctggtggtggaggagttcgagaagatgaccaagaagttgaagcagcagaggcagcagcagggccggatcagcgaggaggtgcccgccggggatgcggcggcggcttcgcgggcgggggagtggggttcttgggcggcggcggcggtgaggacgagggtggcggcgctgaaggagcccgccgccgcgcaggggctcgccgccgtcgatggcttcttctccgcttgatctttctttgtttcttcttcttcttcttttttcctttgttgggaagtgatttggtgaagcaggccatatccaatttggaggatttgattttgttttttcttttcctctttaccagtatgtgatgtgtacatatatcgactttgtgaagaaatcgcaactttttctccagtagtttgttcactctgttcatcaccatggcgacttttttatcactcagttcatcagtcatcaacgtggttgatgagagagaggagaaaggaatcttaaaattttatcgaaatttcactgaaaaacatccaaagttttggctgtgaacgcgataaaattttcacgtttataaacactacagacccttcagtttcatcccaaatagtccccatcgtctagcaagatgatttcacacttttttttgagggaaaactaagtttccattaacccatcgatgcggtcaagtcacccgcaaccaagctttgtccaaaggatttgcatctgagcaccattgttccattcaatcaatctatgagtacatttttttattgcaagaattctaatcccagggaagaacgacgccgatgccaagaaacttttgtttcgtttcagatacgacatgctaaatcatacaggaggacgagtaggaaaaggtgctcagagacatttcatatgtaattctttatagcagaatctagaattttttggttatcggttaccctaataaaccaaatccgaaactaagattaaattttcaaacttagaagttgtttttaaaaatatttattccttttatggcttttaagtcgttaagaatataaaagtgttaactacaaactatttttttttctaataaaccgttttatcttattagtaaatataggcaataaatgagagtctttataaaaagaaaaaaaaccctgcaaaaaaagaaaaaaaacacctaaattaaacattccccactcctcaccccatccgacagtgacctcttctgcatacttggcttggacctacatgccagggacacttgatctcataccccatccaagtgaggaatttcacatgaagagttttcagaatttccacaataaatacgataagctttcagaaaaaagacccaccacattgcaagtcatggatttcccagcagttctgttcggtcgtagtgtcgaaaggctcgcagaaactcgaattcgttcatcacaatcctcactgtctcactgagcaacctcgttccatttgttcaattatacttaaatcgtctgaactttacaccattcctcgtatcaagtttcttctgtacgggatttgcataaaacgtgccaaatcgtttcaggcagttcaccctgtctactgaaatttgttcagatcatctcagacaagatatgccggtatctgccgtagtccgacgtcgtcttgaaggtcggcgtgaactcggagaagaagctcagcatggcggcgaggttctgcgcgctgtttatggccacagctttctccaagaacaggacaggctgcacagttattacctggaacagtcaccatgtctagttagttaaagaatgggatgtgacaacgtttcttatgcaatgcaagctttccatgcctttgtgtattgccattacagtagttgtgtgcctataatatcggcagagatagtcgattttgtaagtcatttccattatcctaaaaaaatgtatcaccagtgcaaccactttactagtatgaagtgagcaacggaaattcagagagtaaataacttcactttttacgagttgcaaacttgcaatgcataggaaatacgaacatgatgatatagtgattttataaatttggagcaagatgggagaaacgtgtgcgccagttggcaaaagagtaccttgtattttctagcgtaacgaagagcctccaggtggtatccgtcttgcagtaacgcagtgacgtagtcatggtgcaagccccgctctctcagcatgtccacgcccagcttccttgtcggagagtgttgttgacctaattccatgagttgcatcgcaagttccttggagggttctaggatctgaaggaattggtaaatgaacaaaaatataagcattaatagctggagtgtagcttgtaacatcggagtgtgaaatgttgttatctagaactgtcttgcatggtatatgttgtggtgacaactaattttgggaatagatgcaaaaagattttggtgggaaagcttttggtaagccaccggtggcatcaaaactcaaaaaccttagtaatcgaggttagcggaaatccggtgcccacgctgaatttaatctgtcgcagggaccaaaagggggtgtcagttagacaaccatgattagttagttcaggcttatactacaaagtcagatctaagagttcttccatcagacaaagttcaggtgtgaacagattgaacaaaagtaagtagcagaaagaaagtatataagattgcaatgcaaagagccaaagactatctcttgaagacgtacacaaatttttaaatgaaattgcgaacaataacaccacctcttttctttttgtgtatcttgcaacgcaaattgctaagaatatttccaccacattttcaactttgtgcatcagtcatttgttaagtatgttgaccctcagcttatagcattgttcacaaacaattttatgaacgttatcctgaacatttacaatgaggtgagaacaccatagtaacatactgaccttgttggatacaaacaaggctatttcaggataacggttgctgcgggccagcagtgttgtcatcatcacaaaaaggttaggaggagccttcaacccagctcttgagacactgcaaaatgcaaattaagcttgagtattctatagtgtcacctaa

SEQ ID NO: 24015 - DNA, 8524 bp, Oryza sativa
tcttttgtaaatcatcgaattggtgtatgtgcgtcccttgggtgtcaggatggttggatgtattagaccttgaaaagtagtttacttattctttacgttattaggtgttcttttataatcttatgtgcgcccttatggcaagagtttctgggcctggctatcaacctatgcttctgcatctgctggacttgaaatgctccagttgaagcagttcttgaagaacacaaaggtgaagaggatgttccgatgcttcttctagcagtgtaccagcaaccgggaacaattcataggttagctgttcccttcatttattctctttaggaactaattatgtttatggaaattaacctttgctatacacaagccgaacagaaatttcgcaaagtctcttcaagaatgtcacatgccaatcaatgattgaatacttaattagatgcattagttagattaattgcaatgaggtgaactgaagtatcccttcttcttgcacaaatcttgtcagtctgttgttactctgtcactgtttccctctatttatgccatgcaacattggattgttgagcattcagcaatcaaattccattgccatttttcatgaacttatttcctcttacttgaggttaattcagtgttctactggaaaattaactttatgaaatgtgaaagcaaaccctttatcgtagagttttgatccaaacccttatctggagctgttccatacagatttaggaaaatatttctgtgtaacactatcaggcacaagtcgcaccacaaaacaagagtttggagaagagaattgggtgttggacatcaagggatactaaggtgtctaaagtagtcttttagtgcttctaactactcttagtttgagaagagaattgggtgttggacatcaagggatactatgctgttttagtttgagtccctgaatgaagaggtcttctttctgttagttagctgcaatttattgcagtgctggaacttctagtttctttcacaaataacctactgatatttatccttgaatgtgatgttttcacagcttccctcagagtggaaattggacacttggcaaaaattattgtttcactgcattgattgttgttgttgctaatggctaacagtcgctgctatgtggaaatagtaatgtgctattcagagatgagatactcaattgagccgaggtccgtcttgagccagagcactagcttccgactattttcacggtagttgaatctctgaacggtaaaagtcgtttataacttgacacggatcagaactgaaagttcaagtgcttctatgtcccaaatgatcccccaaaacatgaaaattcatggtaattagcaggctgttttgtttatttaggaaggaaacacttttgattgtgactataatcatcatgaacaagtgggatccgtggcgcaatggtagcgcgtctgactccagatcagaaggttgcgtgttcgattcatgtcgggttcaaaaccccggtccaaaacggatctttttttttttccaacgtattttggcaatcaactttttggttcttcaattccaggcaaagaactcgactgcacacgtgagcctgcgaccgtactggaccaatttgcgacactagtgatcgcgatcgtgatttgtgaataatgatgtgcgctagtacaaaacactccctgatgcacctattaattttagatgcttgtcggattttctgacgggcgtgcaggtacatctatatacattgcatggtccaaaaggacatgaatagatgcaaggaaaatatggccagcttaattatggctaagatttcgagtgaaattttaatgttcttcacaatattaagatgtgtctcattcggtactaagttcttacattctgagacggaaggaataattcggttcgggtgatcgatggtcgaattgtggtcttgtggctgctgtgatccatggtaggtttgtcgaaaccacggtgaaaatagtcagaagctgtcagggttacggataaggcataccctccatcctacgacttatgaaatataccgataaggtataccttcacgtgtacggatcgtttccgtatacgccattagaaatttatctcaaattatggaaaatatctttatgggttaagaaattgccggagtcctactcagaggggataaaatctctggttatatcgtgctagtttacatatccctaaatcttacttaggggtcaaggcattccactgtgtaaaaaggacccccgggagaggcaaaggggatcgcatctcatcacctacacacccaccgaagtttacgaagccggagtacatggagccacctcgttggaagatctcgtcgaatccctcgactacgattttgtcggtattgtctgttttggttactctctttgtaatatgttctcatcatcatcaatccatataaactggactagggctattacctgataaggggcctaaaccagtataatccttgtcttttgtctgttttgatgttatactatgtagacctctgctccaacataccccaatattttattcatccggtccgcgagtatcactcgtcgacagaagttaatagataatggccttgttcaggatgtcaggctgtagcgctgcggtcctgtatttttctggataagatatactccctttgtaaaaaaaagtacaaataggatgtgacttatcctaggataatgaatatagagctcacatcttatcctatgttgttttttttgggacgaagggggtagtttctacctttgttagtatgtttttcgaactactaaacgatgtgtttcgtgaaaaaatatatagaagttgctctaaaatatcaaataagtcaattgtaagttagtgataattaaaactcaattaatcatcaaataagtcaattgtaagttagtgataattaaaactcaattaatcatgtattaatagttttttttattttacgtgcctttatttaatcctcatcttcatcaaactagaacgggcctttctcggacatcggctctaaacctcaaagtagtttttagcttgggccattataccgtattggaacattgaacgtccactcgcatgggtcaccacaatgccatgtctcgtgaatggagagttagatgaagtctttggatgcggccaccttaatactcgtcccgtgtctatgagaaaattcaagaaacgtcaacgacaagcgctccaattcaaaaaatacgaacataaattcttgaaaaatgccatcatacaagtgccttcgtttaagagctataaaaagaccattttacccctataaattgttaaagatgattaaaacttttactttttcaatcaacttacaataatttagtgtaaagagccaactacatcatagtgtaagctagcagaaagagcaaaatttttaataaaatttcaacaaatcatagggggtaaaatggttttttagcactttaacggagggatgctaatgaaaacctaaggatgtgtttagcaaatgggttatgagaggtctgattgggaaatggaaattaataaatagttaggattaaatgaggtgtgaagaatggatggctatgatacaatattaccctttggagggtgggatataatttttctatcccatttaccaaacaaagcctaagggtgatatcatttatgggataaatgtgcttgtaagatgtcatttctataaagtttggtttgtcgatgccatttcttgaattggggcacttgtcgataacattttctaaaatttctttctgcgtagacaaaactaattgttattttggttttgtttagttttgtagttatctagtttgagcacaatctgtttttttttccttatagatgttacataagtagtagtaaaaagaaaggcaacattagaaccttcccttttttagttgagttgcgtgactagaagaacgtgtgtgctatgctggtccaatatattaaaagtgtttataaatgtaggatgtgcgtatttgtaatttataaggataagtgtgcgcgtgtgcgcatgtgatgttatgtttgaaaataaagatatgttagaaaaatagaaattaacacccgagcaaaatttactattccaaaaataatcaaagctcgcacgccatttaacctttttcttttttatgaaaaaaaaggtctaactgatgtcatgagtttatccactgcccctgcccccgggacggtcaaacacacctgcctggtccaccgccacagacccacgtgagcagaaaccgggtgggccccacgtctcgccagtttctctcgcccgctgttcccgcttcctacacagtttcacttcccccttggtcttggtccgtctccactctctccactccgccgccgccaccgctcgtcgtcgcctccccccccaaatcaaaaatcaaaatcaaaacccccccatctcttcttctagtttcttctagaagccgggacgaacaccgcgtcgtcttcgccttcgccttcgtcgtctcccgctcgcttcctccctcctgggttaggttaggcctccccccctctctctctggttttgtgctgatctcggagatcccggctccaggtcgagtgatccattttttatttttttattttgttttttttgggtttcgctgggtttgtgccagtgtgttgttctcgtggatggtttgtttgttgggttccaccggatttttttttttttgggggggggggggggtggggcgctggagatggggggatttatggtagggtttatcgtctcgtctcgtgcgagtcggcccgtcggtgggtgggcgggatctcgcgattccgtgttgattagttcgtcttaagcggttcgggtgatttgatgctcgtacgtgctgatgaactgtttgggggcttgtagttttttttctctctctctcttttaaagtaatcccgagtttgccggggatttgaatatcggtttcgtgtgtgatttgctctagagggtatggtttaaggtagagaaatttgatactaacatatgccatccaatccgcgtgccttgtgtgttttgccactttgatccggatgtcttggttagccatggcgttcctgcttgagctcacatggctagaggttgcgcaagtagtacttgctccgtgcgaacgattcaccatctaatggaaatctggcggaagattggatgcatttgttaagtactgtgtgcaattagaatacgtttgcaatcgtgctgtaccagtgtctgccccccattatttatctgacagtctgacagagcgtcttcagatttgtgttaattgctcctgtggttgatgagtctttatagggtgcagcatctcaactttatttctttttaattgtgggaagggtgtactccgtatggctgacagatcgctggggagtaccttaatgaatactcacgaatttattattactagcacagtatgaagcctctgagttacttgagctgtgcataatctgggttgtgtatcgatcacaaggatcaaattggctaatatgtgtagttgtatattcataaaaatgatctagcatgtattatctgttcgtcactaaataaccaaaattgttgagatttcattttcatacccatctaagttatttgtctaaactgtgtgcgccttgtgattttgtgaaaattcttgtgtgctaaaaggaaaatgaagaccataattgcaaatttattatgcatataatttctttcgattgtttaaggcacatgggaataactgccaacatgccttaatcacactattttttttttaaaaaaatggataaggtagatgatcttgagtctgttagtctttgttctacttaccatttatattctgtgtatttgtcttgctaaaataaacttcactttccactatcctggatgttttctttcagttatttctaatatgtcttgttggccatgcaggctgtgcactgaagtactgaacgttcttttgtagactgttaagcttatcctgcatcatggagaatggagacaaggatgagaaaaatgttgctgtcacggaaggatctaccaattctgaagaaaaggatcaagatgaggatttgttgaggagaacagaaatgctgaatgcaaaagaagcaataaattcttcaaatgagaattcaggcaatgattcagaagcacagatccatgtgagagatgattcacaaaaagaattcaatgagaagatgaataaagaaggaagctcagatccaatggaacctacagattcaagccagacagaggaagatatccttgctgaagacaaatctgaagaacctgtttttgatggaactgaggttgctgaaatggaagatttgaggcgttcgtccaatcaatctgtggaacttgattcagatgcccatgggtctgtactcaatgaaagagctactgcaatcaagaattttgttaaggaaaagggtgccattgcagtttcaacatttataaggcgcctttctggcaaaaaggacgaaaatgaattttctgttgaagatgaaaagaatgaaggatcagaaagcatcagtagtggcaatattggctcagatgctgaacctaaatcaaaagaggtgcagcccaaatctgaggagagaactacatggaatccactcaacttgattaaaatcggacgagattttgataccttcatgactggggaagctgggcatgaaaatgtgccagatttgatagagcaaccaacagggaagggaagaattattatatacacaaaactgggttgtgaagattgcaaaatggttcgctcattcatgcgtcagaaaatgctcaagtatgttgagatcaacatcgacatattccccagtagaaagatggaactagaaaataatactgggtcatccacagtaccaaaagtgtatttcaatgacttgctgattggagggttaactgaattgaagaaaatggaggagtctggcattcttgatgacagaactgatgctcttttcaaagatgaaccctcatctgctgctccgttgcctcccttacctggagaagatgatgaatctggtagtgggaagatagatgagttggcaaccattgtcagaaaaatgagagagtcaatcactctgaaggatagattttacaaaatgagaagatttagcagctgctttcttggtagtgaagctgtagatttcttatcagaagatcaatatttagagagagatgaggtacgatatcaactgctgcttattaataaaacaacttctagcaatgctgtatgcagaactcagccccatatagctctgaaacaacattaatcttatgtccctttttcagttggctattggtggaaaaaaagtactcataactgtatctttgaaatgatttcattctttggaaagaaaaatatccattttattttgttcctataagaatatagtttatctttgaagggatacagaggaaattaaatttagttatcactttccaaaaactcaccgatatatattttccatgtaggcggtggaatttggaagaaagcttgcaagcaaatatttctatcgccatgttttagagtaagttttggaaattatcttatataatattcttttcgttttatttttttttccatacatatcaatttgcaatatttacatctggcattctgactttgcagcgaagatgtatttgaagatggaaatcacttgtatcgcttcctggataatgatcccataattatgagccagtgctacaacatccctaagggtatcattgatgttgaaccgaaaccaattgttgaagtggcatcaaggttaagaaagttgtctgaaaccatgtttgaagcttatgtatctgaagatggtaaacatgttgactacagaagcatccagggttgtgaagaatttaaaaggttagcacttagaactatatgctcattgtcaaagtatactgcataatcaatgtatttcttgccagcagatattactgtgaacaatgttgtattgctctagttggctaattttaattgatacagatgtttaggttcataatgtgagctggccttgaatatgtatatcagtttatttttataatgttatgtgatatacaaatataatatatttcagttgttgcggttatcctattgtgatggttgacgggtatgctgtactaacatatttcttgcataggtatgttagaacaactgaggagctccagagggtggaaacccatgagttatcacgggaagaaaagctcgctttcttcataaatctctacaatatgatggctatccatgcattagtgacatgtggtcatcctgctggaccattggacaggagaaagttctttggagattttaagtatgtcattggtggatgtgcttattcaatgtcagctattcaaaatggcatactgcgtggtaaccaaaggccaccatacaaccttgccaagccttttggacagaaagaccaaagatccaaggtgaacagagcagatctcagccaaaaaaaggggaaacaaagttctctgatatgattgctttgtttccccccatatgtcatgataatacctgtagccctctta

SEQ ID NO: 24016 - DNA, 1754 bp, Oryza sativa
aggcccgttgtatatttgatttattatctgtatgtgtttttgggagccatagcctagcggtcatggtgctcaagtagcacctctaggtcctaggttcgactccccatgggatcgaattttaggtttggttaaaaaaggtcactcgttgtcactggcccctttaaaacacatgtttagaattgacctatggagggcgggccctcgtgtacgggttaaggaccgacccatacggggcaagtccgtgtgtgaggggccagggttcgtagtctttctcggccgatttggttgaggcttcctattcttaatgaaaagccataggggtggtcattcccccgccaccgccagtcgaggtgttttttttctttttctttctggaagtcagatttaggatattttttaaaaggtaaaagtctgtttatagaagtcgactactatgctgtaatggttgttttcagtacctatttgccaaaaatagccatacgaagtggcaacagcctttaccatatctgcaatataatacgggttacatcccattgatcaatccccattcactggttacatgcatgagtactggctttagcagcatttctttgaatcatttttttattactcccaattaattaattcatcaaacttacatgtcagacgtgagtttgcaccaatgctgattttccaatgatgataaattctccttttttccttgtctgtaatttgcaggtggcccttccatatgctgaacctcttgttcactttgctttggtatgtgggaccaaatctggacctgcacttaggtgttactcgccaggaaacatcgataaagaactggtggaagctgcacgtgatttcctaagaaatgtaggaattgttgttgatcctgaagccaaggttgcatctgtaagcaagattttgcgatggtaagaacactattattcttgcttcgcaaatagggccttgagagtttaataagtgctttcttattagtgtaccccatctaaacttgtcatcagaatgtacaactgcaggaacatatacaagaatgaattttatgttaggtagtttagttcatgatgcagggacataaacaacaacgaattttatgctaggtaatttaaattgtttttgagccttctggttggagagaaaaagtagataacacgtaccactagtgcctgctagttttgggctacttgaatatactctatggttaacctagcagcaaaaccagaaaaatctgttaattacctggcttagcagtaacccctatcatagatcagaaccacctgaaaagttctgtacaatttatagttaccgcatcttactacaagagtacaaggttaggtgtggctttgtgggaggcatgaagaccattgaaggctaggttctgatgtcgagcacctataggtcactgattttattttctcatttccataagaagtccaaattggagtgtgaaagttttgaacaaaatactttagataatgtcgataaggcctggatttcaagaaaaaaacatttttctctaatctgctctcggtataaattgtatgtgaaaaatggtgaggaattcccccaaaatggttacccaatttttagctcttgcatggttacatgagcaagactaatggaagaatgtgaattcactggttaatcaatttaagaaaataataatatgcaaattttatccattttactacattatacatgatactccctccgtcccctaatataagggattttgacattttgcttacact

SEQ ID NO: 24017 - DNA, 1166 bp, Oryza sativa
atctaaagtactttaagcacaacttttcgttttttatatttgcacaaattttttgaataagacgagtggtcaaacagtgtaagcaaaatgttaaaatcccttatattaggggatggagggagtacatcataattcgatatgcaattggggaacttgtggcaatgaataactgaaaggaaaataaaatggctacatatttgtaatggtgacattattattatttggccagtgctttagtaagaagtttctcatctgaagctcatttggtaaataaataatttttcaggtatagcacagactttggtaagaacgagacggaagtgctgaagcatgcggcaaattatctggaaccagcagagtcggagcaattcttggaactacttgcgaacactcaactgaaagtcttgtatcaaccctatgactggagcttaaacatttagctgcagccatggtattcacatagatgtctagttatacttgaatacctgtcacagatactcgtggaagatcacgacttcttttacaccagaattttcccaagagttggtcacagctctggatgctgttttgttgtggcacaaagaaatgagtaccaatccaactctgttcgattcactggacaaaatgtgtgccttccttgtttcttttggacgttctctgttgcggccattcgtttttttggcggtgaatagctgaatgatttgtgatagcctttcaaggatacacacgaatgaattagctagtgttataaagttaaaattggatttaaaatagttttccaagaaattcaaaatatactagtagtagaaagttattttttttctttttccaaaaaaatgctcaggaagcgtgttgccattccattcagaggaagcgtgttgccattccattcagaggaaaagtagagccatgcttctggtgtccaggaatgtgtcgagtcatatgctcctaaatatgcacgcgtgctgattgagtaagagcatgctgtgaatgcttgtgcagaagtacgcattgccaggctcacagggtttacaaaaccataagcttatcaagtgcggtaatctaagtttttgaagaaacggtatatctcgcggggtttacaaaaccttaaaattatcatgtgtggtaatcttagtttttaaagccacggtatatctcgcgataac

SEQ ID NO: 24018 - DNA, 9613 bp, Oryza sativa
ctttgatccgacatggtctcttataccaccttgagaaacagcataaatagttttggcagctgcagtttggctttcagctgacttggacctgagaagagcaagcaagggagggatgcaaccaccaagcagaaccttcacccttagctcctcttccttgcaaagagaccccaggacagtagcagccagcatcttaacaccagatgaaccagatctaaggagagaaacaagtatagggacagcctgtgcatgtgatccaacagctccaaatgtggtgtctcttgtttcaagaagatccaataactgcttcagggagttctctttctcttgggtggatgaagaaccttgccttaactgctcaatacattgagcaacacttgaaagtgtctcctcatcctccacattggcacggttcctgcaattacaaaacaattatgcttggcaccttggctatctacatatcaggataaattttataattaacatactgtaattaggttctaaaagatagcattatcaaggtacataacatattctcagtgataacttgtgtgtcacataaacccttttttcattatcttcaatatggtgaaagtgaaggtcccggaaatggttctacggtcatgatttactcacaaattagaaaacctattagttatacaaagtttttttttggctaatttaactgctatggctgagctcattttcccgacttcttcatgctattgatgagaatttcacagtgcaaaccaagaaatggaatcaaacttacttgaccattctcatcactgagacaggagttggtggctctgactcttgaactttgggttcctgttaatatccaagcaaaggtagttaatgttgagactcaagcatgcgacacaaacataaattttgaactttacataagctgatgcatgccacaagtttctatgccatgaatccttaactttactaaaaatgctgtgtagatcataaaatcaaattgctgacagacacttgattttataagcataaaataaagttgaacaagattgcaatgagggaaataacagataagaaatataatatgtgcattctcaatcaaacatggatcccagcactaagtgaacattagttttagtagatcaagatcatgcacagatgaagtaaaagatatgcagcagctctatatatacttatgtattgcttcacccaaataactgcattacacaataaatcaaacagcttcaacttagggcatttgcgtgggccttgtgtttgtaaaacagcattacagagccattcaatccattattgtaccattacctgcataaacactaatgacccagaagcatgatatctctcattcttggcttacctacacagaaaaaatagacagcgataaagacgtagacaagatctcctagactaatagaccatcagttgcttagcaaacctgattagtatagcccaagtatgatagataggcctagcgcaaaagctttaaaaaatgcagctgaaatgaagatccccaacgcttaaatattgacaaatatgcatggacatctttttctcaagtagaccgaacactgatctcactttcaaagcatatcctactgctatactattcaacgtttcacccccatgatgtccacatcagaaacaaacgcaatccaaataactccgttaacgtagacgacagcactcttacaattcaagcgacgctaagaaagtgacatgctgcaattctactagctcagaactacagcaccgaggagagcaccaaccagatctgcgcctccattggttccattgaaccgccatgctaatgccgccgccatgtttagctgcaaccccctttagctgagcagatcagaatatcccccacttcttcagtgcaaagctctcaacctgaaaccgacacaagagcaaaacaaaggcgcatcagatccaacacaaaatcatccgatcaagtgaattatacatcaaccaagagcagattccgcctcggattaaaccaatcaccgacgcgtaaccccagatctagcacgcacgagcgcaaccgctactcccaacagccgccgccaagtggatcgcacccacctctcgaatcaccagactaccaaaccactcaaaaagagaaaaaaaaacaccaccgctgcatctgcattccccgcgaattccccccactcacgacgcgcccagccagatcacacgctcagcctccgcatccaaactccggcaacccgccccaatcccacccccgtaaacaagccgcaccgcactaaccgccgccattcccccatcaacccagccgcctcaaccaaaaccgccaaaaaaaaaacagcacgaaattgccgcggaaggagggagaagcccaagtgcccacccaaccaacctctcatggaatcgccgcgacggatgagcgagattgtgcgaacaacctcgccgcccgaggatccgcgccgcgctgcttgcttcgccgccggctcgccgccgcagatccacagcgagaggagggaggcgccgagtctgttactctgccgcagcctccaccgcctcctctcttttttattttttttcccccggcgatttaattccgctaattaaaagggggcgtggtttatataagcgcgtagtgagctctctctctctctctctcccaacgactgccgacagtggcagtgtggtgtggctgtcacttttgcaagataccccctgcataatttagcatttgcaactatagtggtgtttgttttactgaaaatgaaaatgaggttagaactcgaaaaataagaaaatcattatctcacgattaattaagttttgattattataaatttaaaaaaatggttttatctgatattctaaagcaacttatatatagagagatttcacaccaatgcactgtttagtaatttgaaaaacgtgttaatataaaccaaggtaaaatatgtattgttacttcctccatccaaaagtgtttaatacttattcaatattttggtttttttaataagttggtcatactcttagttttcatatattaaagacttaaataaaaagataattaaatgttttagcgaacccaagaatttattggttacgtacatgcatacactctttaatatttgttatatataagatgaattaattttactttgatcttggtgataaaagtaatatgtctatttttcttaggaatgggtaataagaaaatgaaccaggtctgtagccttctcagatactgtgagggggtaaattgtgaaatttgggtttgaaagggggttgtgggtgatgattgtgtatttagattttgtgattaaattaattaatagggatgtggaattgttaattggggagcacactaggctggttgagatggtagttgattagtgccgtctgcataggctggaatgggttttgtcttgtggaagacaaaaaatcaacaggtgggagaggtatctgccaccttccaaatagctgtaaaaccagtgcccacgaggaaatcgaacacaaacagtttgtcacaacacgttcttaaaaaatcagatgaaattttggtgccaatgtgtttcttttttacaagcattacatattttcagttgcacttttcttttgaccaaacataaatattatacgcaaatttatcgtgtactataagactatgagtcatacaacgcactgtttacttggacttatattgaaatcgtctggtcaagacattgccctattatatatacaccaattttcttaattatgtccttaataaatcttgagaaattttcttggttctaactacgattcaatatttgttagaaaattcatgtgaacttgttggtgttgaaaatgggtcatttatcaaggtatcagccaatggcggtgcgtatatgcaaatctatcgtggactgttgagtcatagagcgtattgtttacttggccttctattgaaattgaaatcatctagttgaaacattgccatgaatggttttcttgatggccccaaataaacctcattccagaagtgagaaattttctcagttctaactaggattgaatatttgttagaaaattcatgtaatattgctgtgttgcacatgggacatcaaggcatcaaccagcagtagataaactatatatgctaatgatgctcataaaacaacatctagttatcagtgtttcctgtttgatcggtgatgattacttaaaaggcatgctagttcctgtcctacgtaagctttagaattgcctaatcagaaggatgccctacactgccgtataggtgtctggaccatatatacaactctgcaagtgaaaatacaatattgtcctcggggacctcgattcacatgtgcaagagatgatcaaataatgctcatcaattattgaccaaggcatggttcacataattaaattaaacagagaagcttagtgctagagggtgttttcactgtacgtattctactgctgtagcttgtaaaaatgctagtagaaacgatataagatgttgatctaccataagttttatttaccagacaattattttctatatgatggtgatctccgatataaaatgtcggtgcgtggtggtgttttttttctttttcttgattatagtcttctaggactatatttttgttttcggaactgctacataaccgtcgacagttttcttgagtgaaaactgtcaaatttattgaccatcgattccgctctaagatttgtaccgagatattttactatcggatctaaactctcttttcagaagctagtcccatcatctcatgtttatggtagatttgtaagttacattctagttatatgctagttacattatagttacactataattacattgtaattacattgtaactatagtgtaactatactataactacattgttatctctatataaattagatataaagttgcatatattattttaatacatatatacaagttattattattatagtatagttatagtgaaattatatactatagttagatttgaaagtttttccctaaaaaaacactcgacagttttgtagctagtccctttgttttttttcttgctgtatcgatatgaaacattgtaccgtctagtgttgtttgtttcaaaagaaaaatactcttctaatatataattggatcgaaagtagtactcctcactctatttgatgtttataatgatatttgttctttgtttagaattttgactatcgataaatttgtctcgagaagcattatcacaatataataaacttgtgtttataaatttattttaatataaaacttattgtcaaagctctaaaatttcagtcaaaatcttagcatgttctgaccatcaaatagtgaacaattacacagacgatgggtgtaataattcttgaacaattacacagaagtatttagcaatattctttttttttcatctttcctcatctctcttgtacggtcgaggcgggtaattaattacccgggggattattttcttccacggcgacggcgaccgcgcaacggccggggccccgggctctcgatctcgcgagagttgcaacgttctttgggtgaaggagacggcgcaaccgcttgggcgaccaggacatgcttagctatacgtgcttaactaattcgattctgaagaggacgaaataatgacgcgtgtttaaataattggtgcgagcgcgagttaatcttggccgcatttggatgcatggccgaatattttctcaaacttccaattcagatttgttatttttcttttttcagatttgggtgctgctttctttgagctagaattccaactgttttggggtttggcttaatcagtagaattatttgggaacagtcggtgtactcgctcgcaggtgtgtacatgtatactacaccaattaacacaagtcgtctttaaaataagatgacacataggcaagttctttttctttcctctgtcccagcctgaacaacatgtggatctgacgatgatggttcagcttagctaattaagccagatctaccctttcaggctttctcttcttcttctccccttttactttctccttcttctttccctcttcttggtttcttgccatggactctccgacagtacatgcacacatctcgcctccccatcacactacatgtctgcatactgaaattggatgatgatcagacgggaggaaacgatatcatttctatgaaagatatagtctcggtacagtcgagaattttattcatcaatttaactatttattagtaacaacttcaatactacaacgctaacagatattagaaaaatttaaatctaatatataacttgtatcagtaactgtatcatttttacaaaaacgaacttcgcacactcgggaattttcgccataattttcaccctagcagcaacctgaatacaccccaagtgacactcaaagagctcgatactgctgggtagattgagttgccatctcagctgagcaattcgatcgactgctcgctctgatgctatctcgccaactaaaaaaacgctccgttttccaacgaatccaacttttttcttctcgccatcatctccatctaccgggattgacctgacgaccagcaaatggcaggtaggtaggcaggacattcttggctctccttagctctctcgcatgcatggacaattggacatcctaatccctgaacaaatggcgatgtgtcaaaatccactgatccttcattcattcattcagctggagggcgatcaacaattaatcaaattaattaattcctcaggatcgatcatatgcaccaccatcttaattaaacgtggctgaagtgttcttctgttttgtccataacaaggtcactgattaagtgccactactggttgaattagcagcacgcagcagcagcatccagtggttggcgtgatgaggaaattaaagcagaaaatttcggatttcagatttcagggacactgcagctgtgatcttcttcttttctctgcatctttctttttctgcgtgcatgtgacggtggggcctcccgggaacgtgcaggtacagttggatgtagctgacggccatgagggtagctagagtacactgcgaatagaagtagaatcttccgcatgttgctcagaaaagctttcagaattgaatggttggtgaacaatgaaaaccgactcgtgtatacgtactgaaccgtgggatgctcacagctcagtactgtgcaagtgtaactgaaaactgtgctggtaacttggaaccagtactacggactgtacaagtgcagtgcaggaggtatagggactgttcgtctgcaatttacagcacagccacgacacagccggctgatggctactgctccctcctccgtcaaaaaaaaaaaaccaacttagaatctagtacaataaatctggatagaaggttgttcagatttattgtattaggaggggtcacattccctcttctcctaggttgggttttttctttgacggagagagtatttgctgcaggaatcaaactgaatagagggtttgaaagaatgctgtaaatggcagccgaacaactctatagagtggactcctttagtacaatggattttcctatgaaatttatagggttacatttttcctatgggcccgaggtttgaaatattgagctataaaattttcataggaattcttcatttccttcattttttttagtttcaaacataagtttaaaccttgtggttttgattttctttgagaagttcaatgcaccatctctcttcatctctcctctcagctctagtctagtaattagtttcctgtaaaattcctatgaaatatccaaatggcccattcgacgaattcatgtgtttttattttctatacgatttcatatgccatggtattcaattcttgtgtgtttttctcattctgttttttcaattcctgcattttcaaaggaagtctgtaccttctgttctaaaaaaattctgttggagaatatagtactactatgaagctatgggcaaaatttgatgtccagcatagaattcaccttttctttttataaaatgtaagtaaaatattttgtaataaatggcagtgctgttgtgtgcaaaaagaagagagctagtagcatttccacaaagaggttcgaatgtgaaagggggctcagctaagtttgcgtgtcggtgtaaaaagtggagtccatatctcagaatttgtgatgcacgcgttcgaaggctagaagttcggccccgtttacatggtgccttcaattctgggcttcccgcttttccggcccaattgaggaggagaagagaactcccaaaggacaaagaaagtaaggcccaacttttttttcatcctgaagagataaagagaaactcaatttttcattcatgctcttgtaattaatttcaactttattgatttttaaaaactgtgtcatgtagaacgagtggacaagaaactcgtgggaaaaaaaactgaatatcatacatcgctggaattggagatgaaactgatgtttgaatgctccacattctgcagataatttagagataactacccttaacaagatagagggggaacagcacaaaatgcaatttcagataagtattcagtacgtatgcatatacccttgtaagttagactccctcactccacaaacacaagggatatctgaggcttcttcctttatccacaaatataattcatttatccacaaatataaggaatttcacaatactagtagtattaatttcccgaatccatctagtagtagttgtatcgttaagcttctttttctaatcaagtagactggcagttgtatatatcgttaggcatcaaaataacttccctcaatcttaaaatctactaaataatcgagaattaatccctgtatttgtggatggagtaagtatataacgcatacttatccagagatttcaggtactaggccggcttatcttgtgtaaatacgtacttataattagctgaagatatttcaggtgctagctagagcttatcgtgtacttagctgaagatagcagattcactctagaaccctaagcacagcaatgcaagttttcttatcaaggaaatcaataatctaaccccaaggcaagttttttttttcgattcaattgaacctttccatcaagatgtatcaaatatccggccaatatcaaggcaagtatacatatcaaattatctgaatttcttttttccaaggatgaaacaatcatccattgacaaacaacaaactctctccaagcatgcagcaaagtgcgacctctctctatccggtatggatctcaactctcactaggatgatgactacaaaattctctctttgatgatccctactacaaaattctcactctacgatggcaactacaaattctttttctttgatggcaactacaaaattatcctacacggccacaaaaattcccctctaggatcccaagaaatgcaagaacttcatctcaatgcaccatcctgggcaggatcaatggcatcttgggcagggaggaggacgcgcggatcacgtcctcgtagcaaccctccgagcacaccagcggcggcagcggcgccacagccgggtgcagcgacagcgacggcgagaaggcatagcccaccgcggacagcat

SEQ ID NO: 24019 - DNA, 13853 bp, Oryza sativa
agctgatatccataaatgaatatgcccactgctaacctacatgactaggcatatattccaacatatacatactcacatctaaccatcaatcaacaaaagaaaatgcaagaagtcttgtggtactagtactgttggacagatagcgattaaacaaaagcaagctagtaatatttgtaggaggagataaatgatttgcaaattggaaatattatgtacgggggtgggccaagtcaagatgcggatggagggggggtgtcaggaatttctcgctgcactggcagcttcaccactgcatgagacgctctcctaacacatgcttatgataaatagactagaggtgtgatttaaaaatttatttagtgtgatctagatgtgtctatgacaatggaaaaggggagtgtgtctactgctctcttttcaatagagttgtctcctcacgctctcctagacgtgtctatgatagatggctagaatgtgatttagcgatttaattcgatccaagtgtgtctatgatagatagactatggatttgatttattggctaacgtagtgaattttacagccatataacatgtcacaactatatataatattaaatagcggggtaaccattttactatttgtagcaggatgctatggccaccacaacaatagaatggttgaaaacagctagcatctagaatgtagcagctgcaatagtagtggtagcggcaatgctaggaggcactattaaattaagttcataggaggctatgagataagcattgaaaaaatgtatataacatttttgcaacttcttttaaatatatgcctattatatcataagcgaacacatattgtttatctcaatttttgagtgtgtatcacataaatcaacatttttttgaagtccatgcctaatgtggtcataaccaacgagtctattaaagattgtcacatgttactagatcatgtcatcctggatcatggcgatgcttctatcaacacttgccatgtagagtttgtcaattacttcaaccatgaaaagtataaagcgaatgcatggatctttcatgccctattggtatgcaatgttacggagctcaagattttagtttggtttgatgatgagttcctcaaggatgaccaatccggttatcatctccaagcagttaagaaagttggaacttgattccctaaacctaaaggataattttgttgattcactacctgtgtattcttggaggaactataaatgagttatcgtatcatctctggaagtaagatcatacgaaattcaccgtagcatctgagaatggaatatatggttttcagggcacataaggttggtaatttgactatccacattcacatttgtgtcccaaaccttgtgtcactatcaccggtttgatttgaaggctggacaccactatttgaaagcatgccatatttggtatagagtaaagtgcatgggcagtccctaaacttggagagctatgtcatctaggtccccaaacttagaaaacacatttttgggtccctaaacttgcttagccgtacatcacttgtccaaatcgtatttgacccggtctgctcgccaatgtggaggggcagggacagctggggtgtcaaatatgcaaagaaccccctattccctcatcctagaaatcaaatcgaatcccttgtccccatttttccccaccatcctgagcgacgaaatccctagcaagctcttcttcaattcgacaccctcttctccgattccctagcggcgctatggcgatgtcaagatcaactggagctgtgcgctgttcgtcgtgtcctaccgtggctacagcaccaaaaacaaccctgtcggtgtgtggccgtcgttggatccactaggagctcgacgacaccaagctcggcaccgtcacctacaattactgcgccgatggctggtgtggttacatggaatcccattgattaattgcgcctaatacatctgagaataaaggcagcatcttttacattaggttatttcttctctcctgttgcagagcattggtgtcttgcaagcattttgagtttacatgtgcaagttttatcagcgagatggaagtggatgtatgttttggtattgagaggatcaatataaggagtatttgacgaatacaggacatcttgcagcttctggtgtccatccgcagtgtccagctcctgttgtgcatgtgcagagatatgcattggtcaagcagggttcagagggacatgaatatgctgcagagcaacttgttaggaagatgaactagacattggtagggatgttgtcctgttactaaaatgtgtagtagcttgttgtgtatttgttgtggtgaacaagatgtatgacatagccctacaagtttagggaccgcccctgcactttactctttggtatatgtatttgtcgtatttaacaatgcatgttatggtgcgtgtatatactcgaacttttgagaccgtggcgatgaagcctgtgagagttgctatgccattgttgatcacaaaaatggttactgctttgctagcaagcactatttaatttaagttcataagaggctatgatataagtctagaaaaaatgtatctaacatttttgcaacttcctttaaatatatcgctattataccataagccaatatacattgtttatctcaattttacattgatcacattaaaatgtgtatgtatcacataaataatgggactagctatacaacacattaaaatgtgtgttactattttttttgtgagaaacacttttttttagagaaacacttccaaatgtaaatatactataattgtagtattgtttgtaattacaacttgtatgttaacttgcataatgcaatgcaagtgcacaaaagtggcactgctcaatttttcttacaggattgtcgccgcttagttagccacgagcgtacttgtgcttgccatgtcatgggatcgatccccaccattgcacacacttctgaattttcccgtctcgcccacatgaatcttgatgtctcactcgcatgaatcttgatgtgaatagggccgcccccgaggcgcgtgcatgcgaccgaggcccccaaattataggggccccgtggctgatggcccatggcccatgggggcatccatccaacatccatcgccaggcctggagcgaaggagaagtgatctgactcctcccatcgcagcgtcgcctcgatcacgccattcgcgtcgccctgacgcctcgatctctcggcgtctcgcgtgactacgtgatctgccactctgcgtgatgctgtgatctgctgctctgcgtgtctgtgtcatctcattgtcgagggctcgaggccaaccgcccggcggccaggcacctgctgctctcctcagctcctgctcctattgctcatcggccgatcggcaccagcgcgccaggcgcctgttgctcctgcttggcgctcgcggtcgcggctcaccacgctcgtcggctcataggtaaatttcatctggtaaatttctctatctttttttcctcttcataaataaaaaattattagctcatgatgatcattttttcagcacaacattaattatgttatcgggaaaatatgtatctggtagcgaaaaaaggaaacggaaaaaacactcggatgatttcattgaaccacaacgaggagctattgacagatttttcacaagtaatgctaatgcatcaatgagccaaattctagaagaagaggttgctgtagaggaagatgttccaactcatgagaatttagaagaagaagaagaaaatgttgacatcaatattataatcaacgactttgtatcgcaaaatgttagaagaaatttttgaaagtgccaagtgtttatgattatgttatttctctttgaagttttaaaatgttatatataggtaattttgtcacatcgaatattaaatgttgtgtgtttataagactatataaatatatatattagtttatgtatatatataggggcctcaatataagttttcgccctggggccccaaaaacccaggaccggccctggatgcgaattggcagtccacggatagacatttttccaaacaaaaaatcgtcaacaatttttaagcatttccataaataatctaaattaattgtttccatgaaagtcatcgggacctatccactatctgccataccaaatctatatataatccacaatttcctattgtccactatttagtgccttaactataaccaatatataaatggtttcagagcatgcgattttttgtatgtgaatgtctccaatttcacttatgtggttgtataacaagaagtccatatcatgttagctaggttccttaaacattagctatgttctctagttcatgttgtcatatcatatttctttcttaaaacaacacagagaatacacgaatagtggttttattcttttccacttttttataagaaaaaggtaagatatataccattgacaacataattaattttacaaatcttggtgtagctagatggtcttcgtcggagggattagctatggcacacatgggaaaccatgggattgtgacgacaaggggttttggttgtgcttggtatgcctggaagtgcttgggaggtaagaacacaaaagaagcatatatgtttagcctcccgaaggataataacccaactcctttctagatcactattggtgaaaaatctgtagaaagttgggagttcttgagcttgctagcctagttcttgccgattctagaagccaaccccctctaacgagctctagtcgggcttttataccctaccacctctctctctctctctctctaaatagtattgtacacaatcattagatcgtttcaactcttagggtgtgttcgcatgcccttgttctcaacctcatctccctcgttttccgcgtgcacgcttttctaactgctaaatagtgtgttttttgcaaaaagtttctacatgaaagttgcttaaaaaatctaattaatccatttttgaaaaaaaaagttaatacttaattaatcacgcactaatggactgctccgtttttcgtgcgaagggaatggttcccatccacaacatacaaacacagccttagagctccacgccagttttgctgtagaagcaaaacttcatatgggactccgtgttgggcagacctgtagggtcttgtagtttccaccacaatcatatgaaaataagaacttagatacgggctatctcaccacattaaatgaggtgagacaacttgagagaatctgtgcaaaatataaataattatatgggttagatatgtgctatcttgtacatggagatttctagtggtctttgtgcaaaacagaaggattggcatcaacttttgggactttttacaggggcaaccaactatggggcaaatctataagtgtcatacaactttggtgcattggagcaaaatttgcaggtataatcattgtttaaatgggcaaatagttaatatccttgtaggtacggaagaataatattctacatttccttacccttacatctgtcacatgcttgtctatgtgttcttcattgtatatactcccccacttatccatcaaaatggctgagtagtaaaaaaaagttaacaatggggccatggaaactgtggcaccaacaacaacgatctcccaagtgatgtcctagagtatattctctctttcttatcaacacgtgaatttgtgcagacatgcgtgctctctcaaatgtggcgctatatttggaagtttatgcctaatgtggtcataatgaacgagtctattgaagatagtcacatgttattagatcatgctatcttgaatcactgcgatgcttctatcaacacttgccatctagagttctcaattactttaaccatgaaaattataaagcgaacgcatggatctttcatgccttgctagtatgcaattttaaggagctaaagatttctattcggtttgatgatgagttactgaacatggctaatcgaattatcatctccgagcacttaagaaagttggaacttgattccctaaagttaaagtatatatatatatatatatatatatatattttatttcactagctaagcattcttagatgaactataaatgattattgcatcatatatggaagtaagatcatatcaaattcaccgtatcatctgagaatggaatgtatggttttcaggacagataaggttggtgatttgactgtctacattcgcatttgtgtcccaaaccttgtgtcactatcaccgcttcgatttgaaggctggacaccactatttgaaagcatgccatatttgttatctgtagctatgatatttaaggatgcatttatgtactctaattgttgggactgtggaaaggaagcccgtgagggttgctatgccattggtattaacaaaaatggctttctacttctcaaccatttgtcacatactagtcacttgtcaatagccatttgtcacatactactcaaaacaactagcgtctctgcaatagcggtggtagcggccatgatagcaggtgctatttaaaggctaagagacaagtcttgaaaaaatatatatacaacatttttgcaacttcctttaaatatatgtgcattataccagcatacattgtttatctcaatgttagttaaacacattaaagtgtgtatcccataaatgatgggactagctatacatttttttagagaaccactttcaaatgtaaatatagtataattgtagtaattcaattacaacttgtatgctaatttgcatgcgaaagcacacaaaagcggcgctgctcagtttttcttatgactgattgacgctgctttgttggtcatgagcacacacctgcactttccagctcgtgggattgatccctgccattgcatgcacctccgaatttttttcatctcgcccacacgaatcttgatgtcttgctcacctgaatcttgttgtgaatttgatagtccacgaatcgacaattttttcagtagatccatataaattaatgttttatatgaaaagacatgggggcttatctactatccgctataccaaatccaatccactacatcctactgtccattgtttagtgccttaaccataaccaatatataagtggttttagagcatgggcttttttttacgtgaatttctctaattttcacttgtgtgtttgtaaacaatgaagtccatattacattagctatttgtcgacgtggaaaacacgcactagcctaagagatttgctttactctagtgcaggtccaaagagatcactttcgggttcagggcgtgccagttggtttgatcctgcaaccaacaagaaacaaagaaaccaaagttaaatccgtaaaacgatagtcgatcagctggtttgccgatgacgtatcgtttgtatcgggcctatgcgatatggatcagatcgaccatgtagtgtatggcgaagggataattgaatgtgctctgtcggctgtagatgtcagtaatatatgatctatgctttgaagtactcttaaactaagtgattaggatagatcggtcagcgcaccaagacaatataaaccacttgaattcaagaacgctttaaggcagggattatatatctcgcagcatagccgacaggcatcgtcatatcggctagtactccaataccactttataataagatttcgatatagatcaaatatgctaaacaataatcaatctagtgtcagggtaacccgatagactgatggcaggcttaatatatttggtccaaatgagatcttaatgtaaagggcagatttagcatatcaggtaaacatacgaggaacgagataactaaattaggtaagatcggctgaaacaccgatgctatctctatcgacaatcataagacaagctagatattatggttctgaacgttacttaacagatcaaacacatagagaaacataagatctaaacaagtctatgaaagcctttttgagatggtagatatgctatgtaatctagttcgttgcggctatttaaccctatcggctgttttcgatgatagaggctagccgatgagattatatagctagatcgatccagattatatagcatatatgataactcggcggtttacatagatggggctagagtgtcatgaagatgctagcactagccccgagaacgcaagccgccataacaagctttacctcttcgtcggagatcgaaactgatgcatcccaactcgaaagtaagaacttgtcgaaaacaaagaaagtaaaaagggtggtgatgcaccaagagtgtattgaactttcaatttttttgtttacagggtctcgggtcatatttatacccaaaatacatgatatgtccttgccggacacgactctatctctattacaactcaaaaatacgaacaagtcccttaggcgggctcttaacgaaaatatctataaggaaactatcgaaatatcctaattaatagatgcaattgccttctccggactcaatctatgcttggcaatacttgtgtagcacttgaaccgatcctaacaacgataccatgattgtctcaccgggatcggctacatcggcttctccctatctggttcggtatcagctgatgcagatggtagccgttgcaacccgtagccgatgcaggttatgtttccatgattatcaagttcctccaaatccactttggttctgacttcggatccaatctatgatttaccaaattttgtcgttaacactagtctccttaacactagctatgttctcttgttcatgttgtcgtatcatgtttctttcttaaaagaacatagagaaaacatgaatagcggtttcattcttttccacattttgtataagaaaaaaaaggcaatatatattgccagcataattaattttgcaaagcttggtgttctatctatatgggagtacgatgaatgatgcctcttgctctacgtgctcatgatcacaccttggcattgttgaatgttgtaagcttatttgttctagaggatcaacaatgtcgatcttagcagttgcgctggtcgtgtccacacacgccttttgggcatatatactgaggatacataaatggaacacatattccttatcttgcatgcaagcttaatgaacttagtgccatacatggtgttaggtgaataagataaaaaaaaagtggaacatatatcgtttagtctcgaattatttcttttattcatgtataagaattaagtagaaaatcctagtttaccagtgtaccttctggctcaaaaatgtcatcaccaacaatgttgtaatacactcctttggcaattggcttgcttatctgttatcactacaaattatgattcactcagatacaaactgaaagtagtgaagtgctagtaaaataagtgcataacgaaacatatcgtacatgtgcgagtgtaatttacaattgtaagctaaatgaagtacacatagttagaaaggccctatttaaagttatgattctttttgtcatgtaaaaattaaaatgttcttgatataccaagggaaagctagagcatctgagcgtggggtagagtactagagttgtgcctacttcctagtggcatagcgggtgcattaccactttccaaatctaatatccttaatcgcatacgaaacagtagcggatccaaagatattttggagcctatgcaaattctattatatcaactatttgctatgaaaattttgtttacggctcatcaaaaacacttgaattctattgtgcatccatctagcaagtctgggtggctccttagggtcactggatggtggatttgccactacacacacatgtgcttttaataggatttttagggacgacacattgtgcctagctacctccctcttgctaatagagttgtctgatccagatgtgtctatgatagatggatcagagatttgatttattgactttactgtagtgaattttacagcctgtcgtgtcatagctatatcgaatattaaatagtggtggtaaatcgttgtactagtgataatgggatcctgaggccaccacaacaatacaacagttcaaaatagctagcgtttggaacatagtagccacaatagtggtggtaatagccgatatagcatgctctatataattaagttcgtaggctaagagataagtacttaaaaaattctaaagcattgttaactctctttaaatatatatgcttattataccatatgccaatatgtttatctcaatgttagattaagcacattaaagtgtatagtacatattcacataaatattttaaattgtgtggccaatctaatacctactatccgttatttagtttcacaaccataatcaatacctagaatgggcttttttagtgaatctatgatttaattttccttgtggttgtaaaaattgaagaccatgtcacgttagttaggctctaattttacattctcgtttatgatgccctatcaaattcctttctcaaaacaaacagagaatacacagatgacaatctcattctcttttccacgttttgtattaagaaaaaggtaagatatatttccagcatataattaattttacaaagcttggtgtagctatagatggccttgctatatacggtgaatgatgccttgctctacgctcctggtcataccatgtaattaagcttattttggtctagaggattgacctatatatgcactattgttggccatcgatctcgtagccgtgtgcgtgtccacacacacatcttatggaccaaatctacagggtcaatgtaaatggaacatatactattccttatctcacgtgtaattttaatgaacttagtgccatacacccatacacggtctcaaatgaaaggtgaaagaaatggtacaaataattaatagttttcatttagttgtaaattacttcttttatctatctaagaattatgtaccttcttgctaagaaacatcgtcattaaaaatgttgtaatacaattgctatacttgtttgtcatcccagcaaattttgcttcaccctgctacaaagtgaaagtagtggagtaccaaaaatcagtgtataacgaaacttagtcaacatttactgagtgtggagtgcaatttacgattgtaaactaaatagagtatagttagaaattgtgccgaaaccaccgtgggtgacgaggagggcctggcactccccatcctgacttggcccacccctgaagaaaatgttttcaatttgcaaatcactatgtactcagtagtgactagttctaccatgagccttcttgtgttttctttcgttgattgatggctatgggtgagtatgtatattggaatattgcctactcatgtaggttagttgtggatatattcatttacatacctatcagttcaatagtagcataccagagttgagaataggagatgggagacattgagatacatgatttattcaagggttggtgcacacgacatgtacccctttgaaggctgacatgacaaagccgattgtgtcttactatcgtggcatttgtcgtctcaccgaatattcgagattctgatcgagatgaaggctaccactctataggtgtagagccgtatatatgcgaatcatgacacgtaagtttttgttctttgctcttgcatctgaccacctcaacttgctaccaactatgcatccactctgacatgatcccaacacactagtctcgcgactggcccctctaattcttaaattatagcttttcccctggtcccatcacacaaactacaaactccccttgcctgttgccccctctctccacctcttagggtatacataggtggtgtgttgttcatcatcctatcgtcgaatcaattagatcgttgctttccaaagatgtcgctccttcaacttagcgaagctaactgtctcactatgtcgccatctctccaaacctccaagattccaatcataccatgcgagagggtgactgttcgagacgaaggttgccacttcgtagatgtagagccggcaagccgccgatatgcaaatcataatatgtaagttcttgttttttgctcttgcattttattattgtgacatggcaccaaccaaacgtctattctgttgtctgtcgagccactggtgagttctcctaacacactagtctcatgatagaccctctaatcctaaaattttggctttgctccctgtccatcacatctctactagtaagaggggcagtacgcacaacgcacactccccttgctcgttgccccctctctctacctctgatggtatgaataagtggtgcattgttgatcatccggtcgttatttgaattaattagatcgccactttccaaagattttgcttcttcaacatgatggcgctgattgtctctcactatgtcgttatctctccaaacctccaagattccaatcataccgtttgagaaggtgattgatcgacaaaagttgccatgttgtaggtgcagaaccggcaagccaccgatacgcaaatcataatatgtaagtttatggttttttgcccttgcatctgatcaccatgacatggcaccaaccaaacttccactctgttgtccgccgagccaccagtgggttcatccaacacactagtctggcaaccggctctctaatccttaaattctggctttgctgctagtcccatcacaactctactagcaaaagggtcagtatgcacactgcacactccttacccccccccccccacacacactctctctctcttgactcttgactcccgctataaatagggagtgactctaaatactggcttcgcccatgcgcaggaaggttctatttagagttgtgattcttttctcacgtaataattaaatattccaaatacaacggaaacgtaatgacgctacgataatctatctataggacaaacgaacaacgtaatggtgcagtatatttattgttttcaaccgccgcttcatctgtcgagcgtgtgtcaagtacactcgttaatccatactagtacttcgttaagaaagaaaaataattctagctaccaacctgaatcatagttaggattgtgttttttctttctttttacaaagagggagtacgtgcggtgtattcacattggtgtgtgtgtgtgtgttgcacattcacatatgcgcatgcgcgtctttgtataacgaaggaaaaatgtgacgcgcacacgcgaatcctaccacgctaccaaaaatatgttacagctgtcacctgctaccggaatcccacctcccccaaagaataaatacccaactaatcgagggtgaatctgcaaaaaggccaccgaatcccactcttcctcctcgcctcgcctcgcccgctcgcctcctcgcggaggaagaagaagaagaagaagaagaagaagaaattcctcgagaggaaatcgatccatcgcgttcgcggcgggatccgcatcctcgccgcgcgcggattctcggcgagctcatcctcctcctcctgcggcggctggcggcggcggctgctgctgaggctgcggttggtgggatcttggtcgagcacaccgggggggagagggagatggccagcggcggcggcggcggcggcgggatggaggcggtggaggtgaggttccggctggacgacggctccgacatcgggccaagcatgcacgaccaggccaccaccgtcaccgcgctcaaggagttcgtcctcgctcggtggccgcagggtgagacccccgattcgatcccacccaccatttccttcccccctctctctctctctctctctctctctctctctgcgtctgcgactgcgtgtgtgtgcgcttgtatttcgggaggttgctggcttgctgtcttgtttggtcgctcgttctt

SEQ ID NO: 24020 - DNA, 1666 bp, Oryza sativa
gccagcaataggcgcttttttctctgatgtgcccgcctcctttccttttcacctatatcctatttcagagttatgtgatccctgtatcaatagagaaacacctaatcacaccaaattttcctgagcctttttgaacaagtgctccgtcctcctgttgtaattttgatgcatccctctgttgaaacctgaccaaactgtaaatagccgaagaagaaattttgtcccgagacaacagataatatgctgttacaacaaaataaatcccatattctttccattttgtcaactgctgaactgcagctactgctctccatggcagctcgtgcattatcatttcatcattgaatttttctctacctttgcaatgtggctgctcattttccatgtcttgcgttggccgtttcgctcttgcttgtccatgtttccggctttgccggcctgtaatgtagttctacctgccattcgatgccggcgagagctgggactcggtgagccgtcgtcttgtcttgccgttctgtgaccggcaagtgtttccgcctgtagactgtagtggtgctgcacgccttcattgcctttttgtcttctgattacgtgcgtgcagcgagcgagttggaccaaagcactagtacgtggcaatttggcacgttttggagagcgcgactatgcggcgaatggaactcgacggcgagataagcgaaattttattgttttgtttagaacttttttaattttagaaataaacctaccctcttgaaaattaccacgtcacctcgccggcatgctgaaataactcacaccacttggggttggtatatatacggcctgtttgatacgacaccaattctagctccacctctcatatagctagaattcaactattaaacttgctctaagctggattaattgtatagtatatttttatagataattattatataaattggctattaaaattgactataaatgatttagagtagatagttgactatactattaaacttagctctaatctgggttaggcttccagtatacctagcactaccgggaggactgcgcgtaggggtggaaacgttttttggtgggacctgcttgaaaaaaaaattgatggtagacctcatctaaagctacgcgcgctgggagatggagcctatttacttttttcctacatgatgcttgtgcttcttggtgagccgggacacatttgctattgcctgtagagtggtacgcctagtacgtacgaggcaggagacagattagcagctgcgtgctttcctctccatctgatggtgacggggatggccacgattaagttggaggaattaattcaatcgattggggtgaactgatcaagtgaaagcatgaacgagtcggtacgaattaatgagaggaggagatctgcgacgtgggtaaagattagaggagggacatgtgggcgtggggctcattgatggatgttcgcttcaaaatataataagctttgactatgaatttatttagatgtatgtattcagttttgtaactaaaatttattatattttgaaattagaaatcatggagatatagagttgtagttgtatttttctacggtactaccagtattggtaggggcgatgaatgtccgtgtcttaggcctcggctagcagaagtgaacaaatatagttcagag

SEQ ID NO: 24021 - DNA, 21873 bp, Oryza sativa
  unsure (1)..(21873): unsure at all n locations
ataagtttatatattcaattcttcataatcttaatgataaattttaagttgacaaataataacaccataaaaaataaaataattgatataaacacatgatagcctaagctcgcgagctagctcggctcggctcatttcagccacgagctgaaaaggaggcttgggcttggctcgtttggctgacgagccgagccaagtccgagctgagctcacgagcccgagctttttttttttttccatccctaactgcgcgtctgccgcccagcccaccaccggcgacgggttgacacgtgcggcgagccgccgttgcttgactgcccagccagcgtggcacatgacatgatgatcatcgaaccttcaagcctgatgacatgatctctctaccatgatttgtggatccttgtagtctgcgcttcttttttgtacgttaaaaaaaaaacttgtagtacgcgcttttgtgaataaaaagtatcaatgggcaccacaatttaaactatattttataactcctatcacaatcatatatacctttggtgtttgcccatattttattaaaatttagcgttgctaatttaataagataataaactaaactagtcaaaactcatagtataagcctgtaattgttacagatttctgagaggggcttgaaaacgaaccagagcagcacaaacaacatctggtgccggctagcgctaacataacagtcaagtctcaaaattggcagcgccacctactcccttctttggtctccatgcatgccaccaacccaaaaactcacaagtgacaatccgacgtggcaccgtgaagtcgtctcgttcaaaaaccagtcctgtatgcaaaaggtagggagtgcatggtacaggcttaacaaactccaaatttcattcattgaccagagttaagtatccccaaatttcgaataagagcttttatatgtatgtaagtaaccaaagaaacaatttttgttaaccttttcaccttgtatccgatgatttttttttgttttgttttgcattgaggataggagaaaattatcgagaaccaatttttcactttgtataggctactttccattctactccctccgtcccaaaatataagtatttttagaacagtgcgaagtcaaactttttaaattttaactattaatagcaaataaattaaaaagattaatcatgtaaatttgatgttactatatttatcattaaacgagctatcataatatgcaactctttttatttaaaacatcttacttttgtagatattgttggtcaaagtagcacctcgaagactgaaccgagataaaaaaaatcttatattttcggatagagagggagtagctctcacgcattgattgtctataagaactatggaaccttggaaagttggtgctcttacagtcttaccgtcagattacttgttgtttttgttttttatttctaacttggattacaatttccaaaatattatgggtctatttagattagtgccaagataaatgttaccaaaatttggcaatgccaaaattctggcaaattggcacattgccaatatttagtaacaaactaaatatagccacataattattaattttattaaataatggtattgttaaaaatgtcatcaacatgaacaggtcctatatatttatgtagtctaacagcaagtgaactctctatatagcactatacaatacctatgttttttaatagatgacactattaacttttggtatacgttcaactattcatcttattaaaaaattgtgtaattatcatttattttgctgtgagtttttttatcactaaaagtattttaagcatgatttatatctcatacatttgcataaattttttttaataagatgaatagttaaacatgtgtctaaaagtcaatggtgttatctattaaagaacggagggggtatatcatgaaaatattactcacggtgaataaaagaataaatcttatggtgttaaacaatacaaaattttaaaatttaatgatcaaagttagtcatgtttgacttagaacaaatctaaaacgacaatgagtttgaaatggagggaatatttacataatcttacaattaattattacatggtctagagaaaaaacacatggaattattgaaaaccaagtgtaaacttaatctgtgttataaataataatcccttaggtacaactttcgattatattgaagccgatttatgtacaggagaagaagttgatatatatgaccataatccataggagacactgataatactctctatccagaagtctcaacgcacgttgttactaaaaccaaagaacaattaactaatcccgcatgtaacaaatatcaatgaattgtacacatacatgcatataatgacaaatgagtatttagatagctactcggattctaattaacaattttatctagcaccgcaaaataaaaggcaaatatttgattaagacttttggatagaaaataaaatatgatttagacttttggatggtgggaaccatacggaggtaggctggatcaactcgtggatattccttgacccatgtttgttttagattactgcaaaagtgaacattttaaaaatttggcgacaccaaaatttttataaggtggcagcattgctaaattttagagtaaagtccatcaccggtccctaaacttgtaccgttgtgtcatcccggtccctaaactcgcaaatcgaccgttcaggtccttaaacttattcgactgtgtcatcctggtctcaaaacttgcagatcactcgtttaggtcctccaacttgttcagttgtgtcaccccggtccctaaacaagacggtctaaaaactttataccaaaaaataattcataactttttcatgtgaactctaatgatgacaaactttatatcaaaattgtagccctcgacacgacctacaactttgtagtagaaaagtttttgaattaaaactgtttagggtcccaaaatattgttgcatgtttatagattttgaaattttaattttaaaattatattttgggacaaaaaatgacttaaaataaaaaaaatcgactacaaagttgtaaatcgagggctacaagtttgatataaagtttgtcttcattagagttcacatgaaaaagttataaattatttttaaatataaagtctttagaccgttctatttaacccaatgatatttaaatccaagtttagggaccggggtgacataacttaacaaattggaggacctaaacaagtgatctgcaagtttagggaccgggatgacacagttgaacaagtttgaggacctgaacgatcgttttgtgagtttagagaccgagatgacacagcggtacaagtttagggatcggtgatggactttactctaaattttagtaggataggctaaatgtattggtatcaaaattttttaggcattaccatatttggtgacaagctaaacgcattggtatcaaaattttctaggcattaccagtgtttgttaatttttaaaaaatgatatggtacaaaatggcacttatctgaacgggctcaaagaaacactttaaacttaattaattattatgttaactctcttattttacgtgccctcaagttctcggtctccattaatcgcaagccgcaaacatggcctacgaccaaaggttgttgaccaacccagatcgtttttctaagacctgtaatttacgcgtatattagctcagctatttcagtggtagtataaagtactcctactggctactaacacaagagaaacgtggaagccgtgtgagccgttcgacgagaccgattgcacgaagcagctaggaaaatgtggataataaggtcatctcaaactaaaactatcaaaatagtttttatactatactttacatgtcatatagacattatttataaaaattatatacccagtgaatggcatctttaaattaaattctcatctaatcacctctcttctctcttttttttatccacagtttttattcttgttattgtgttctctcatttcttatgtctccttttatccaccgttttcattattggttcctgtgttctctctttttatctatcatttttattctatagagatggtttcttgtatgagaaataatgtttttatctttttacatctcttctcttttaactcttttgtcacttttgtcacattagatttttgcttacgtgatactccctccgtcccaaaaataagtgcagttttacactattcacgttcaacgtttgaccgttcgtcttatttgaaaattttatatgattagtatttttattgctattagatgataaaacatgaatagtactttatgtgtgactaaatatttttaaatttttcgcaaatttttcaaataaaacggacggtcaaatgttgggtacggatatccacggctgcacttattttgggacggaggtagtaacatatttagggcatgtttggattgatgccctactaaaaattttgatagtgtcaaatcttagtcaagttttggttgccaaaactttggtagggtagagttaaaaatattcatttggattgaagccaaactatacttataagagacaagttcattggcaaaaccaaatttatagcattaatagtgtttcaacctatgtgtttagattgttaccctaccaaaattttacaatccaaactgcccattctatggatggattggcctaaagcatactactcctaagaagggcagatccgtaaattcattatcttatacactctcgagccgcgaaccaaccaccttcgcgacacgtcagcatcccccgacccccgcggccgtctcgccccgtatttattagcgcccggccgccgcgcgtctcctctctgctctgctccgcccgcttcttcgccgccggcttcctcccacccgcaacccaacgccggcgcggcggccgtggttggttaccctacctacgctactacacgcctcaggggcaatggaggctagagcggggctggcgatgcagtcgcgggcggctgtcggggtcggagctggccccggcgtggggcggcggggccgcgccgtgatccgcgtggggaagcggccaaccgcggcgagcctgcgggtcggaggccccgccggaccggcggcggccaagcccctcgccccgctgtactgcctcaaggcgtccagaggtgattcatctgttttttttttcttcttttttttttaactcccttgcagcgggcgattccggggttgtgctcgtgcgagcacggtgtcgttagggttaactttggcgcgattttgtccgggatttttttctcttcgagcggatgcggatccctctggtatggtattcagtgtggatatatgggttcgtcgtggtagccagatttttgcagttttttaattggattgggggaagtggtcactttcgtggtgatctggagtaaatgtgacaacttatgtgttggaaatggagttgttcagggtaggtgatggctttgctgggtcaaataggaaagttggatggggcaatttcaatgaagctctctctctctctttgttaggtgggttggaaggggttaaatttcagtttgtagaagtgtgtattgttacatgtttttcttggtatcaacctgctatttacttcaaaaatggtcaacattttgtaacaaatacactactacaaataacctctgatgatcacaccaacgttggattgtctatgcaccttgtatcatttcttgttgtgatttcttacccgatgtagtcttctattttaggtagttgcctgacgagatgtatatgctaaattttgcttgtgttcagctgaaataactttctttgtaatcttgtatcgtacaggccacgacagcttgcataactcagttgatgaagccctcctgttaaaggtaaataacgctttacaaaaattcctactattagttaaatcaagagtaaaatatggctagaactttgttctctcatctttggctttcggccattggtataatgttttctaattgtaattgcagaggaaatcagaagaagttctattctacttgaacggacggtgtatttatttagttggttagttctgaacctgtatcatttaattgttaacctgtaactggagactaaataccaagttaaatataacttgatcttatttgaaaatgaaattaataatattgagtacgtattgtaggaatgatgggctcagggaagagtacagttgcaaagatattagccgaagttttgggttattcattctttgacagtgataagttggttgaacaagcagttggaatgccttctgttgcccaaatattcaaggagcacagtgaagcgtttttcagagataatgaggcaatgtttcttttctgaattatgtttccctgttgacaacatgacactgttatttttcagatagtttctatttttttgtagtgatttgaatggaaagatttgtggagtaacaatttctcagacatgatagactaacaattccatggttccctgctttgtctaacagagtagtgtcttgagggacttgtcctcaatgcgacgattagttgttgcaactggaggtggtgccgttattcggccagttaactggtattgggattaatctgatctcacgcccatcctcttgtaaatttggctttttctgtttatggataataagtgaaagctcttgtgttttttcaggaaatatatgaagaaaggtctatctgtctggctggatgtgcctttggatgcacttgcaaggcgtattgctcaagtgggtactgcctctcgtcctcttctggatcagccatcgagtgatccatacacagcggtagttactctctatccttgaaactaatcgtttgtacattcacaagacagatgctttcttaactagaagataacagtcttcatgtgaaaacaccaatcagcgttagtgcttatagaccttgtagcttttgaacttgcatgtatttcatttaccatcttcattttgtctttctgcatggttgtgctcattaaaatggatggctcatggaattgtttgttccccaggccttctcaaaactcagcatgcttgcagagcaaagaggcgatgcctatgcaaatgctgatgctcgagtttctcttgaaggtatgtttcttttctgacatgtccttcatcttaatatgctcctagtatgctgatagcagatggatatctagtgtcgcttcagcgaagcttttcatgtatccaacagagaataatacagtctgcatgattttacctctgcagaaattgcagctaaacaaggccatgacgatgtctccaaactaacaccgaccgatattgctattgaggtattgcacatttcgggacaattattcatgtaaacttgtcatttcatctctctttgtaaggacgtctcatactctgcccgattgaatttttttcctaacataacatcctgttgcatttcaggccttactcaagattgagaatttcgtcaccgagcattccacatcaagtggcccagttggggacttaatagttgattcccagaatcgaaggacaaaggccttgtagaattttgccctctttttttcttcttttggtgtatcctgtatttgtagcatgtgctgtttaacattatattgatttattctttatatatccaaaagagagataaggcaaagcttgttccccttgtaaaaatagaataacgaatggagctgacgcgagatgttccacaaattttcgttctggaaataagaatcgttgcaatatcgtttgcccaacttcatgcactgtcactgccgtgttttttgctcaatttctgtagatcactagttacaaacatatcgttatctctctatttcgactttttgagaggcagaaaggaaggattattaatttgttactactccatctgttacaaaatacaacttgtagcgttcaaaatttaattaagaatgcaataacgttttcatcttatttcatttaatttaacccacttccttgatgtccgtacaaaactaactatttatactttgggattgatggaatacatctttattcatattttagaccaaaacgactctccctgttcccaaatacttctcaccatacactgttcacattttaattttgaccactagttttttttcgaaaaaatcaaagtgattgcgtcataagtattaatatttttatcgtagactaactatctaaaattattattgattaaagttgctcaattaagtgcaatgggcgaatgataagtttgttcctgtagcagcataaattattgaatcaatgcattctatttatcctgaggaccagtgaagatcgaatacatgataatctaagtgtgtatatgtactcaccgttggcatgttcggccgccattcccacggcagcgctgcggctgcagcagcaagcagcatgctcagctgcatggcagttagctgcagcttgctgcgaaaaatgccagccgaataggtcctgtagtgttgtagtgttagtacgtgcatattactagttcggagtattttagtttaataagattgtgaatatttatgtgtgcgaaacagagcctatagaatgtttagtgggttggcccaatgtagtatgggctaaggtgcgcatgacttgagaaggcagcccagcccatatccatccaacccaaagcgggtagattttgccttggaaaggcaaaattaaaagtacaccgaaggtcccttaacttgtcactgattacgaaatcgtcctccaaccacaaaaccggatatatgacaatatgacattcctcaacttacaaaaccggtcactttaggtccttcggtagttttgaccccggttttatccgatgtggtggctgagggacgntgggacccacagaggcccgacatgtgagtaagccatgtcaccacctctctatttcccctcctcttccttcctcctctctctctctctcacacaccttctctcccttcttcctctcctctatcccttactcctctctctcactcttccggtcttccctgggcaggctagccggcgcggcgcggcgggacggggtggggcgagggcagcagcggccaacgcggcggcggtggcggccggcgacgagcggcatgggagaaggagaggcggtggctcttcctaccaccatcaacggcaccatccactccctcctcggtgtgtcctccagctccgatttcctccctccctcctgtgctgcatccactcgtcctccttgttcgccgaatccctcctcaccgcatcctctccgacggtttgcttcccgaagtagataagaaagagccacacgaggccaacgggcgcgagacgggagaggagatccggcggccgacgacgtggtggccggcgagaccgacgctagcgccgcctgagctcctccagtgccgcccaagcccaacaacggcagctctttcccagccgccgccttccagatgtcgccactgcgatcttcccagaagacgtcgtcgccgccttcgtgggagtctctggcgaccacgcactcaccgtgtcggcgaacgccgattccggcaggatgcaaagcttgggacctcgccggcgtttagcaagacggaggtagtggtcgatgaaggcgtcggaggagagcgcggcggcccaggcacgggagagactgcagcagcggagcaccaacctgagcgggatgcgcgcgcctcgctcgcctccgacgaggccgatgccatggcagactgtgctgaggaggctatggggcgaccaggccgcggtggaggagcaatcctcccgtgtcgtcgtagccacctcctccccagccgtcggccggcttgccaaaccaaaaaaaaaaaaactgtaataaaaaaaggaggaaggaaaaaaaataacttaacagcctgacatgtggggttcacgtgggtcctatgctgactcagcaaccacataggataaaatcgagatcaaaaccaccaaagaacattgtcggagatatgggcccgggggtatgcgaggtgaggggaatctaccttcccatcctgccacgtgtccctacaacctggtcctacccccgcattccgcgaatcgcaggagcggccgggggaggggacctcggggtgccacgtcatgcccctcgggcccttgcaccgctttgccccgaggccctcgcccagccgccatttggtaggggtagcaagcgaggagggggcccaggctgaacctcctttaatgcgcgcagcgccccaactgccccctgtcgcatttaatgcagtggggcagacgtgcggcgagcccgactggcgcgcgatggtcaagaatgaccaatctatgaccggcctgacgccggtcacgtctgactggacagacaaccgtgctcccacgtcgcatctgcttctggcggagtggaagtaggtatgacccgtcccatcggagggtcattcagagggcggccaccacaagtcttcacccattaatgagggattgacatggctgtccctcgtgtcaggcgagggacggcgctgggccccgcttaaggacaagctgtggtttagcttccaggcgaaggctcgggtcgagttccggtcaaggtagggcgggtccccacccgagagaagagtaggtagaggtggtgcatgtagtatctccttgaggtataaaaggaggattttgcccaccgaggaaggggacgactctcagaaaacctgaactcgaggaggagggaagtaagagcgttctccggagtttaggaacctttgtaactctcagtctaaatcccatacacaggagtagggtattacacttcatagcggcccgaacctgtataatttcgttgtgtgcgagctagctagtagccttcgggacggatacgcgatttccaaaggcgagcttcttcccccggccgaactcacgaaaggggggtctcacgatcccccgctagagaggatcactccttgacaaatatattgtgaccggtttggattagttaagtgacaccagatatatggttttatggttcgaggacgattttgtaactcatgacaagttgagataccttcgatggagtactttattttcctttcagtttccacccgagccaaactctcgctccaacggaaaatgccgtctgctcttcctcctcgccacacccaagctcccgcgccgccggccgccgcctccgcctccgcctgcctcctccgccgccggcgcggccgactccgtgtcagcctctgttactgcagagcctccacggagcctctcgtgttcgcctccccgagctctccgtcgctcctccgctcctccgttgccgtccccgtcccctcctccccgcgccacgcaaatcgggggccgggagacggcggcggcctcctggtagtcaccgtcgctgcgtccgcggtacggccccccttgctcccaaccctcacacatctcatatcgccttctcaatccagcgacatgacactggggtagcctccggtagcgatggcagcatgacggcgttgctgctttgaaggcgcaagattgatatgcgtaacgtggttttgaaagcgggttcttggccagcttttgcatctgtggatggatggatactctctcccccctgtgaagagtaaacagcgggtggaactgaaaacttatctgaatcgaaactcatgatatgcttttaagctgtcggttttgaatatgaattagaaactgaaatgccaatgaaacagcataatgtgataagggtttaaggttggtttttccactctatttgaatctattatttagtactagtatcacatgtctaccaaaaacaaaaaagttctccatttacattcttgaaaaaaaaaaaagatacccagactgaaatagagtcatagacacccccccccccctttttgttgtttaatttttgtaattcttgtaaccgtcaactccttgccaaattgattctgacttgattcctgcatgcgaagctttctgctatatgatattctaggaacatatcagatcaagagtagagcagtacttaaaatttaactggttatgtggttgtgtgttaaatttgaatatatacaagctttttgtttcaccatgatctacatgttaaattcagttttgtgttgaatcaaatatatttgctttattaaagaatattcttatacagaaaaatggttgacaagtgtactcattaacaattttgattccattttcacttgtgcatgccaatgtatactcttaatttgatagtgcgtaactttggaaccttactcttgctgacagttgctgtcttatataggttgttctttctgcatgctttgtattcctttcagcaatgcgctccatgttggtacgttcatctaatttgctactacctctcttatgggaccggtaacagttacagatatgccgacatttttaggaatgcaagaaggcagcagaatctcttgagaagtccttcggttcagcaagagagaagcttcctgaaaccatggcttcagtgaaactagttggaagggagatctgtgacttggctgtggatctcagtaatctaaggtgagtagttgatatgtatcagccatcacttgtattactttcatttatgtgttcttggagaatcttataatcgtccataatacacattcgtgcatcttgacgagtagatttggatgattaactcttcacaagttacacaaacaaacctacacagccatctatggcagtatctcaacttgcattctgacaatttgcctgcttgcttgtgcacaaatttagcagtgtcatgtatatgtttgatcacataaggcatcgggaagacaactactaatgccaccattctgtagatcagtcaagaattgaggaagggcgtccaaagttccatgagcgttgttcatgcagccgatgctcaactgcaccaactgacgacctctgccccacaaggtgattgatttatccattgttggaattaacttccaacgtgatgtacggaatcatatctccttttttttcccttcttttgccctgattgtttctttcacttgaataggaaatcagagggtgactagtaatcgaaagagagcagcaggagagcctttgctcgctagtaccgtgagagaactccgtgagttaattgcagaattacactcaggatttggagtagccgtcagcatcgcgggccttttaacgtgggcatcaaattttgtttctaagcgtcctaagaatcgctcatagcgagacacagaaagtagatagaggtcatgagggcttctggccggtgtaagtgatactgaatcattttgcttgaagttagatcatgatcatttatcctgggttcatgaattatgatgagttcatggattatgaagattggctttcaaatgaaaatggttaatttgaagagagctggactgtgttgctttgcaatccaatccatactaatgaaagacagacaattaaggaaattgtgaaaaatgaatccatactaatgaaagacagacaattaaggaaattgtgaaaattgggatgaatcattttgcttgaagttatgatcgtgaatcatttaacttagtacatgaattactatgagtgcatggattatttagattggcttaaaaaggtagagttggactgtgttgcttcgcaatccaatccatactaatgaaacaaattcaagaaaattatgaacaatccatagtaatgaaagacaattaaaattatttttgatttcaaattggtaggggccgcgcggacgcgtaccccctctgccacaaattatgacgtccactctcccgcttggggagatggtaaaccaacccacccacaaagtgcaatgtgaggcattgatctaggccatgagcctttcttgatcgcccattgaccccgtccaggtaagtatgttccaacgttgccccgtgggatgcttaaatagggataaccacttcgtaacgatacctgagtccccgatacggtactaaacttgatttacttcgcataacatactcccacggattggccggagcgttgaaactaggcctacccactaaggcccaaataggcccactgctcgatggtaattttcggaaggatccctgtagtccggatattttctaaaaacaccctgtacatgaccgttaccacttgctcgcggtctaaagttttgtaaaaacacccctttccggacagttatcatgagtaaaattattaattacattggcagcgacacatatttttacaaaaaagacactaatggatttttgcgattagcccccaagcatttttgcaaaacttgtttggaactttggccaccgccgccggcgccgcgacgcgacgacgggaaggcgccggccgccggcggccagcggcgctggcggtgaagccgatcgaggaggcgtcctccaccgctcggcgaccaaccgccgacggcgacggcgatggcgacagcgcgcaccatgcagggggccccactctgtttactcccccgcgtccgcgaccgcgaagtctccggtctccgccgcgcccgcgtcgcctcgccctgaccaccaccagtccaccgccgcggcccacacggcacagcctctcacaagggaggaagggggaagtgagcccccgcgccacggccacgcgccgcgggcttcctcctcctcctcctcctcctcctccccgagccgcacgccgatcgatggccgcgcggcggcgcctcctcctgctcctcgtcctcctgctgtgccgcctcgccgccgtcctccccacctccgaaggtacgcacgcgctccctcgctcccgcccaccccctgttcgatgaaatcgctggctcgctcgctgcggcggtctcgcttgttcgatcgattgcgatttttattttatttttttttgggtgcagtggaggccttgcagggtttcatggcagggttcgccggcggcaacgcggcgttccagagctgggacgcgtccgcgcccaacccttgcacctggttccatgtcacctgtggcccggggaaccaggtcatcaggctgtaagcatctactgtactacctgctgcagtgttgatcactaattcactggtgctactgctgaatgaatttgcatcttcgcgcagggatctcgggaaccagtcgctgtccggcgagttgaagcccgacatttggcagctgcaagcattgcaatccctgtgagtttgtccatgtttatttgctcatttcttccatggagaatattgggttgcattgcatcttttcaccgatcagacagcactggtagtactcatgcctgctatgaatgtttccgttatgcccagtgatgtggcgtatgcaatgcatatgccctttttccatcttgcctctcgcttattatatgagtaaaaagaatgttgtttctggtctatctcttctatgaatcagtagcgtttgatcatcctttaggaataaaagctgacgatgcatcttgcgaaagcatactatacaatatcactatgagtcttgcattggaatgttggtcattttctattctcagatttgatgattctatgtgactaatgtatcttttggtagcagggaactttatggcaatagcatcagcgggaaaatacctagcgagcttgggcggttagctagcttgcaaactttggatctctacttgaacaatttcaccggtgaaataccgaatgaactgggaaatttatcgaagctcagtaacctgtaaatattctcatctctgcttcaaataatttgtatttgatgttaaatttatgtcttatgatatcacatagccagtgaaaaattaatgtagaatttactactcctgctctttgactttgcgtgcaaggatagccgtctgaacaacaatagtctgtcaggtgcaattcccatgtcattgacaacaatccaaaatcttgaagtgctgtaagttctctgctacaccatgccgcaagatgccgcaattgagacgctgatatgctaatatattcattcagggacttgtcacataacaacttgtcgggaataataccgaccaatggttcattttcacacttcaccccaatcaggtttgcttggcctggagtagtgattatgtcgattcaacaatgcattatgactggtgtgaaattttgtaattgtgtcttgcagtttctccaataacccacgtactttcgcaaattcttctgattcgccatcaaataactcgggagcagcggtgccatcaggttgtctgttaattccttactctggagtgataaactgcatttatttctgcagtgtttcattattctgtgtagaatcccatacataacccagttgccaagtgccaagtgttccaaaattgtctataacctgttgttgcagcagcctgggcatttggaattcatctagtttttgctcttatctcatcatccatttcgatgctatttatctaaacaaataagtcggaaaaacaccactttaattctttcgaattggcggttactctagttgattctgtatttggcacttgttaactcaggaagaagtagtgcatccagcattggaacaattgctggtggagctgctgcaggtgctgccatgttgtttgctgctcctattgtattgttcgcatggtggtggcggcgtaaaccacatgaccaattctttgacctactaggtcagtctacgtgagaacttttggcaatctctacggtttcctttgttatttgatggcattcctttttctctatgcagaagaagaaactccagaagttcatctgggtcagcttagaaggttcacactgagagaactgcaggtggcaacagataacttcagtcaaactaatttgctagggagaggaggctttggaaaggtctataaaggaaggttgttagatggttcattgatagcaataaaaagactaaatgaagatcgaattggaactggagagcggcagttcctaatggaagtcgagatcatcagcatggccgtgcatcaaaatctcctacgcctccaggggtattgtatgacacccccgagcggctgcttgtgtatccttacatggagaataaaagccttgagacacgcttacgaggtattttctgaatattctgcacttgaactatggagtatagaggtgttagtttctcaaatatgtgcagtgagatgatactttcaataaagatctgattacaacattaaaataagtttcatgtcaactacacagagtgctctgattcacaacaaccacttgactggccaacacgaagaaaaatcgcgttagggtctgcaagagggatctcttacttgcatgaaggatgtgatcccaaaattatccatcgagatgtcaaagctgctaacattttgttggatgaaaaacttgaagcagttgttggtgatttcggtctggctagaattatggattacaaagtttcccatgttgtaaccggcgtgatggggacattggggcacattcccatggagtacctgactgcaggaagaacttcagataaaactgatgtttttgggtatggaatcatgctttttgaactgattagtgggaaaaggggatttgatcttgttggtcttgcaaatgaagaaaatgccagagtgcatgattgggtaagtcatgctttgttgaatcttcccttgttttgcaggatatgtcttttctcaagctattatattctgtcagttatattgactacctcccatgctttacatttgacattataatttgcactataatctttagtttcgattcttatttctagggacaacatgctaatgtcttcaatgaaccacttaattcatactgtattactgaagcaatccttatgaaactccaactttcttcaatagatcaaacatgtctacctccctaatcattagtagttcgcacgatttcatttgttaaaaaacaatattgactgcaaattatgcagatatttacattctgttgatctctttaacatggaacgaccaacatacactgtaaactggttaccaattcttacttcatattgaattgaattaaaaaaaatgatacagtgctattcctgtagagcataagcatgaactcagtgataaaagagggccatattctttttattattcaggtgaagaaactgctggaagaggacaggctggaggtgctgattgacccaaacttactggaaatctacaatggtggggaacagggagtgcgagaggagatgaggttgctggtgcagattgcgctgctctgcacccaggagtccgctccaagccgccccagaatgtcaacggtggtgacaatgctagaagacggtatcgcggagcactgggatgcatggcaaaggaagacgattgtgcaggcaagcctgcaaggaggacagggcgtttctgaggctcgcaatgactctgttgcaaatctccctccagacacattgtctggtccaaggtgactgccaccttaaggactatgaagggtggttcttttgtagagcttagtgaacttagacagaacacttgccattcttaaaaaaacagcagattatatgttttcttgtagcatgtgtatgtattttagtttttcccctttttttcaagtaattcataatcactactagacacagggctttcagaaactgttcagaaaccacatcatagttatgctaacgcatcaatacatgtggttgtgctactccaggatcatcaaaggcggttatttaaccctctctgaaaaaaaaacataactagagatggctcgaaggtgagctgtaacctattgccagagatatatcaattttgaatcaaagagtactctaaatctggccatttcctattcattttgcaacacctgattttatataatattcttgtgaagtgttaactttaggtagtcttctatattttcatggaaagagtatatgcactaccatttttttcaaaaagataataatcttgtaaacattcccaatttgacgcattcagcccaacaacttgaatcatcgggtgttggtttagtccttaatgcctttttgttgctaagtggagtaagtaattgccataaaacctttgatgttctcaatccccagagctacaagatgcaacaagtaccaaacaacctacatgctttttcaccagaagagtcaacattagacattacaaaatgaagtaacaggggacaaaccgtaatatcttgcattcttccgcagtaattgagccgaattctccacaaactgtagcgcataatccatttctgtctacacaccaagcagtgaagcaactccatttgctgtttccccggcacaactggacgtataagcatcagcgaggcctggaatgtggcacttgtaaggatccacaaacttccgcacaaacttcctctcactcatcgcggctgtgttgtagtaatccaactcacaatccagcaatcccttcatcctgagaaccttgagcaagtgatgccgaggcaacaatcgccgctcaaggctgtacaaaaacaacactggcctatgcgcaatgtaccgtccctccaaaccaacatccctcttcaagaattcagcggcttgccgtatcttttcctccgatgaggccaccaactgcggtgccttcctgatgatcatcaacaattcatcccgcgaaaacccaagctcctccatcacctgtatcttcctcgcaacggactccttgctcgtgaaagccaccgcgatgagcccatgccggaacatcctcgagctgcggtccaggcctaactcctccacccgtgccacggcgtcccggagatagatagggttcgcggtgaagagcctgctggtgtacaaggggaaactagtggcaaaatcactcatcccacattgctttagcaattccaggttcggcttcaccaccttctcgaggtcggagccgagtagcgaggagttcatcctgagggccttgaggatcttgtcgaacgagcccacgatctggagccagaaccctagattcgtgccgacggagctggaccggaagcaggtgagggcgagcgggacgaggcgcgcgatctgggagcgggagagtcccaggccgccgagctcgtcgacgcgcctggcgaggttgctctccacgtcggcgcagaggaagcgcgggtctgcggtggcgacggcggcgatcttgcggggcgggaggccgaggtcggagaggaaggcgaggacggcgtcgggcttggagggggacctgaggtgggagagcttcttcgaggccttgcgcgcttgggctccggtgaggccccaggtggcgacgaggtagtcctcgacggcgaagggttcgggggagacgggcgcggcggtggtggagaagaggaggaggcggcggagggaggagaggggagagattgcggcggtgggatgaggatacgctggccggaggaggagagaaatcatatgcctccggaggtggtggaccatggcggcggcggcgcaatggtttgccggcggcggcgcaagggtttgcccgcggccgcgtgaaatcgcaatgtttacgtgcagtaacgttggtgggccatgtttaacggcccatttgaaatggacgaaggccttattttcggctgtgtatgttcgcgtggggaaagtccgctttacgttcccgaaggttttagagcgtcatctaactcgtatagctaggataaaattaagtttctcggtcgttctcactctgtcttaaataaaaagaatttttaaagagatataatatattttagtactatgtgttttaaaatataagagaccctccaaaatttgtaggacggagggagtgtttaagttggttttgacttgtatatcgcctacattacttgttgccttatttttcatcctatatccatatggctcctacacgatgtagaggcaaaataataagtaaataaaataaaaacacccgtggaaattaagtcactaagaatcttgttagaaaaatataaaacaatattatgcattattctaagcactaagattttaaatcatagtactcacaaatactatgcacgcgcgaataggctttcaataaaattttagtggtagatgcgtgtcactgatctctgtctctttgggcatgtcatccatgtaataaaaaaaaccttaaattcagcggttcaacttgggtgtgcaaatatatgcatgagtgtggtgtgtacatatgcatcatccgtgtaatcggaaaaaaaaggcaagagatgagaaagaaactagagcaatataaaattgcgtgtttttgcgtacgcgttaattagaaaagagaaaattttacaaaaactcaggtttttgggtatctataatgcaaaaccccaggttttacaaattgtttcataaaatcctaagttttgggtaaagtgtttcataaaaccccatctaaaagcttatattgtctatccaactaacatatttatctataacaattgtaaaaatggtatgagatatttttttttaagttcatgtacacgtgagagcattaccaagaaatccctacagctactcccaatttcaaacttttgggttttttctaagataaaaaatggatccaacagatatcaaaactatagctctgaaaaaatttgagaccctaattccgtgctttcaacagtagttgatgattatagtatgattttttttacatttaatcaattattgagttaggattatattgagtttctagtgcactaaaaagtaagaaaaaaattaagctagacgagagaaatgtgtgctttgagtcgactaatgtgaatttatgaaaaataatcatatgtaacaatgaaataggagtatttcatataaatacgaggtttttctgaaatattttgttctaaaataatgcgttcttggaaacaaaactcgtcagaaaaaattgcctttggtccaagaaaaaaaaaaggaagaaatactcgtatgcattttgttgcgccatagccgctagtccccggctccccgccctt

SEQ ID NO: 24022 - DNA, 2607 bp, Oryza sativa
gcttccgccgccccaccgtcatctccaagctccagtactacgtcccgctgttcggatccttcgagaccctcctccaggcgctcaagaacaactcctacctcctcagctccgacctcgagaaggttgtcaagcccaacgtcgcgctcctgcgggagtgcgggctaggtgcttgtgatattgctaagctgtgcatcccgttgccgaggctgctcaccaccagcccagagcgtgtccgagatatggtggctcaagcagaaaacgtcggcgtgcgccgtggctccaagatgttcaggcacgctattctggccgtcgcgtacatcagcgaggaaaagatcgccgccaaaatgcagttcttgatgaagacattaaagtggtcagacgcagaggcgaggattgcggtgtccaagcttcctgtggtgctgaggagctcggaggacaagctgagccgtgtgtcggaattcttgatctctgaggtcgggttggagccggcatacattgcttacaggccggcaatgctcacttatagcctggaacgccggctcatgccccggcactgcgttctgaagtatcttaaggacaatggattgatagaatccgacaagagctactatagcgcggtccaggtgaccgaggaggtctttgtggagaaatacataagtccatacgaggacactgcgccgcaccttgctgaagactatgctgctgtatccagcgtaaagatacccaccagattcagattgaaaggaccaaaaacaggccatgcaagtgcgcaaactgcctaattcttgccacgagtagtgagctggtaagtcctcttgcagtgttctttgcctgactggttgttgagtgcgctggttttgctgttgctagccaccaacagaactgaactgataattagattcttgaattaagatatgccatctggtagatatgtaaccatggcactgttatgaaccggttcatcgttttgtcacatgtgtgcaatcgttcattcgaatgggctcatccatctgtggttgtatgaatttgccaatgaagtcatctggtagatatgtggcaccgttatgaaccagttcatcgttttgtcacatgttttgcatattgttcattccaacagctcattcatctgtggttgtatgaatttaccaatgaagttagtcttgaacaactagctttgagcatatttaggagtatgtgtttacacattcccatctatgcatgtttcatttgctcttgtttttttcttcttctactagcaatctagcatatactatgagtccatgacacttcaaaaatttccattctgatgcaaacagtgtaggcaatcatagaatctctttgtgaaatcatgctcatattattcatatgaaatgtcttgattaattgatacaagaggcatatagatacatgctctgagtctctaccatgttctacttgatgtactgtgacatccacctgaagccatcgccgtagcccatccggcggacgacgctgcacatgaagacctcgaccggccgcactccggttcctgcaaggttgacattgcccttgccggtggtgaggccggtgagcccgaggtagtagcacagctcctgctcgggcaccgcgtacgggatgtctatcttgttcccgaggacgaggaacggcacgccagcgagcgcgtcgtcagacaggagggcgtccagctccatcttcgactcggcgaaccggcacctgtcggcagcgtccaccacgtaaactactgcatcaacctgtcaagcagacatgaagcttatgaagaagcagcaaaagtggctcacttcagactttgaagagggaagtagctacaaatgctggaaaaacaggtggtatttggctattgacaagatatgcaacagcatgtgacaattgacaaagtatgcatgagctggcgccaccactgtgattactgtgtactggctgattgggaagctgtgttcatactagcatgaattctcaggcaagcgcccaactcaatccctgttcattatgagtttcaaaggaaataaacttgttggtcagtcctgtaaatagtccattttctcctactctatcagtataaaaggcaaaccttttgcccgccttagaaaaaaaaagaagaaaaacttgttggtcagtcatgaatatacacatgctggctgtacgactaaagaaacatggtacagttcctcccgcaattgataccactatcagttttttcttggttttgttgtaacaatatgcagagttgggttatgcactaatatatatgactgtcaatctgtcatcccttaataaggtactagtactaacctacattattattctttttttttgttcagattccaccaaggttattatcggcgccaaatattaaaagtaagcttcctccagtcgccagggggctcacacaatcgctgccaccgggaggggatacttcgtggtcactcatgtggtgcacccatctcttgacgatgaatccccgtcaagtcgatgtccgaagaaggcgatgcccaaaggccacggtgaggccccgcttaagaaaaaaggagtgattatatcctatgtataccttttgagaaacacccagggatcttatgaatatcttca

SEQ ID NO: 24023 - DNA, 4721 bp, Oryza sativa
ttggtcatgtggctaatgggcggttgacgacacacggttgaggtccaggcccacctccgccccttttttcggtcccgaatatgttatacatatgtataaactaactttgtagatgtatctataccacttaaaaggaagcaatggtagtggcagattttctgccaccaccacccctatcaattacatgtaagtccctatttgtcagggtttaccttaccgcgggttaccgcggttaccgggcttaccgcgggggtacggtaatataaataccgcggtaacctccttaaatacaaataaatttaaaaaataatttgattttttgataaattttgcacggttttgtacggtttttcacggttaccgcggttaccgcgcggtaaccgtgcttgccgccggggtgcggtaaccccggccccggcggtaaggtaaaccctgctatttgtactctttaaaagaagaagagagtactaggccctctttgtttaggcttataagccaacttataagccaaaaagtctaagcctaaataaacaagcagttttttgtttggcttttttaagccataagccactctaacactattaagccaaaagctaggttggagaagctttttcagcttatataaggtagatgtatgactccaccactaaacttaagacattaaatccactggcttataaatcatataagccaataagctgacttaaaaatctaaaccaataagcctaagcctaaacaaagaggccctaagagaagcttttatttcaactagagagaaatagtaactacatcaaaatttgaaatgtaggatttgatttgaggataaatttgaggggttttttttccaaatttttttcacataatgatatagccatgttaagtttccccatgtgaatatgtaataccatatgattctctttttaatcccgttacaaagtatgggcattatgctagtatatagaaaatttatgtctctaattctactattataaaaattgaagatgtttttgccggtattttgatacgtcatccgtgtatgagtcggtttttaagttcgttcgcttttggaaatgcatatccgtatttgagtcgggttttaagctagttcacttttagaaatacagaaagagtcatataagaaatctttttaaaaaaactcgcatgctaatttgagatgatcaaatttctaattgcagcttatgattttctagaaaaatatagatccaaacgaattcacacagtgaatttcaccttaactaaaccgtataacaataataagattaaaataatcttcagccgttgcaacgcacatgcattttttctagtatgtatatactttgaacatataaaaaatctataactttatatgtatatataaaaaagtttatatatgtacatataaactttgtgcatatatgcattaaaaaattgtaaaaaatagataaatgtatgggcccggaaactgaaccgcgtgcagctaattagcgatttcggtgactaggactaggaggggagcaaagaaagcaaaaaaaccaacctgggcgtagtagtccctccagacgcggcgagcgatccggtggccgccgaggtcgaacgccttgaacctgatccgcccgatgctcagctcctccgacgtcgggtgctgcgtcggctggtgcaccgccagattctgcacacaaacacaacacagcccaaccagccatcaccacacaatgaacactcatgagcacaggcatatatgaatctaggagtagcttttgatatcatcaccatcagcctttgcaaatcaaacatatgtggcctttgcaaatcaaacatatgtgcagcgagcgatcgatctatataggccctatcgtttggcttttttcttaataagctaaaacggcttattagataataaaaatagatttgtaggtaaaatttttatatatgtgttcatggtgacttaaaagccaatgctgaaaaaaaaactacgttgaaaatatcttaaaatcaatctcaaaattaagtttaaaaatttaaaatttggcattttcttcggttgattaggccatccgatgggagcctatacctcttgtgagagcatgtagaagagggtggttttgccggcgttgtcgaggccgaggaagaggatcttggcctccttctgccacagcccgatcgacgccagcacgtcgtagaaccaatccagcagaaacgacatctccaggtatgttatgttcttcttctcttcttcctgttgttgatttgatttcaccagcttttttctagctaaacctatctttcgatctttccttgcgcgtgttctttgtatttgtagttacccggattcacgagatggcaaccgggtgccaaggccacgctgtgaggagtccacggccgcaacgtacgcgtcatctggcgaatctggtgcgttggtttcccatccgacgggagtccctcgattgctttcgtggtgccgccagcctacgatgggtcgttactgcgtcggtctctgtagaccgtggaaattaagcaaacctacacgaaatcatgctagtcaatcgaatttgtctatcttaattggtgtgttttttttaagaaacaagttctagatagtaacttttttttctcgagcatatgggctttctttgttataggggtaggaaatttaaaagatttcattcatatggaaaagaaaatcctatggaagcctttgaaacaaaggattgaatcatatccaatcctttaaaatttcaatggaatagataatcctatgtatattttagaggaaagttagcaagaggtctaacctcttggaaaattttcgttgagtctatctcattcatctgattcctgcgcttttcctatagtccaatcaaatggtcattcatatgttttgcaatcttctattttacaattgtattcctgccagaattctatgtttttcatattcatatgttttttcattcttacgattcaaagggaccctaaaggatcaccgacctatgcacatatgaacaaacacatacaaaggttgttatccatatattatcatacaatatcttagattcaaaatatcttaaattcaggttaaaataggaaataaacattactgagaaaagggctcatgttggtataatttagaaaaggaaaaatatgtgaaattaaattgaaacgaagtacagatagttaaaaaacttgcaaaattaaaaagaaaatttaacttacaaaatgttaaacacatataaaatagaacgaaggggattgtacttaaatgtttacatatttaggtataaccaatatatttatagcgcagagattggagggtattatttggattagtgatgcaaatacatcatggtattaccaaaaaaaaattgttggcagagcttgactggctcttaaattattcctcaactagaaatcacattgggttatttaggaccctttaaatcgcaggaatagaaaaaatatgaatataaaaacacatgattctaatagaaatacaatgatggcaaaatatataaatggttaaattggatcgtatagacaaaggatcgaataaaatagatatgctcaaatcaaaattttcaaaaggttgaaactcttgtgttctctgcaaaatctacctgtaatgaacctttgtatagaaacttcatagcattaagaaaacctcctttgaatcgaaggcccttcaaaaatagtagtatttcacattttcgcgattttacgaatttgtcagtggcaaagtagaaaaaatagcggaaccgcaggtttcctctctcccctagttcgccggcggcgtctgaccctagcgccgccgccgccgccatgaaccaccttcgaaaccagatccttcttctccgcgtccgctcatccagcacctcgctctctcccctctcccctgtccaccgcctcttctcctcctccaccgccgccgcatccatcgccgcagaacccttcgccgtcgaggactacctggtcaccacctgcggcctcaccggggaccaagcgcggaaggcggccaagactctctcccgcctcaggtccccctccaagcccgacgccgccgtcgccttcctctccggcctcggcctctcgcgctccggcatcgccgccgccgtggccgccgacccgaggttgctgtgcgccgacgtggagaagaacctggccaagcgcgtcgccgagctcggtgagctgggcatctcgcgctcccagatcgcgcgcctcatcccgctcgcccgtcagtccttccgcagcagctcgctcgccacgaaccttggcttctggctcccggtcttgggctctttcgagaatgtgctcatggcgctcaaggcgaacggagcgattcttggctccgacgtcgagaaggtggtcaagcccaacctggccctcctccagcaatgtgggatacatgtctgcgatttcccccatacacgcctgcccactgtgctctgcaggccacccaaccatgttcaagaagctgtggcacgcatcggtgagtttggcgtgccacagtactcaccggtgttccgcaatgcgcttgtgccatttgcttaccaaaacaaggagaagctcgctgccaaaattggagtccttgaaatgtttgggtggtcagaggacgatctctcgatgactatgaggaagggtcctgtcgtcatgaacatgtctgtggaaaggctgaggaaaaatgtggagttcttgacaagggatgttaagtacgagacgcgttacattgc

SEQ ID NO: 24024 - DNA, 9950 bp, Oryza sativa
ctgagaagaagtttcttgacaagtttgtgcattcttgcaagtgtagcattgcagatcctgctaatgcttatgcttctagctttgttggggatgttctgtgaatttattgtctgagaggacaacaggaaaatgggctcattcttgtgctgggagggtactgacaggattgttgtgttggaaagatcaagggtttagacttatacttttgctatctccttcgtgctcattaaggtttgctatctccttcgtccattgttgcaaaatttcttataactttgctctaggttatcttgtgttggctagtatcactattcactgattgataaacaggaacactacagcctgtggtcaccctctaggttgatggaatgttgaataacatttccaggagttaacatgcttttgttttataatgcagcatgtgtagctctgttgtttgtattcaggatccgatgttttccttccctaaacgggtttatccatgtctatggcctgctgccagaatcccagtgcatatgcagaagaaagaagacaaaaattaaacactatggttatcatatgtggtgggtttagttagttccataacttgggtaaagtttggacaatgagagatgctcactgcttttcctgggggctgttgttattttcgatcttttccttttctaacaaaaaactgtaatgactgccttagctctaccatgtttccttgggaggggattagtctgtccaaaacgatgctagagattaggaataagtatttacgtatttctcttttcctcaaataaaatggggtcaccaaggaggaacatccaatcaatttaattatcaagaacattcccaaattttaattcaaagaggcctcaaacttgtgtagtggggtactggagagtgtaccaacttccccagaatctttttaggaaattagtggcatgtacccaagtcccttaaaattttagaagtcttaatattaaaagaagtggtagaaatgatccttgaatttatccaatatatgagttgcaagcatgaagtcgtgtcttccccccaagaacaatgtattcatatcttctagtgtgcttcaaagtcaataatctctattcataggtctgacattttcatccgagcaatagtgctgtttacaattggtgactgccgtcactattgtttctccaggaaatttcaactcaagtgcttataagttacttatcactgttttccgatagccttagcccttgagcgatatggttgttaccctggcactgcttgttcaagcttctaaaggcaaagggattgctgaatgtgaaacttagctactacagcattgcgttgcaggtgaaaagaagttaattgacaagttcatgcacccctacaagatccaggcctagtgagcagatatgcttgttctgggaaaaatacctgactgaagttctattctagcagatgaatgagaactagagaatgcgctcacgctccccattgctttgttggaagaacatagggtttgccatcccccttgtacattgctattaccctttttgccattttaccgtaggtgatccattgtagtaccacatgcactacaattgattccctataaaaatgcattaattgattagctgaaggaattttcttttaaaaagttgatgagcagcagagctacagtatggctcccatcttgctaggcatggattagatactgacatttccatgagaaacatgaatgatttgttgagcaagcatgctatttcccaggttttaactgtttgtttttcaaatgccttcatgacactatcttagtttgtctgagattcgtagtactataatgtgttgcatcacatactacattaggttttttttggatggattgagtaattatttatgcatggacttgacatctctttctctctctctttctctctaggattgaattgttacatttcgatatgagcttgctcaaagacaggtttggtaatttgaaactttatattattcatggttccagccgttcaatccttcatatcatccagaattccagggctggggttgcatctgtagcccttcatcaaccccacaaaattgccttgaaaatatgttgacatccaagatccaaccatccgtatcaggataggggatccttgaactgactgttgttcactacttcactccatatgatcaacccctcgaaattccaagaccaaaaccaatgggcctttaattaatcttacattggtcagcctcaactttagttatgtaggccaaaattataacagctaaagacaatttataggccaaagtagataccaggggttcaccttttcaattgagtgctggatcacgagccccaatagtataactttttcagtcaaatttcgatcaaattttactatttccaatttgaattctcaaaaagcattcagattttcattcagaatccactttcagaaacctcaaaattcacagttttcgtaaaaaagaaaaactaaaccctggttggtacccaatgttgatctaagatgggaccaaattactaaatggaaaatggtccgtaattaggtccacactacaaatcagccctaaactgcggacttaattaaggctacagaaattatttaagcccgttacaaaatttattcggcccatttagtttgcaaatgtaatacctcgaattgggcctaaagtttccttgttgggaaaagtacaccgaaggtccctcaacttgtcatcgagttacaaaatcgttccccaaccacaaaaccagatatcggaggtccctcaactaacgaaacagttcgcttgaggtcctctgatggttttggacccggttttgtctgacgtggtggctgagtcagcgtggaccccacgtgggccccacgtgtcaggttgccacatcatcacccttcccctctctctctcacactcttctctcctcgctcacggctcactcgctgcagggcgcgcgcggccgctagggggcgacggcgaggtgggcggtggcggcgacggggatggggatgagaacagcgggggaaggggaggggagcgagtcaagggcggtgagggagaccttgtcggcggcgaggcaatggaggggcgaggtgggagaggaggacgtcggcggccccacacacccgcaaccacccagcacgcgctgcagatgcctggcggtccctcgcgtgccgccgttgcggacgacgacgacgaactctcgcgtcttctctccctggccgaggccgacctcgacgccggccacctctgagccgtgccgcccgcctcgacccggactccccgcgcggctcgctcctcctcaccgccgcccgccgcatgctctgtgaggtgggccgtgacggcgtcgtcgtcgtcgccggccgcgccgtctccgcccagttcgccacggctggcgcggacccatcctctggcgccgcgaccaccgccatcgccaccatggacgcctccgccggcggcgggggaactccctgccgacgaccggcgccgacggggtgaagcggcgggtgtgctacttctagcgcgcgaccacgacctctgccgcttccacgccgacgacccagcaggaccagatccgggcgctcaagcacttcaacgtcggcgaggactaccccgtcttcgacggcctctacagcttctgccagagctacgccggcggctgcgtcaagctcaaccacagccacgacatcgccatcaacgccctcgagctcgcccgcacggcgacgccgccgcccagctcctcccccggcggctgccgcccgcgccaagctccatcccgccggccgcgcacttctccgcccccgacggccgcgcactgctccgccccccacggtcgctgcccagctcctccccggcagctgccgccggcgccaagttccacccctcgccgccgccggcttcctctgggccctcttcccctcatgcctccctcctgccctccccggcggcggcgcggtatggcggagctcaaggatggcgaggacggcgcggcgtcgtgggcgggcgctgggtggcgcaactcgagaacggcgagggcggcgcggagatggggcgggggtcgttggcggcgaccccgacgcggcggcctgatcacgcgtcgcggctgccatcgctgcctcgtcggccgccgctctcaaccctgtcacgccgctcgtggccgaccccttcaaccagtcaccggcgtcggcatcaccggaggaggagaccgcggccatcgcactcgcgcagagaggagaagagtttgagagagagaaggaagggagagagatgactcatccccacacgtgggacccacgtgaggcccacgctgactcacacgccacgtcagacaaaactgcgtccaaaaccaccagaggacctcaaccgaacggttttgttagttgagggaccttcgatatctggttttgcggttgggggatgattttgtactcgatgacaagttgagggacctttagtgtacttttcccttccttgtttgtgagctcaccgagctgagaaatcataaccctgtgatttcacgcggccgccgtcggcaacccttgcgccgccgccgccgacgacgacgacgccatgatccgcctccgggagcgcatcctatctctgctcctccagccagcatcccctcgcccaatcgccggaattttcccgccgccttgccccctccgccgcctcctctccaccaccgcgccagtttcccccaaacccttcgccgtcgacgagtacctcgtcgccacctgcggcctcacccgagcccaggcagccaaggcttcggagaagctctccaacctcaggtccccctccaatcccgacgccgtcctcgccttcctctccgacctcggcctctcgcgccccgacggcatcgccgccgccgtcgccgccgacccaaggctgctgtgcgccgacgtggggagcagcctcgccaggcgcgtcgacgagctcggcggcctgggcctctcccgctcccagatcgcgcgcctcctcccgctcgccggcaggtgcttccggagcagctccctcgccacaaggctcgccttctggcacccggtgttcggctcgttcgagaatatcctcaaggcgctcaagatgaacgccgccctcctcggctccgacctcgacaaggtggcgaagccgaacctggccttcctcgcgcaatgcgggataaacgcctccgatgtcactcgcacaaccttgtccctgtactcctgccggctcttcaccgtgaaccctaggttcctccaggacgctgtggcaagagtggaggagttaggcgtggcccgtggttggaggacgttccaccgcgtgctcagtacagtggctttcttaagcagggagactattgccagtaaaatgcagctgctggatgatcttgggttttcgcaggatgatttcctggtaatcgtaaggagggcgccacaagtgctgcgtttatccgatggaaggatacggcgatctgttgagttcttgataagggatgtcggtctggagcaaagctacatcgcacaaaggccaacgttgttggcgtatagccttgagcggcggttgttgcctcggcattgcttgctcaaggtcctcaaggcaaagggattgctgaactgtgacttgtcttactactgcatagccgcgatgagcgaggagaagtttgtgcaaaggtttgtggatccttttaaggacaaaattcaaggccttgctgatgcttatacctccagttgttctggggaagcaaatggagttcgttcattggtttgcctgtagactgaaattggatgatgttaaagtttatgctgggaaatttggctagattgttgcacaagaatgcaaaatattaaggtttgtgatcccttatcattttgtactacctttgttaaaacttgtgctgaaaaagtatgtaggttatagttgtatgctacatgttgtatcttgtagctctggagattcaattgcaaagatttaatggcaatgggttaggaacaaaaatgtattgtcctgctggactgaatctttagacttccacaattcatttagcacctgtcaagaatatttctatagatcaagtgttgcaaaatggataggaacgaccaggttaggagtacttcttgttcaacattccatctgtgatttggcggcaaccatgacgttctaaatgacttaaaagggtaatatgggctacaactgtgttgggacttgttttgttctctatggcaggattgtcgttaaatgtaattgatttgtggctaaacggagctacaaccttggcaccacgctgaggctaggtatgcaggggatctgtgattatttgccacagctcacacatcatgtgccttcctaaagtggatctcatggtgctctaggtggagcttgaattgccctttcctgacaccttactccctgcttctgcttgaacattttgatgaggtgaaggatcatttcctaccctgtgctgctaccctgcacctgccattttgtctccctgtgcattctcatgctgttgtcatctattgtcgtaagtcttagccgtaaaacattaggataacattgtggccctaacttcgctctgttttaaacttaaataggagtagataaaaaagaaggatacgctgtttccaatgcgatataatcttctggatacactgatgctatttcttgcaagaatttgttgacaccaaatcttgtaggagtatttctctaaccacacttctttcctgagattgcatcttcatatatggagttcctgacaaacttagattttttttctcttgtcagcaggtgcacatcaggaacaggaagtgggctaagggctttcttgcagctaccaacgacagcggcactaacaccaggcggcattcgtcgacacactgcatttccatttcaccctgtatttgttccattcagttccctattatttgttccattcagttccctattgattttgtggccaagatcatcgtcgtaggttgtgatttgtgaatatcattgttctcacgcaatttctgtcttgtttgttctgatttggcgtccaagatggatgaattcggaccatcagttttactctcgttaacaaaagaggcccaccaaagaattcagcccaccttcggccatggagtacttcggcccggatttgaattcggccagttaattcctctcaacgagtttggcccaccaacaaatttgttaatgggcttaaatctggtcattgacgatgcttaattggcccaatcataatgtccactgggcccatcactccaactccaaatgggcccaatattagaggagtttctttccgccggcttcgatctgagcaagagtaggcgtagccctgcgatttcacgccgccgccggcacctggcaatccttgcgccgccgtcgccgccatgattcaattccggcggcgcatcctcactctgctcctccagccagcatcccctcgccccatcgccggcatttttctgcctccttgctccctccgccggctcctctccaccaccgcgcccgtctcccccaaacccttcgccgtcgaggactacctcgtcgccggctgcggcctcacccgagccgaagcagccaaggcttcggcgaagatctcccacctcagctccccctccaatcccgacgccgtcatcgccttcctctccgacctcggcctcccccgcccccaaatcgccgccgccatcgccgccgacccgaggttgctgtgcgcggacgtggagaaaaatctcgccaaacgcgtcggcgagctcggcgacctgggcttctcccgctcccagatcgcgcgcctcctcccgctcgccggctggtgcttccgcagcagctccctcgccaccaacctcgccttctggctcccggtcttcggctcgttcgataagatcctcaaggctctcaggatgaacaaaaacctcctcagccccggcgtccagaagtcggcgaagccgatcctggccttcctcgagcaatgcgggatcaatgcctctgatgttgcccgtagttcaaccatgtactccagccggctgctcaccgcgaatcccgagtacctccgagacgccgtggcacgggtggaggagttgggcctggaccgcagttcgaggaggttccaccgtgggctcgttgcggtggctttggtaagcaaggagactgctgcgaggaagatacgattgatggaggagcttgggttttcgcaggatgatctgttggtgatcatgaggaagttgccaaactttttggctttatccgagaaaaagatacggcgagctgtggagttcttgaagagggatgttggtttggagggacggtacattgtgcaaaggccagtgttgttgtcgtatagccttgaacggcggctgttgcctcggcattgcttgctcaaggtcctcaggacaaagggattgctgaatagtgagttggattactactccacagctgcattgagcgagaagaagtttgtcaacaagtttgtgcatccttatgaggaccacattgcaggccttgctgatgcttatgcctccggttgttctgaggaaggaaatggagttgcttcattgcttagcctgcagactgaaatggatggtgttcaagtttatgctgggaaatctggctagattgttgcactggtatgcaaaatattaaggtttgctaccgttagtttgtctcgtactatctatgttgaagcttgtgctgaaaaagtctgtaggttgtttgttacttgttgtttcttgcagcttgggagattgagaatggcgaagattttcttgttaggaaaaaagaaggcattgtggtattgggctgaaatcttcagatcaggaaatttccttggaaaaaaatgaatagctcacataccatttgactgaaaatatagaacacagatgtggaatttagcacatgactagaatatttctatagatcaagtgtttcaaaatggataggaaatgggcaggttaggagtacctatcaacaatccacctgagatttggttgcaactatgacaggaacgtgctcagaatataatcttgttgggggatataatccaaacattgcaaataatttggaaaggtaatatgagctacagctgtgttggggcgctttttttcttttgggttctctttgacaggactattgtcaaatgatattaattgattatgctggggctaacaatgctggagaggtgtgaatgagctgagctgccacaaatcacacgacacatattgctccttccggtggagccagaaatgccccttcatggttgatccttgcctgatgctgctctaccttctcgatgcgcttatggatcatttcctaccctgtgcagctgtgctgctcagctgcttctgccatgatgtctccctgtgttttctggctgctcaccattgcaagaatactgttcgacgactagctgacccatgttcttctagctgtgccggcaaaatacctaatgaactatattagcagttgttctaaaatatcatattaatccaattttcaagtttgtaataattaaaactcaattaatcacacgttattaccacctcgttttacgagaaacacttaaactttatcttcaacttcatcttcaggagattcaaacaccatcatacattcatactataatcattttgcaaaaagaaagagaatcatgttatacctataaaagtcaatctgctaattcaatgttactggactctatttattcagccatttggaattctttcgatcaaacattcaaaccgtgctcaatttctctctctctctctctctctctctctctctctctctctctctctctctctctcttctttttctttgcttgcctgacaaaaaaaaaacatcagccgctgcccgtccaaaaatgcaggccttcgcccaacgggctacaattgcggcccaacaacttttaaggccatatcgaaactgcagtatttgcaccctagtctctactagtcgtagcttgcgatttcacggcggcg

SEQ ID NO: 24025 - DNA, 9461 bp, Oryza sativa
tcgccggcctcggcatcccgcgccccgacatcgccaccgccgtcgccgccgacccgaggctgctgtgcgccggcgtggagggaaacctcgccaagcgcgtcgccgagctcggcgacctgggcatcccgcgctcccagatcgcgcgcctcgtccccctcgccaagatcccctttcgcagcagctccctggccaccaacctcgcctttggctcccggtgttcggctcgttggacagcatcctcagggccctcaggaagaactcctccctcctcagcgccaacctcgacaaggtggtgaagccgaacctggcattcctcaagcaatgcgggatagatgcccgtgatgttgccagcaatccaaacctgtactccagccggctgttcacctcgaatcccatgaaactccgggacgccgtggcgcgagtggaggagctaggcatggtccgcggctcgagggtgttccaccgtgggctcgttgcggtggctttcctaagcaaggaggctgtcgcgacgaaaacacggctgctggtggagcttgggttttcgcaggatgatgtttcggtgatcttcaggaagatgccatccttcctgaccgcatccgagaaaaggatacggcgagccgtggggttcttgaagggggatgttggtctggaggaacggtacattgcgcgaaggccggtattgctcttgtatagccttgaacggcggctattgcctcggtattacttgctcaaggtcctcaggacaaagggattgctggattgcaagctgtgttactactcaacagccgcactgggcgagaagaagtttatagaaaggtttgtgcatccttatgaggaccacattgcaggccttgctgatgcttatggctctatttgttccgggaaagtagcaaatggagttgctccattgcttggtttgtagactgaaattgacggatgtaaaagtttctgctggggattttggctagatcgtcgcacaggaatgcaaaatattaaggtttgtggacccttggatcatcttgtactatgttaaagcttgtgctgaagaagtatgtaggagtaggtttgttacttttatcttgtagctctgatggttgaggatgacaatggttaatggcaatggatttggaacaaaaaagcattaagattttatttcacggactaaaccaacactggctgatccaagctgttgggctgaaatattcaaattgggaatttgctttgaaaaataaatggtagcacatgtactcttgacagaaaatatagaagattaccacaacttaacacattccaaggatatttctgtagtactttctgaccatccacattagatttggtagcaactatcgcaggaatgtgctcaaaatacagtcgtgttggggctttaattcaaatattttctgataaaccaggtggccaaacatgagtggagccatgctggggctgttcttgttttttttttctctttgggatgacaattatcaaatgtgattgaattgtaggctaacatgagttacaggttgacaatcatatggggctacggggttcctgccatgatgtctccctgtgcattcactctttgatgatgtgcccaattttgaagagaaacacacaccaaagaagttgcatttgtgattgtttgctcaaaacataccccatttcctcaatttgaatttccatttggcccaagcgtaaagcaaacctatgaactatgaagtgtatgcagcgggatattatttatcccaaagcatgaaccaggaatgcattactgacaatgagccaccacacgttcaggaaaaaaaaatgttgtatagcctgctgataatcacaaaacggacaaagggcacacttaggagatcaatctgtttcattttggcagaatctttggtgagaactgcattgcaattaatcatccatgtaaaatttctgactgttctgcattgatcgctccaaaacgcttgtattttatacacgatgagcgcaggccaacgcattgctttacctctgtcagaacacaagaaactggatgagctccaacttagttcagaagaattaattaaatccaatttggttttgatcaagtttatagaaaaagtagcaacatctacaacaccaaattagttccattagatgtaacattgaatatattttgataatatgtatattttgcgttgaaaatatcattatatttttctataaatctggtcaattttttaaaaaattgactagagaaaaagccaaaacgagtatgaagagggagtagggtttcttttttttcttttacaggagtagttttgttttaggctgtgtttagatccagcggtgaaaatttttaccgtgtcacatcggatatacgtacacacatttaaagtattaaacatagactaataacaaaacaaattatagaatctgtaagtaaaccgtgagacgaatttattaagcctaattaatttgtcattagcaaatgtttactatagcaacacattatcaaaccatggagcaattaggcttaaaagattcgtctcgcaaattagtcacaatttgtgcggttagttattttttaacatatatttaatactttatagaggtgttcaaacgaattttagggtgggatctaaagatggccttaaaggagaaacaaacgtgagaactggaaggcctaggcctttttccaaattaagcccaggagtagatgtcggaaatgtcgaaaaggcccatctacagtatacacaccgtctctctcggaagtctggaagcaagcgaagctccggtttcaagcggcggagcgccgccgccggcaaccgccgtgacgccatgattcacctccggaggtgcgtcctttctcgcctcctccagccaccgtgcctcaccgccgccacgcacgccaattccctcctctccctccacctccgccgcctcctctccggcgccgccgaacccttcgccgtcgaggactacctcgtggagtcctgcggcctgacgagagcccgcgcggagaaggtctccgggaagctctcccacctcaggtccccctccaagcccgacgccgtcctcgccatcctctccggcctcggcctcacgcgccccgacatcgccgccgccgtcgcctccgacccaaggctgctgtgcgcccgtgtggacaggacgctggatgcccgcgtcgccgagctcggcggcatcggcctctcccgctcccagatcgcgcgcctcatcccgctcgctcgcggcggattccgcatcaagtctcttggttcaaagctcgccttcttggtcacagtatttggctcattcgacaggtgcctggaggttgtcaggatgaactgtgggcaattaagccgggaacacgtctatttgctctcgcagttgtgaagtttgcaatcctcagccaggggaagatcaccaagaaatcagggctgtttaagaagcttggatggtcacaggaagatttgtcattagcagcgaagaacatgccaagtatccttgccatgggtgagaaaaggttgaggcaaagaatgaagttcttgacggaggatgttggtctagagataccatacattgcacaaaggcctgcactcatgttttatagcattgagcgccgcttattgccaaggcattgcttgatcaatgttctcaagaggaacggattgcttaagatcaattatgacttctattctactgccttgattagcaatgagaaatttctggataaattcgtgcatccttatgtggagagtgttccaggcattggtgatgcctatgcttctagctgtgctggatgtggagtggaccagttgaagctgttatcgaagaataagataatgtgctgaagcttcttctattaacacccacaagctgggacaatttttaggttagttatcagtttggtttttttacttctagagccaaacgaaattgagctttgctctcgacaagccaaactgagattcaggtctcgattaaggatgtcactatgccaatcaaagactgaactttctattaaatggatttatctataaatctttatgaagtgagctgacgtattttctagcactaagtcgattgaattgttatagttctgtcactgttgctctgatttatatggctcagcaacagtgtttaatatttagggatcaaactctcttgttttttctgttgccttgttccttagttatgtgaggtaaatttgatttagtttatatgttctgggaaactcactgttgcaaatgcttgaaacttgtcctcttgatgtagagttctgatcctaaaaagttgcttttgtgttactactcaaaatgatctgggaaaagattgatgtgtactccacaatacacaacttggacaacaacaccacaactggaggtctggacaagacaattgggtgttgaacaacagttcatttactacagtctacagtttctaggatgccatccagtaacaccatctgctatgctgtttgaactttcgtgatctaagtatgttccatctttttgatagcgtcctgcaattttgtgcattggagcaaattctagtttctttcacttgttactacaaatttatccttgaagaagacatgttaatgatttcgtcttggatatctaacaaatgaatggtgctgtcgcattgatttttattgttgctaatagctggcagaaaatgctatcaacaaggggcagttaacaattcagaaataataataaaaaggaaattgattttaagcattgctgagatatggtccaaattcaatactgttggtagtgagtcatctaagtaaacccaaatttgtgacttttgtgaaattattgataacatggattttttttgtcatttgtctttctttggaaacatctaaagaatgaggtcaggtcaccatcataaggtaagcttgagaagttgagagcagcaccaattcaaaggttctagatggttcatgcatttttggtcagtatctattttattgacagttaaaatagttggttgaggccttgagggatgcttctggtgttcgtattgcctaacagaattccctatttggttcctgttactgttatgaccctagctgcctgctttgcggtcaaagattttgctttattttgttcagacatcaaagttgaaacttgaaagttaacagctggtttccatttctacgtaatttactgtttcgagtttgtagtaactttatttataaatcaccaaatcggtgtatgtgtgtgcctcggtccgatatcaggatggttggtgtgttaccttgaaaaatagttcacctattcatgacataattgggtgttcttttagaatcttagatatacataatatgggcatgacccgttgcaaagcactggtatattactagtgtaaagaaaagctacactgatacatactgcatactactatctatcatactccattatatacttcctccatctcattttaaatgcagttgtgagttttttttccaatgtttgaccgtttgtcttatttgaaattcttttataattagtatttttattgttagtagatgataaaacataaatagtattttatgtatgacttattttttttcataaatttttcaaataagatggatgatcaaacgtcggacacggaaacttacaactgcacttaaaatgagacggagagagcattgtaccgcaacttctcgttttgtgtggtactgccacctagcacatctatttcaagaaagattttcatgttcaagtgatcaagtgacgttctcacatctgagacaatcttagtaatatttgcaaattcgataggcgggtacttctgaaatttgaagactgtaaactgaaaagttcggactgagtgatagcccccaacaagattcatggagcaattggctgtaagcattggatgtttggatctatttgatgcaacaatcccaactgtgtgaatttgtaaactatagctgtgatgcatttcttgcaacaagaggacttcttgaatagaccagcggctttgatatacttttagtacttggtcatgcttttattatggagtttccttcaaatccgttgagcaatgatggtggatacttagacatgtattttcatgaggtttaatatcaggagatagtaattatacacatgtattaattacagaaattcatcattgacaatgagccatcacacattgagatttttttttttatgttgtatggcctgctgatggtcacaaaacagacaaaaaggcacagttaggaggccaatctgttccattttggcagaatatctatggccaaaacagctctgtaattattcacacatgcaaaatttcttacttattgccatgcattaccactccaaaacgcttgtctagttcagtacttcaattgcctgccgcaatcagcccacatccgaagattaggcccaattatgttctgatcaatggatcaaatccagtttacataatgaaaaaataggtatcttatcttcttatcttaactattctaaaaacatcgttctcctttcttcctaaaaaatctccctccttaaaaataccttccaaaaaaaacctgctcccctttcttaaaaaaaacattcctaaaaaattatcgtaatctagttacagtgtacgaacaagtaattggcataagcggctgtttggtgcacatggcgcagcagctacaccaacaataccagcattaaaaaaaatgaatccgttgcagcaaagccccactacaaagaggtaggcacaggtggcgatgacggtagtggtagggcggtgcttgtggcacccacacggttaaggaaggtgataataggaaggctggcccgaccgacggcacgggaggccaacggtagggaggccggcgtgcttatggcagggatgcctagcgaggggggggggggggcagaggatggccggtgctagagcattggcctgttaactgcgggttgatagggggcggacaacaggtgtaaaatctcactcggccttgccaggccggctacgacggcgttttaggcgtcgttttttctctgggggccgcgatcgagccgcccctctccctcaagtgggctgctgggtgaaaccttgttttggctctcctcaagacctcgacggatgatggcgtcgggttcatcgccacttttttctctggagacatcgtctaggaggcctccccagcttgtgcgtgcttctctagatggatgtcctcttatcctctcgtggcagtgccctagtcaatgctagtcttgtattttttttctctattctcatcatagtgtttggacgttaaaaaaaaaactatggatatatgaaactggtttttcaaaaagaaactcagaggattggaggagagttagaatcgggcgcccgatccaaattggcaaaaatcgggtgctaacgtgcgtggaaaaccactttaaactaatttttctcttaaattatttatccaaataatgatccgattgtaccattaaatttattgcaattaaatcttcaaaataagaccacacatggatatattccgatgaaattttttttagcttattattgaattatttttaaatattgcacgatgtttcaccaagtatatcggaattgtttcactaagtagatcgaaaatattcaatcgtttaaatcgggcattgtttcaccttatataaaaacaatgtttcagcaaatagcgaaagaatgtttcagtttagcgcaacatatctatacatagtaaaatattctgagcacactaggtggaacaaattctcttaatagagagtttccaaactatatgggttatttgttgaaaaataatatttcgttcactgtgatatgtgagcgtctgatttttactccccgccggtcgcgcgaggataagcattctcgcagagaattgatcccactggaaggcctcgtcctcgtccaaattaggcccacaagtaggtgtccggagcttacaagcgaagcgaagctgcggtttcaagcggccgccggctaatccttgcgccgccgccgcccgccgcccgccgccatgattcacctccggaggagcttcctttctcgcctcctccatccaccgtgtcccaccccggccaatcccctccccctccaccgcctcctctccagcgctgccgccgccgcgcccatccccccggaacccttcgccgtcgaggactacctcgtcgactcctgcggcctgacgagagcccgagccaagaaggcctccgggaagctctcccacctcaggtccccctccaaccccgatgccgtcctcgccttcctctccggcctcggcctctcccgcccggacatcgccgccgtggtcgtcaacgacccgctcttcatctgcgccagggtggacaagacgctggccacccgcgtcgccgagctcaccgacctcggcctgtcccgctcccagatcgcgcgcctcatcccggtggtccgcagcctcttccgctgcaagtcgctcgccccaaggctcgccttcttgctcaccgtgtttggctccttcgacaggtgcctcgaggttatcaagaccaactatggcgtccttagctccaacgttgaggcggtcatcaagcccaacctcgccgtactcaaggaatgcgggatatctatagcggataggccctcatacgcgttcgcatcgcgggtgatcagcaggcctactaagcacctggaagaagctgtggtgcttgctaacgagtttggagctaagcagggaactcgggtgtttactaatgcggtcatgatttttggaatcctcggacaggagaagctcgccaagaagttggagttcttcaagaagcttggttggtcacaggacgatttgtcattggcggtgaggagcatgccacacatcctagccatgaaggaagaaaggatgcgtcgaggtatgaagttcttgaccgaggatgttggtctagagataccatacattgcacgaaggcctgcactcacgatgtatagcattgagcgccggttgttgccacggcattgcttgatcaatgttctcaaggggaacggattgctcaaggccaattatgacttctataatatctctgtgattagcaacgatgatttcatggaaaaattcgtgcaaccatatgtggagagtgttccaggccttggtgatgcatatgcttctagctgtactggatgtggagtgcaccagttgaagctgctctcaaagcgtaagacaaagtgctgatgtttcttctagtaataccagcaagttgggacaattttaaggttagtttatcactttgattcattcacttcaggagccaaatgaaattgggctttgctctcaacaagccaaactaagatttggtcttgattaatggtgtcactatgccattcaaagactgaactttctattaaatggattagatgaatcttaatggattgagctgacatattttgtagcactaagtcgatcgaattgctatagacttttgtcactgttgcttggatttacagtatatggttcagtaacagtg

SEQ ID NO: 24026 - DNA, 1721 bp, Oryza sativa
ctgctcgttccatttttgtaactcgttcatgctcgtggcgtcaaaagcgacggatggacttacctgtatagggggcaaaagaaccagataagtatcacaaaagcacagcacagtgaaacattggagatgcagtagccagtggttaggttatacctttgcttttgcttgcacaaaatcctccaactttaagggcctcaaagatatttttgtgccactaacgcctccctaaaaaaatggagatcgtatgaacaaacgtggggacaccacatccaagatgatgaacaaagcttaagaacggaagtacaaatatttacaagcatggacaaatcacctagcttgaagtataaatatttacaagcaaggacaaatcaccttttcttcttctagaagctcatgaactggtctgtacgcagctgcgatgcataggttctgcagaaagtgccacgttagtctccatacacaaaacaaacatggctagtagatgttttcttggaaagcaggaggttaagagttgaaccgctatggagggcttagcaataccttcaagtcactaccagagtaaccctcagttgcattggctagttcgtcaaatctgaaatcagattccaggttttcttttgcaagtaaaatcttcagaattttcattcgattctgtgagtccggaaggtcaacgtatatcctacatatcacattgacagaccgtcattttgatatactgaccaagcttagataattttggtaaaatcacacgattgcagatcttaccgcctaggtaaacgccgaattactgcatcatctagatcaaatggacggtttgttgcaccaagaataaggatcctttggttctctttggatcttaaaccatcccaagctgccatgaattcattccgcattcttcttgttgcttcgtgttcaaatgcaccacctcttgcaccaagtaagctatcaacctgtcattatcaaatacaaattgcattagaataaagagatttcgtatgaaattggaaaccacaagataatctcctgaatataaatgactatgccagtttcattaacggaagcaaaatttacctcgtccacaaatatgataacaggtgctagccgactagcaaaggagaaaagggccttagtgagcttctcagcgtctccaaaccactgtaaacagagaaatatatggacaagggctccatgagaaaagttttatgcaagggatggactgctaagttctgtgttgcctcctaatttctttcaagtggcaggcacacactcgcaaaagatggggaaaaacgttaaataaaagctgtactgaaattggtgtgggagctagtagagattttgattcagtgcagactgcagcaccagcacagttcatatagtcagtaatttgtccagtcaccatttataaaagaatgtttggcattatcatgtctttcattcacttaaaaactttgatgaaggggagaaaactaaatacagaagggcatagaaatctacctatggtgaaataaataaaagatttaacatgagtacatgactccaagtccaaacagttaaaaagaatcaaaagagtcagacagaacctttgatgtaagattagaaccagttatgctgataaaatttgctccagcttctgttgcaagtgcctttgccaaaagtgttttccctgtccctggaggtccaaaaagcaatataccttagcaaggctaaacaaaggtccatac

SEQ ID NO: 24027 - DNA, 4990 bp, Oryza sativa
aaacccccgaacccctgccccaaccttacacagcagcaccatagcccatgtgagaacgaccaatgacctggccaggccttagacctgtgcttcggtgtaggacagacgaggggaatttttttaaccccaagctgaaattcactcccacggggagtcgaacccagtacctaaggagtgctactagagccacctaaccaactcacctagaggaaatcaggaacaaagtttatgctataaagggacaaaactatttagagacctgatttaaggatttattttccatccaattaacattttgttgtttttgcgtctagtgcaaacatgtaatagtactgtagactcactatgacccattatatcatatgttcaagacataacttgtaacaggtaaagcagataatacagaaaagacgtccccattaaaattggcatcagataatcgctgattataaaacaacatcaagcaatagtgacatagctgcaaacaaacttgtagagtcacgagtcagaacaccaaaggccccaacaagttacaagcttctttatatagaaagggatagcactaaattttttgtacattagaacataacattccatgattttaagctatggattggtaacatactccaaggtattttatacacccaagtggtaacaatgaagcaaaaacactatatacaagatcaaaaaaaggtgcaggtagacacgataacaaaaacaggaaggcatacccttaacaagttcccatgagaaaaaagctctggtctcctcattggaagagtaacaagttcatccagtgtcttcttaacatcctcaagagcaccaatatcatcaaattttactccaatttcattgggaggtacaactgctgaaatgaaattgcgctcgaattcatcttttgccaaaatctgcagtgaagatcccccttgagcttggaagtaacgcagtacaatgacttgccagcaggacaaataagactagcaactaatagaaaagttaaacaactaaagctaaattaccttaattttttcagaagacttcctcgatgaagcctcctgtgcctttaaccttccaattgctaggtccagacttcaaaaaaaacaagaaagcattgtcagtgcagagccaacagagatgaccgaatcccaaaatcaatgatgaaatacctctcacggggaatgatcagcctgtcaccctttatagagggacacgtcactgatgataaatagtgacttctagcccatccaatgaccttctctgctcctgcaattggaattccaaattttcaatgtatatgaaattacgtatgcataaagtaagaacctgtcctaattatcactccaataaattagttgagcgagttgcattcattatgcagtattagaaaagaagtatttattagtgtgttaagtttcatcacaagaaggtgcaaaacaaattgatagggccatgtagttggcagacagtggttgcatactatattatgtgtttctgctggggtaattgtgcagtaacatttcacatgtgattgcataaatcaaataaaaatgcatacaaccagaacattcaaacgtcaactccaacaaacttcaacttgaagacactatgcttcaaattttcatatgatcaacaaagcatatataacactggcaacccaggtaaaagtatagcatatacgcatcataatatggatccagctagcacactcactttgttttgtcaaaataatgccctccaatttcacatgcaaaagatcctcacatgatagctcatgctcttcaagcacctacattaatcagtcattacttaaaggcaagcactttgaggaagtgatgttttaaccatatggttttgtaggtcagtaaatgaaattcaaaagcaagggcaaaattactgattaaagcacatgtaatcagcatgtccaataccttgggcctttctaccagggatgccttgagataattatttttctggcttctcaatctgggtattgaaaactcttaactggtcattatcctgcccctaaaaaggaataccttaattttaaaggtccagcttgaaaagtctaaagcaacagctgtctaatcacagaagaattgcatttagttattggcataatgtaacacacagacgcatgatcattacatgtcagtgaacaaccgcagtcaaaacctttggaaggattcacatatgaaaacttcagagaatcagtactaaaaagatgtcaacttacctttggaagaggaataaagaatttatttctgaagagctttgatatgtcatttgactttgaaggcttccgcgcttttagcccacctaccagccgcttcaaggatgatgtctgaaaatatggtattacagattaatagactttttgtgactataggttgcgggaaacccaccatgcatggtgttagaaagaaaagcagctctttagaacattcaagttctccaagcagcaaaacacagaatgatgtacagcaaaaccaataagctcctcctatcaaaacacctttctttgttttctaactattcctgtggcaaaactacagttgagtatttcctggtagcgttgtttgttttaaaggttgcatatggaaaacctaagttgtctttttaaaaagcatttccattttgcctttttcttattagctaacaggtaagtggtaaccattgttttgagcaaaggccgggatgttatattccattatctaaaaaataataattgcaacagcaacaatttgccaattactagtacttgaaactaatcacagctcaatacatcattgtagcagcagcaaacaggtacacatcaaccttgctatatttggctgttcccaacgtacctagtagtgaaagtcactacattttcagactaggctgagccagatcttgctttctaacagcactataaacacagcttgatatggcacaggatcacatatatcagcatccctttgcgttttcttccaaaaaccagcatgatgtcaagccaatcttattaacctactggagtttatgggactattcagcacatatatatatgttatatgttagatgagcaactgtttttttcatttattcccaagcagtggtggggccaggattcagacatgggaggggcctaatacactgttatttaggttaattatctaattataaggtggttatgtgtggaaaaaaatgttagagggggccagatcactgcccctccccccgccctctagctggatatagtctgaaggcctaggaacctcacatggttttccatgcataaaatcaagatgagcagcagagcaaatgtaggagaatgcaagtgttttctgaacagttgaacaaagaacttgaagagtaccataaactaaacataacttctttgatagattaacaagacattaccagtggagataggcgagcaagattgtggaacactagcgtcttctgcattatgaaaaaacaaataagatccaaaagaagtgcctaactgcctataatataaatgcaagcagctggaacaataagtgtatctaaaatttaccggctctttttccttgggcgctgcctcagttatattttgtccacatatcaaaactaaagacccagtaagctggtcaaacacttcttctaccttttcaacaaactccctgcgatttgatcttggaactgccctagacagccactgggaactatcaggaaagtaaacaatggctggctgtagagatggcagtacctatttatataagagacccagtacagttaagttcattagcagatcatacaagacacaagtatagtagttacagcatctgcatatctcaccaagtgtacaacatagaacaagacgtcaaaactatgcaatgcaaacaacaagaaaattcaacaaaatataggttttagacaaaaaataatttctgtcaaattacctcacgaagtgcttcgattgcgatgtgccaatcttctgcctgtatatcatggtcaagctcaatatcctgagctaaaagtacaaatgagatcagtgttaaaattgcagaattttcaggtcagttacaaaactatggatgactgggaatagaagcatactgtcgacccaacaaactgctggtttagcaagatgctctttgctagcttcatcttttttatcatcagacagcttgtcttcagaaggatcaaatataacagctgcttgatcgccattgatctcatacacctctccacgctgtccatttgataatgtcctgcaattatgacataatatggtgttaaaaaataaacttctcacacaaattgtgccttttaacaatgctaaaagattagttttcgatataaggaatatcaaatgtaaaatgaactcattcatcagaaacaatggtgatacaaaggactattgagatggaaacaaacataaatatgactagtggctatgagtagagaccacactaacaagtattaagatattttgcacctacgtcacacctgaaactgcaagaactttatgcacaaagatttaaagcaaaacttgtagaatattaagataacatgccagcaaatgatatacatttcaggagtaactcttccaccataaataacaactgaatctaggcatatattgctcaaaatgtaacagcagtaacatggagtaaagttccaactaaaccttctagtcctaacctacacaaaactcacctgccattaatagaagtataggcatttgttcctccctcttgagtaggaatttgccccaaattgatcctgtgatatgaaagatatatgttatgaatcatgaatagcatcaagaagtacgaagatctaaaaccatgtaagaagaaagggttcgatggataatatgcagtacaaacaagttcaacatgcctttttgacgcaacaagaagttgaatcaccaatttcaccagcattatgaacatgaatactcaactgtcaatgcaagagcgtgcatccaactagactaacacacgtcgtctaaaccaaccca

SEQ ID NO: 24028 - DNA, 10800 bp, Oryza sativa
ctgatgcatcattattgcaaggtcagctttgcaaacaacacaaaaaaaaaggtaccggatcaagtgaggcaccataatattggatctaattagaccaatagaacttcaatacaaaagcatgaatgccatgacacaagtagccaataaaccaaacatgggtaagcttaactcccaataagtacctgtgatctgcttcaacaagcactgatgctccaacatacttgaccctatctcctgaaatagttaaacaaacaattagaaaagttgttttgacctttggcaacttttcgacctttgttcaagttcagtaagtactaaggccccgttctttttagctaatggaggtatggattattcgtgccatgccacgctttcaaaagtacgatttctccaaaaacattctgcatcaccgttgcttcaataactttttctaagctattgttacctttataatctatagtatttaattaatccatgtattaattaatgagcggataagctcatttggacaggccctaagaaggtctagcttgaatatcatatttcaccagtagatacaatgctatgaacaattaagccaatacttagcatatttgccagggcgttgcaacagctctcaaataaacattccataagtctagccatacataaataagagataataataaaccccatattcaaagaattgcatgcctaattcacattagatcaactggcagctgctaagtatagagaattgaatgtattaccaaatgtttttacaaataacacatctatgtttacatagatcggtccacaaaagatctggtgaagtgggggcgtagagcacaccaactccttttgataagtagttaaaaaacaagatgaaaaagaaaggtagctcatgtacccttttggagcggccttttcccatcttcaggagactcagcagtgtcagaggattctgatgttgatgaacttccctgggcactagcaactctctagaagcataagtgatcaaggcataagccacgtgccagaaatagaagcaaacaaatacagggggaaacaaggatgattataatttgcactaaaagatgtttgcaataaaaagatgggaacaattcggcttgaataaagttattaacaataatgccacttatgtatttgcagggatttttttctctttgtctaaaaggtctttctctcattcattaaacaaatgtattgatacaaagtagtggtataaacatatatcagaacaaagcttttctaagaattttaaaaggtcagacttcaatatggttctgcagcttaacagaaacaaacacctttgcaaattcctcaagagtgcatggaacaagcttcttgaggtcttccacggatttaatagcatcatcatcatcgctttcacctgatttttcttcatcatcatcgccttcatcttccacctctgacacagacccttcatcttcagattctgcatgatcatcttcttcctcactctctgaacaatcttcaccaaaatcctataaaatgatgcattaggtttgctcataaaaaggattatctaatacttagtacaacataatgaggggaaatcttacatatggagctagaacactgctgtccaaaaccaacagtggcacgcgtagctcatgggcaagtgcttttaccaatctctcccggtagagctcagttcctgcattatagaaacaaaaataacagcattccaacatccgattaataagacacacatattaacgaaaaattcaacctcatttgcacacagcacctgacaagctctggagcaatatcctcccaccagaggactgcagccgagaaccatactccagagcgacatctttgtggcgcaggtgtgccgccacacaatcactcagcagctgccttgcgtcctcacttgcaaccaaagagagagcacacaatctaagttagtctggttcaacgagcaaaacatttacagattagagtgttcgggccagttcgtcgtcaagcttactcgacgtagtacgggaagctgcgccaggagagggtggccttctcccatggcacgacgcggcgcaggaactggtcgcggaagcgctcccgcttggtgaggaatggagactcccgcctcctgcagccggtgacgaaccgctcgccgctcagccattccttctggtccctctccccgagccgcgcgtgctcctgctcgctgctgctgctactactaccgcctccgccgctccccacagccgcctccacgctgccgacgccgcccttggagcagtagaaccgggacgacggccgccgccgcccgtcgccgaaaggcaggggaggcggcctccgcgccaccgcgctcccgccaggctctccgagccccacgacaagcgcgcctccggtctcatgcgtgcgcaggagctgcgggcgcaggaggccgcgcagccgcatcgcgcgatgcatcgctggaagccgcgtcgtcgtcgggcgaggcgaggaggaggagggatccgcgagcgcgctaggcctccctctggcgcatgcggcggtggcaacaggtggacggtggatgggcgccgcgagcgccggcggcgcgacggcggggagaggtgtcagggtggcggcggctgcgacgcctcgggaggaggagtacggcggcggctgcacggctcgccgatttgggtgggtgggttagcttcgcttcggattgggccgtgtcatctctgggctttggagttttctttagattcgaccagaactatcgagttggaccaaccctatctacagagttgtaagaacgggccgagtttaccgtattgggccagaaaatttcattcctatcgaggttaagggcctgagctggagctcagccaaaccgtttcagctccactaaaaatggagcggagctggatggagctctctcactagagaggtggagctgggtttattagctccataactccacttcagacccaactcctgaaaataaatttaggagtttgagctctaccaaacaggccctaactctttgggctgggccacgtcaagatctgagcaatttgctggctctgccactacaacttgtcactattagtcctgaattgaactgctgattcagtgttgtattagaagaaattcttctcctctcctcttaaggcctttataatgtggcaagctgtcatttagctcgatctcttcacgtcacagattcggtatgaatctttgccacgttcatggatgggctcaccaaattgaagcccgcgtgatcttcgttggtcacccgttcttggcgtgaggagagaagactacaaacgcgctgcgaaagacgtggctccgttttgtttttcctacatggactatagaccttgtggtcttcctgggtcttactccctccgtccaaaaaaaaatcaacataggcatggatcgaacgctcatgtccagattcattgtcctaggatccatgtctaggttggtcttttttaggacggagggagtaagccttagtggcgtcttgggccaagcctatgcatgacctacattgtaaaggctcttagggcatgtttggtttccggccaaacattgccacgcctaacttaaggctcgccacgggtattttggtaggtgtttggttgacaactaaagctaggctagccacagctcataagccctcccgccacacttttttcccccgaaagtttggcggacattttcaccgccacactgatttgtggcgcgccactgccgcaaaaaactccccaacaaccacgataaattcaccgtccctcaactactctcagatatatcaccacccccatctctcctcatctcccatccatggctgctctctacctcgtttccatggcagatcctctcccgcggccatgctcgttgatcttgtgattagctaccttctcctgtaggttgtgcgttctttccttcttcctctcctagatccattacatctattaaatctcttaattttttcatgtgtagatctgattaaagggacacaagaacttctgtgtttgaggagcagctgcgtcttcatcaagttctttgtgtgcagcaacgcgtctgtgcgggtcgaaaggagctgccgtttgtgtgcggcgacgacgcttccgcgcagccggaaaggaaggtaatattctctcttttccactgacatcgatctgatggatttcgtgttgatttctgaagtctttagctgtgccttttttttttgcctgattagcactaaggcacatgtgcatccttgtataattgatggtgattgaataatcgtgtggcactagaatgtggaccggatctgaactaatatatactagttcttcactattagttttatgcatatgtatgcagtaatagatagatttcattcttgactaatatatgataaacagtgagcttaatagatagatatccatatcatgttgttgctttcaagatattcaaagtgtgcttacagtatattaactatcagttttttttctcttactgatactgataaccagtaacagtgtgcttacagtatttgcagtgaccttaatagatagatatcaactatcagtttttttctcttactgattccatactttttctgaaaatatgttttagatgggtcaaagaaaattgtatttacagtattacttggactactgccattatatatggaggagaagattgattgctggaattctggtgtgcctaaccatgtattggtataggattaatagaagaaaaaggaaaagagccattacatatgctcccatgcttgatagagatgttgaaagattaagacgtctagaccgtttataccatggaaccgaagcacattgcataagtgagcttcgtatgaggaaagttgtcttccataagttgtgtgctgagcttagatcacgtgccctgctagaggagacttttcatgtcacaatagaggaacaagtcgctatgtttattcacgttgtgggtcacaattggtcaaatagaccaattgcatttgaattcatgagatcgggtgagactgttagtaggtatttcaatcttgttttagatgccctctgtatccttgcccgtgaccttgtatgcatcaaatccattgacacacatcaaaagataacaagctctcatggcagatttcacccctactttcaggtacatcaaaattgataatccctgtttaagtataccctaagagtctagggccatattcacctatatttgttctaaacaaaattgtctattttcgtagggatgcataggagccctggatggtacacatattccagcatgtgtacctatgcatatgcaagaccggtttaggggtagaaagaaatttcaatcacaaaatgtgctagcagcagttgattttgacttaaggttcttatatgttcttgctggatgggaaggttctgcccatgattcttatgtgcttcaagatgctctatcacgtactaatggccttaaaataccagaaggtaggattattcacatcatatcctaatagctccatatctgaaacttcaattctgttcttagctaattaatatgcacaaaaaatatgtaggtaaatatttcctagctgatgccggatatgcagctagacctggtgtattacccccataccgaggtacccgatatcacctaaaagaatataagggcgctagagaaccagagaacccaaaggagttattcaaccttcggcattcctctcttagaacaactattgagcgagcatttggtgccttgaagaaccgcttcagaatatttaaatgccaaccattttttcctttgaaaacacaagtgaaaattgtgatggcttgttgtgcacttcataactggattatagaggacggtcctgatgtctatgtgtatgacgatgctgcttggtatgcagcgctgccacggagtgtaagaaaccgtactgatatgcaccaggagaatttgtcatgggcaaagaaaagagatgatacggctaaaaagatgtgggaagataaagtaggacaaactgtaccttagatttaagttgttctctaaattatgtaactaatgtattgagctgtctcttgtgaatgaaaacagaatggctaaaggaaaggcgaaggctgatgcttttccaacctctcatgagaggtccttgacttggcatgaggatcaaacaaaattcatgctagagtggtacatggaatacttgaaaaaacaacatgcaggttttaaggtaaaaaagagtcaccacatgttgtgtgctgatgctttaaacaagaagtttggtatgggggtgactgccgatcaagtggatcgtcactacaggtatcacaaagaaaattggaagtatattgcagcagcattgagcaagagtggcaacgcatttgaccatacaagattcttggtgactatttcagaatctgaaaaggcaacgctatgtgtaagttttctacaaaattgacatgtttgcatgttacattttagaatctgaactgcatatagcaatttaacatgtttgctctttatgcaggatagagcaagacgcctactctctaagcccatcagattctttaatgagatgcaggagctattcacgggatctagtgccgatggttctttggctatggatcaaaacacatgcatgaacgatagtgatggttcaaatagcgatgattcaagagatatgcttgacctcaactgctacacacaacctgaagagccaactggtgaggattctgacactttgccatctccaaccacgaatgcaactgttgacaactcttccagcggtagtcaaggtaaaaagaagcgtccaagaggcaacaaatcaccaactaaaagccacaaaaaagcaagagtcgctttgccgagtccaatgatgaaatcgctactacgatgaaatcacttcgagaaacacttgctaccacagctcctccaccaatgccacagcttactgatccacatgcaattctgtggcagaaactagaggcaatcccaatgacacctgatcaaagggttcttgttggtgagtatttgtctgacaaggagaataaaggtaagcgtggttggttgtgcaatgcgagtgatgctacactaaatgcttgggtgttcaagttcttatgtgagaaagatgggcttaacctgtgaagcatagcttgttaaagtagttttttggcgaactgtctgtgtgatgtgcacatgaacttctgtatggctgtgcactcattttggctttgtgttataaggaatgatggctagaatatatgtattagttgttggttgtctaattttagcagtgtggtcatgacaaatggctagaaaatgtcattgaaatagttttagttggatggttgctgatattattgtaatagctcaactagtgttactggagtgttatctttagctggactaatatttcaatatatgtgcactttaattccaatctacttatatacattttgctgctgaaatgtgattgctttgtgaggagggtaatcttaccactgggtgtttttatcaagatgtggttgcaatccaaacatctaccacaaatttttgccaaacatttgtggcatcaatccaaacagcacccaaaatatttttgccacaccttagttgcaaaccaaacagtctaatttagccacaaagtatggctagccaccattgtgacaaattcttaagcttaggcgtggcaatgtttggccgggaaccaaacagacccttagccacaaagtatggctagccaccattgtgacaaattcttaagcttaggcgtggcaatgtttggccgggaaccaaacagacccagtatgatggaagcaacatggggaatcacaatttgaccatgcgtactattccctttatcctagtaaaggatacgatatattctagtactatgaatcttaatagaacatatactagtattataaatctaaacacaatactatgatgtgtcgtatcacgtattagatttgttttttttatgagacgaagtatgatggaagcaattccagtcacccaagaactactaacgacagtatcatatatgcattttcatttgggcattcagggggaactgaccaaaccccaatggttaaattcctttgtctaccgaaatttcatttgtgctgccaagattgaatattcagaaagattgcgaggaaaagaatcaaaccataacggttggtttcccttttgcatagtgaaatttcatatgttctaccaagtgctaactgccaatggctaacccgttcgattaagtgtgagtatgcaaaacgagaaagataatagtgtatgactgattgcggtattacaaatttaaaaaatgaatatatttgatattataaagcaatttatatatagaaagcctttgcacgaaatacgccgtttaacattttaaaaaacatgcaattaaaaatcgaggtaaaatctatatcttaataaaaaaagaatgagacaattcgtttagaagtaaaaaaaaaatccagatcgaagttttggtttcttttttttttcgttggagaagacaattcgcccagcataactgcgtcaggtcttaactgctatagataccagcttaagattgatgctttcaaaaccaaaaacaggccccaaacagggcaacagagcttaggaaacaaaaactatacatggatccgcttaccaacaattggtagaggattcggatgcttcccatggtactaactaataacatgccatgtaatactagatctgacgcgcgaggtaaggaagtttttcttcttacaaacacggtacaagcgcacacgctcacaacacacgcataccgacccctacaaacgcatatgtgcacaccctaccctataagccacctccagaaaactgagccggtatatcttgaagctgtcgaagtcaccactagtgcctcgttgtcgacgtcgacgagtatggcgcctaccgctgaaagaataattagtcgtaaatacgatcacccttattaagtccaggatttgaacctgggtgtattggtttcaccataaggatactaatctatcgagttacgctcacttcgcgggtgaaagggagaaaccatataagggtagaatggatatttaattgttaactttgcatgtgaagatgatgtggcatgttcacgctgtattttttttctcaagaactatgtaaatcaaacgataattattttgaacaatttaaaaatatcagtgactaaattgaccctagaacgttttgactcttcgcccaaactaaaataatagtatcgaaatcaaggtggcatatacacgaagtagtgaatggaaagagagagggggatgaggtaattaagtatttggttccacctatatagattatgcttggggtaaagagtagtttcttaattaggttgtggagtatatccatatggtggtattaaataggagtattaaatatccatatgtcttgtaaataaatgttacgtgcgccagctagatgtcaagaacatgcggtaaattaaagcaacgtaacgtggcaagttgagcagcctattgtcataagcttaactaagtcgatcatactccacattaaaagccatcagccagagcttgaaaattaatgtcagctcaacacactatattgccatgagcttaatcaagtcataggcattaacgcaagttaggccctgtttctttcagcttaggattattataatccagattattgggagtaaactgaaagaaacagacaatttattgaagtagcttattataatctggatccagcttattataatctgataagcttatttaggtaaactttttctagattattgggtgaaaaaatacccaccatgccatcccaccccctctttagacttgcaaacccaataatttaggctctaataatctagattataataatccaaagctgaaataaacagggctttagccagcttaacgcaagttactgacaattaatacgtatacttgcatgcatgtcctgttcacgttactacttgtaacaaagctttcctgctcacgttactacttgttacataagtgaaaaaaacgtttgagggcacatggaaactgtacatgtacttgtactgcgctaagttcaattaatatagacgtacataaaagagtatatatcaaaaagagccaggggaaactgaatttgcacgcatgcatgcacattcatatgatcgagatcagtagtctaccaaacaagcactataaataggggcctcttatgcacaatacaatcacaaaattaacaagctagctatcattcctccaagtgtcaagtacttacgaaacggtactatgaatatatgtctagttacattttgcacttcaatatatatgtgtagcttctgcccctctgcttgttttgcattacatgtatttgcttgttggagaagtagatagctatatcttaaacatttagatcttattcggttaatcccatatgcgtgaaattagaggggattaattccacacattattcctcttcttccctaattaaataaccttataggtggaattagccgaataagtcaatgattaatttttctagtcctctcttgtgagtggattgattaattactacttagaattggctcatatacgcagaatatgccggcattggtgaagatcgggcagtggggtggatatggagggtcagctcaggacatcactgtgacacccatcaaactcaccggcatgacaattcgtagcggaaatgcgatcgattccataagcttctcctacagtggcattgacggacaggagcatgtcgtgggcccatggggtggtaacggtggacacgctaccacggtacagtgcaaaattctcaatgctt

SEQ ID NO: 24029 - DNA, 525 bp, Oryza sativa
aatttgatattgatgctactgaattgcatggcgagttgatttttctccaaagtttcagttcccaagaaaagttgggccctgttgaaattttgaagtttttgaagcggcatgattgttttcccaatgcaactattgcatatagaattttattgaccattcctgtgactattgcatcgcagaatggagtttttctaaattgaagctattgaagtcatacttgcgatctacaatgtcacaagaaagacttaatggtttggctatcatagcacttgagggtggtatgctggggagaatcaatataaagctatcattgaagattctatttcagaaacactaaaagaatgtcgcttttcaagtgaatattatgcacaggtatattattttagaccattttacattgctatcaaatatattatggagtataaattatgtccatattatatcatcacagatcaattaagtttttatccttctttatgacttcccacatggcccccaaatttgacgggacggccctaaccgagg

SEQ ID NO: 24030 - DNA, 6734 bp, Oryza sativa
gacactttgttggattctcttatttctactgctaaaccatcgcagtcaggtggacttgccaaacaagcattgtcttccattgcacagtgtgttgctgtgttgtgcttagcagctggggatcagaagtgtgcctcaactattgaaatgcttaaaggcattttaaaagatgacagcactactaattctgtaaggcgcattcttgatgacagatgtgttgtttaacttctgtactgtttcacttttatgtagtacttctgctctttggtatagtgcatgccatatcttggtgatccttttaagttagttatatagattttcatatatcaacatcttttatatgtagataatgttataactctatagcgttgtgaaataggatactacattctctcttaactagtttcctatgccttcgacaattttgaaaaatgactatgctgaattggagggatcatgctttatttttttcaatttgataggatcaccctaaattgtatagtctgaaagtccttggtaactgttgatgtgcttgtttgattctgatccatgaaaattgccattgaagtattagttatttattaattgcatgaattcaaataactcaaatatgatctctatcattctccttgtattcagctgactgcctatctttgtttaccaggctaaacagcacatggccttgttatgtttgggagaaattggaagaaggaaggacctcagcaatcatgctcaaattgagaatattgtcattgagtcatttcagtcaccttttgaggagatcaaatctgcagcgtcatatgctctcggaaacattgctgttggaaatttatcgaagtatttgccttttatcttgaatcagattgacaaccaacagaagaaacagtatctattgcttcattcactgaaagaggtttgtccccattaggatttggtttgatgtgcattctccatgtatttgttgcttaattcttgcttgtactttaaatcactcaggtaattgcacggcagtctgttgaccatactggccagagtgagctccaggattcaaacattgagaagattttggcattgctctttaatcactgtgaaagtgaggaggaaggagttcggaatgtagttgcagaatgcttaggcaaaattgctctgattgaacctaggaaattaatccctgctctaaaggtgaaatgggattactatctaaactattttcttcattttgttctactgtcatttaatgattagaggtcttttggttcattccttgcgtttttttttgtaggaacgcacatttagtcctgctgcaaacacaagagctacagttgccattgctataaaatattcaattgttgaacggcctggaaaaatagatgaaattatgtactccgagatttctaccttcctgatgttgattaaagacagtgacagggtatggaaattaagcacagttcagcgtttttacttaatgctgtctagatgtggtgttcattgtttccttttgcactttgcagcacgtgaggcgtgcagctgtgctggccttgagtacagctgcccacaacaagccaaatttgattaagggtcttcttcctgaattattgcctcttttgtatgaccaaactgttgttaaggtatagtttcttattgacttcttgttttgttgtgagctaggactgttatatcaagtaatgttttttgtatccatcttatcgtaatgattttttcctgtgcagcaagaattgatcagaacagttgaccttgggcctttcaagcatgttgtggacgatggtcttgaactcaggaaagctgcctttgaatgtgtggatacattgctggatagctgtcttgatcaagtgaacccatcatcatttatcgttcctttcctcttatctggtttaggtggtaagtactgttacactaaataatttatcactttgaccgaacattccgtttaatccactgtagtaatatagatgtataggtggtgtgtaatctttaaaacctttacaccgcacacaaataagtcatgtttattttgtttacttgttcgcagtgcttttttcactagtattcgtatcttcttgtttatgcttagtatacacacgctgtaataactgcttttttgttgtcttatggaaccactttgtagatcattatgatgtaaaaatgccttgccatctgattctctcaaagctagcagacaagtgcccttctgctgttctggcaggtttgttgccttaatctaggtccttacggggatgtttcatacgatgcaaatgccctactctgagttctttttgctaatattcttactatgctgtctcagttttggactcattagttgaccccattgagaaaactataaatcacaaacccaagggcgatgcagtgaagcaagaggttgatcgcaatgaagacatgattcgaagtgctcttcgagcaatcgctgctctaagccgcataaggtcaggcatcattctgtcctgccccgaacactttttttctggtttaaccacacttttaactgtgctgtcatctttctcgttattagtgaatcgccacatctttattctttgcccttgataagcgataactagaaacaaatggttacctcattttacttgcgatacagccattctatacatgccatatgtttgttcgaaagtgacatctgcattctaatttgagtatcttaccttgttttgatcttttgggttacgtctgcagtggtaatgattacagcatgaggttcaagaatctgatgaacaagataatggcctcacctccgcttgctgacaagtacaactcggtgcgcagcgagtaagagctgatctttttgtatatggtagaaaatagttggagccgacttggtatatgtgccactgcctattctgaggtgaagattcaacccagcattgccctatatttttctggtggagctagtccgaaacactgaacgatacagctgagactaagaggtggtttgaaaatttgcgaacacaaatggctggttggaagctagactttttttttttgtcttgtacaaagtatggcggcaattcactagattcagtaaagttggattatattttagccgtcttgtgcgtattttttcattgcgtggtactagtaattcttccaatctctagacgccgtccttttccaagtttggttcaagcgtgatattgaaaattaaaaacttgaaaatcgaattaaaaacgatcaatttttaacttgatcgattttgtattttttttcataaaaatgttgtatttcaatgttcatctctgtaccttccaaccttggcccttgtaagctgacgtcaggccacatgcttcgcatgacgctccaagctcaaacatactgccctacatatcaaaaccatcgtgacctgaacgacgagtcgtcgaccgggaaaccgtcggggctggggatatcgcacctcggctggcggtaagcatgtttatcgcgtggtaacaatataaaaccatgcaaaatttgttaaatattcaaattattttttaagtttatttgaatttaaggaggtactgtggtatttatattaccgtacccgtggtaaccgcgcagggttaccgacggcaaaggaaaccctgccgacgagaaccacatgatttcagctaaagagcactgagcagccatgtcccatgtctctctcttgtcgccccggccggccatccaccgtgaacttcgcctgtcgccgcaagacgaggccacgccgccggcgtcccgaacagtggacgcaccggcgacgtcgcgctccgagcgtgtcgtgccctgtgtcagcaaacgacgctttggcattgcattgcatatgcggcgtgccatgtggtgcccctcgaccactggaaatttacactaggagagaccggcctgagaccccctctgaagtctgaaccccatcatgtgcctgcctgcctttggcaatttgaccgtatgggctacctttgcctaccctcttctctaattcattgtgccctcttctgcactgctcacatgatcatctcttgcaaccagaaaaaaacacacacaagaatttcagttacaaatttagtaggtgcagtaccactatttttgccatggctaaatttgctgcactgcacttgcccttcccatctgtgcatctgcacttctgcatcagtgcattgctagtttgctgctaccactatttttgccatggctccatttgctgcactgcacttgcttgcaaaaggctggaggtgaactaggggagaaagagagaaacttcctggtgctcaccatgtgctgcaaatggagactagtctttttccacaatggcaaaaccgaaaaggagctgtgtgtacctgcttctgtatctctttgctctgcatcatgcatgtgactgatggagtgtgtatctgtgatatatcatcatatcagggagcacttaaatgagcagggaaattggtggtattcattgtttgcctccacttctgttctcccctcacatgctgaaacctaggaaattgtagcatgatgatgcatttggaacctacctgttttatttttcaggtggttgttatggcttgcttgatttatttgagcaggagattcagaaacagtttcttctctctttcttttgaggtgaggagattcagaaacagtttagaattggctctgtcacaatgattaggaaagagggcaccatgatgctgataacaataatgcaagattggttgctttaggtgtataagtaggttggatctcttctgaatcttcttccctctgagctaagtcacagttaagtagttattgtcaattgtagtactagtcaatctctctgcacatggggatgctgcttcttctattgcaaaacatgaattaaaccacagtttctatttatatggtggtacaaaacattggattcagaaatttcatggaagcatccacagagaaactgtaaaaaaccatatctttgatttggtgaaagtgtcaactttgacagctgcattacaagagagaaacaacagcataatatgactcaaatgcatttgtggcttcattttctcctaggaaaacacatatctttcctgaaatttcaagtaaaatatcagtaccgattttctccccgaaatcttcccttcagatcaagcaaaatactgaggagacactgcaacagtgcaacatgtcatgcatcaagcgatttcgccgcggtcaacttatcgccttcgctgaagacgatttgataccaatgtttcctagcttaaagagtgaacaggagaaatgaacagccaagtcatcagccatggctgtctcatctccccttctctttttcagctgtgccaaaccaaagccgtccttctcatgacagcctgacgatcagttaagggtcgtaccaagacaagacctgaagttcttcaggatgcttccttcctgccctgcccctgtcctggccatatatctcaacatgcaaacaaacattagcatccatccaatggaaatctggacctttttcttctcgacatgaaaacgaaataacgaaaactcttgctttattaggctgaacaatctttccatccataatttccacatgcagagtcttttaggctccgcgtcaaaatataagggattttggctgagtacagattagtcaggtttttacatgcggagtgcaatccaaatgttgcaatatttgagtatttataacttaaattttctatcgagagaatttcaaattgaaaaaaaaaaaacttgtttgacaaccggttgtgaagattttttttcagaaaatatgtcggcgctgattataaatttgtaataaaaaggcagtggtacggttgcaaagggagcagaatgccctgctttctttagcagattctgcttcaatcagtaggttggtttgccatcttaggccggaccaccaaatatctcagggcatcacagcttgcttgcactagtgttgctttgtgcccccaaaatgcattgcaagaaaacatttagtactcctacttagataaggacataaaattcaatgcctgggtcaccaaaatttagtcaaaatccagataatccgtgatgttcacaaaaaaaatcatgtgaatcttttgcgttgttctcttaattgggagaaagattattatacttcttttcttaattagatcttatagaacaacagataaagtaaacaggaagagtgagggaattaaagaaacacaacaacattgtgctctagtaaaaattactactacctccatataataaaatggcatcaaactagcctcaaggattacatgtatggttaatgctgaacaccacaaaatcctccctctcacaaactactgcaaatcctagaactacaagggggtaagaaaaaaatgaacacccatagttcttcccatccatcagcagctagtagtagataatactactgctagtagtaacaaatagtaaataaaagaaatcacaaatctgtaggtgaaaaatctagtacccaaatcccaatcctgccctccatcatctgcaatcaatcagatcaccagcagctcacaatccctgtatgtacactctaatcctacccaggggtaaaatggtaaaatggtgtggccacacgcctccagtggcagaagagcgtaaaatgcgccccggccaagaagagggcggcgccgcgggtctcgccggcggcgagctagcagtcgtaggaggaggggtattcgccttcgtcggcggcggcggcggcggcggcggagaggcggaggaggagg

SEQ ID NO: 24031 - DNA, 25665 bp, Oryza sativa
  unsure (1)..(25665): unsure at all n locations
cgccgccgccgcctgcttcggccggagctgctggtacgccgcggcggcgggggagtcgtcggcgacgcgggagagccgcttgaggaggcgcttggccttcatggctgagctcgccggcggcgaggaggaggatgaagcgaaaggtgggttgtttggggaggcaaaggcgtgagctttgttgcggtttgcggtcggtacaacaagggtagggggggtgtgggcttatataaatgctgtgggggtttagtggttgctccactttagaagttggagggtaggagtattaatttatttctagttaattactgattccattttgcaatgtggagtaatattttatgccttgcatcctagtataataagtatttttttagttcatctcatttatcttaaaattaatttattatttttagcattggtgcatcggagtttataaaagaaagatataaatgtaatgagagtaaataagggaggaataattgtattgagatttgaaaaattgggtgggagggagtgttgcagtccttttcttattggtgcttgtgggatgggtgaaagtaaatttattttgtgacagatagggtgacatcttctctatatgtacaataaaatgttgctgataaaaaaaggtctatatacataagttccattgaatagcacaaagtataagtaagccttacacccaagattcttacgatgcgtgacaatttgaaattgtgcaacaacaatgcacgatagtttgaagttgtgcgtttagggatataatggttaagatcccaatggttgagactattgccgtttctaatatagatctaacattattcgtagtagatggcaacaaaccatgataaccatctattgtaggcatactatataattaattcgtatatattcggactgctctcatgctttatgtcaaaccattcatattcatatttatttatttatactcactcgtgcaaaacacacaataatatggtaatttataggatcatttaatactactacataacactactcctacccattagtacacgtgaatttgctagcgggtgtttccttctcacggcacgatgcatgcgcgtcttctgtataactatgtacaaaatagaaaacatttcggcattgtgcattgaaagatataatagttaagagtccaactttgttgtttctaatatataggtctgacattattcacgaagagggaaaaactacgataacggtctatttgcatacataatgctacttctacacatcagtacacatgaattttccaccggataatcctttaagtgcacgtgtgttacacatgaatttttttaccggataattatatgagcgcgcgtcggtgtgtcacacactcatgaccatctgatgcatgcacgtcgtctatataaccgcggagggaaagaagaagaagaagaagaagaagaagaagaagaagaagaagaagaagtacctaatttcaccggcacaacaaaatggttggcaccacgtaggtgtgaggctagcagataagggcaggggcgagagggtagggtacaagctggtaccgaatagtgtacccggcaggtacagggcgacacaaagccggtggcgacccggaccccccatcccatcgcgtcgtgaccacaccacaccacacgccttttactaaacccggtcgccttggccggcgcggcgcggcgcccgagcccgaccggttggtgtggtgtctggtccggtcgatgcgagcgtgagccgccctggtttgccgtgccgattccgtagtccggctcgtacggtacggctggggggcgggccagcgaaccgaccgatggcgaccgggacagcggggacgcgggggacgagctggctcgtgacagcgacacccgctgcaactgcgggggatgggcgggccccacctcggaattccgtaccgatggaaatgctgctacagtgctgctactaagggggtgtttagatggtactaaaactttttagcccatgtcacatcggatgtttggacgctaatttagagtattaaacatagactaataaaaaaattaatttcataaatgagagctaatccgcgagacgatttttttaagcctaattaatccataattatcaaaagtttactgtagcatcacattgtcaaaatcatggcgtaattagactcaaaagattcgtctcgcgaattagtcaaagcttatggaatgggttttgtaattagtatatgtttaatactccaaattagtgtcaaacatccgatgtgacagggacttggaataagtccctggaaaccaaacagcccctaaatcaattttccttttcctttgtttgtttattactcctacgtcctagaactccctgtatgacaccgttaactttttcgaacaatgtttgaccattcgttttattcaaattttctgtgcaaatataaaaatatttatgtcatacttaaaaaatatttgatgataaatcaagccacaataaaataaatgataattacataattttttttaataagacgaatggtcaaacgttgattaaaaagtcaacggcgtaatacattaaaatatggagagagtattacttttcaaaaagaatatttttgggcaattgcaaatttgccactactttgaatcgttattgcaatattgtcactaaaattataaaaatgccactagaactgtcatccgagtggtatcctaataatattaaaaaaactgatggcaaatttgtaaatgcctcgaatattttttttgttggtgtgatgggctgaactggcgattttttttcgtctctcatctggacttctcgttattctgcttgattttctatacgttacgtgtgtgtagtatgaagtcctggatgttgtaaaattttttgtggttcatagggaattgattttatgaagctgtgagaaaccgagtaatatcacatatcctatatttttttttctagagttaaatacgctggtggtaccacaaccgagaaaaaaccagataatatacgtgtagctattacttctcgatcaccatctccatataaataattgatggatagttatattgctcgatcgatgcccaaacatatactcgctccgtctcataatataagggattttgggtggatatgacacatcccattacattgaatttggatagacggtccgtccatattcactgtactaggatgtgtcacatttacctaaaatcctttatattatgggaagaggtgaatagtggattggtggtccttccacgtatgtatgaattagtaggagacattgaaagtttattaatactaatagctacttgtcctagctagcaagtcacatatatctacttgtacctgcacgtacaatagtgtacgtgtacgttgccctgagcctgaagatcttttggctcgagttctggctgtcttcttttctaagcgataaaccaggaaaaagtatatgcacggtcatgactggaggattaattgaagtaggagtgtttgtcacatattcacatatactccttttaattatgccatcattaaattggtgtggctgaaattatttcagcgtccgggggacaacctgcgcaattaagcagtgtctaaatcgtattgtcgatcatcgatcgtggtcacgagggatatgtatatatatttgtgctaaagagccatcactgatagattatggatggtgggagaactagagcttatcatgcatagttatttaggcacaaatgaattaaataactattataacaaatgttgatgaagaaatattttataacaaattgtatcgtttagtagcttagaaaacatgctcacaataattttgctaccataatagtaggaattaaagaacgggccctaatatgcacgagcttgcctgaacctcccacacatgcatgtagaagtttttagatagtcggtacatctagcatttgtttcagtatatcaagttgcaaccaatctcacccccacgttcatatgcggccaattggttcaccataacacatacaaaagacagagtgaacgtagcccaacatattaggtttctagggatggaacctgcacatccaagttcaacattaaccacttagtatgagtgctctcaattacggctaattatttttagtgattacactggtggagaaaccctttgtagtcccggttcgtaacccccctttagtcccggtttccaaaccgggagtaccaatccgggactaaagatcgctatctttagtcccgggtgaaataaccgggactaaagatagagctgaccttttttttttgcatgcccctgttgctgcatggtttacatatatatatatatatatatatatatatatatatatacatatatatatatatatatacatatatatatacatatatatacatatatatacatatatatatatacatatatatacatatatatatacatatatatacatatatatatacatatatatgtatacatacatatatatatatatatgtacatatatatatgtatacatacatatatatgtatacatacatatatatatatatatatatatatatatatatatatatacatatataaaccatgcatatatatgtttcaatacatatatatgcatacatatatatatgtatttatacatatatatgttatgcaaatgcatatgtatatagatatatatatgaacaaaatatatttacattatagaaaatgtgtacacatgcatatagaaacatatgtagtcatgtattaattacaatccattatatgtcctagctagctatgatttcgacgtagtagtactcgctgctagctcagaagctaaggaccggtgaattgtgtttccgtcgtagtagaattcacccttgggatcaaggatttcttcgttgatgaatcccatgagttgttcttgaaccgccgcgataaattccttgtgtgtggtcaggttatccctcatgcgaataaactatatgaatgtatgaaattgattagtaattaaacaagaaatcgctacgtaatgaaattttgaatttatttgtacgtacatcgagctctcttgtggtgatgatttggtctgcaaggcagtggcaatactcgcacacgtaatagccgcacaagttagttccctgcttttgctttgcgcactacaaataaatgacaaacaacgagagatctaattaatatacacttgtatgtatttgaatcggagaaatataaatgtagagcatgtgtactcacaggaaatttgaacttccgcctaagtctttctctccatttgccgcggaccaaatgacggaaccgataccaagccctacatggagtttaaagctatgattcgtagtagcaattaacataacaagattttcttaattaacaaaggaacttatgacggtacctgtctataagttcgaaaaccttgtcaaacgtagactcttttttatccattgagtcatatacgttgatggtgcaggcctccaggtcgatgagtaaaagcacccagtggaatctgcaatgtgcgtgggatgcattacatatgaaacacttagcaagttcgtacgggaatgaaatttggtatgtaggaagacagtaaaattaaactaactctgtgttgtatggcaacagtttgaacgtcttgtaatgctgcgccttcaggagatggacgagattgtcctctgtttcttgtggatattggtcgagcattgcgacgtttactttccgagggtcgatgaatccagtatcgaaaaccctccgccgtcgggccctttgaatctccattctacaacgataaaagggagtatattattttctatggtctacttatatacaaggacctaattaattaaaggagacgtatagtaagaaatctaactgaacgatatacttacaaaatccagcaactcataatagagacgtcgagggtgtccagctggtatagttcgtagattcccctgaaattgatccagagaatgtcatctccttgcaagaagtccgtgtccctgatcctcgctccgatcatctctctaccggtggcgctcatctccatgtacagctgatggaacttgtacatttgtgtgggtagggactgcagcagctcaggcttgacaagcggtttaccgagttcatacatgtatttcacttccgccttttcgattggtgcgactcctagcaattgatccgtagttagaccggtgtcagtaataaattgttctatcgtcatttctttaccggtcaccaacggctcgatctcctggtttggttgccctccaagttgagggactggtttggactttccagaagatgctttcttcagcgttcgctcatagtccgatagcttgatggcctccttgacagatgcagacatacccctgaagaagttcctgacactggggtctataggaatcttcttttctggacttcgaggcttgaattgtctcttgacttctgatgcaacgtaagcgtcaagctcctcttgcgtgtaatcgtaccccgggtccttgttcttggcggcgtcaactttcgccttctttgttgcccttgtgtgggcaagcggtggagctgggggggcccttgactttgaaggtgccggaagaggagcttgcgggggagtaggtgtaggagcacgaggaggagtcggtgcaggatcctgaggaggagtcgatgctggagcctgcggtggagacggtgctggcggagcatgaggaggagacggtgcaggatcctgaggaggagatggcggagccggaggagatggtgcacgagacgccgcttgtcgcccagggaggatgatgtaccgcctgcgccatagaataatggcatggcatgtgtctcgtagatgcgtctcaccgtctcctccagggtaatccagctcgaggtcctcgtacgcgccttcgaccaactcaacttcgaccttggagtatcctgctggaatcggcctgcagtggtaagtacctgaagggtccgttgggatggccatgcccgacgccaccttcatgttgtgagagattatttattagtaatcaacatatataagcagcaactagcggaatggctaaatcttaccttcattgataagttcttgaaaggaatatgcagctcacatggtgtccgctgagtgatgtcatcaacgggacaggtcgattcgtcctgtgtttgcatggcgtccatgctctgtgatcctacctgccccgttgaggcgcagctgctacggtttcctgacgggctcaccattgcaggaggaatggtcggctggggatcatgggaccgatgtgcggccatgtgttcatcaaccttccttgccacctcctcttgcatgttgagttcgtagctcgatacccggaactctaggtctgcaatcttcgcctcggtatctctcttgctcctcatccgactcctgtacgtgtggatgtcctccttgaaaccaatcttccaaggaatcacccctttccctcgagttcgtcctggatgctctggagtctgcagggcgagtgtcagctcgtccctatctctgtctggttggaacgtgccctgagaggaggcttccactgcatctgttagtcgtcgcgcagcctcttgtatctgatagccgaagaccagtgagccatcagctgggttgagcgttccaccgtgagcatagtaccagaacttcgatcgttccggccaattggctgttgccggttcgatacccctctcaatcaagctagcctccatctgctcccacttcggcatcgcgacgctatagcctcctgaccccaagtggtgatggtacttcttcttggcggcattttctttgtttctttccatcatcgccttcccttgttcacctgtcttatatgcaacgaactcgtcctagtgatcccttagctttgggaatgtgtcgaagttcggtgtctgccccttcagtatatacttctggtacagatctcccttgaagctctgaaactgttctgccattttcttcagagtccaccttttcactttgtcctctgtacccgcaggaagggtgaatgtctcgagcattgtggtccacagcatctctttctccgaatctgggacaaagctctcatgatctccgcgtgcccttgttcttcgccagtacaccgtactgacaggcacgttatcccgcacaacccaaccgctgtgacgtacatagttcttggcggcttcggccggggcactaggacgtccatcttcttccacttccgttatgatgtgccgaccctcaagcttcttcgctgcacctcgttgcccgcgtgccctcttctgtccaacggagggttgactaccactagcctcctcctcctggttcccctccacatccctttccacgtgcccctgctggttcccctccgcatccctctccacgttcccttcctcgttcaagtactggtttggatcctcgttcccctcttcttcattccagtactggctgcttccctccgcgattgtatcgtacaatatctgttcctcatcgcggtcagccatctgttgatacaagaaacatctgctaagtcacgagacatttatgttttaacaatctaagtcatgtatgctaagtgtaaatgtcgtacattagaaccctacacaaccttacgtgctaagtctaattacaaatcgtgatataagctaagtctatgtgacgtatattatacaaccctagctagtaaataattatatactaaatctaattacaaataaaataatcttatattaaaactcaaataatattacatgctaagactaaaatagtcatgtatatgctaagtgtttcgtgcgtatatgctaagtctaattaagactacaatagtcaattgctacttgtcgcaccaattccgtagtcaataattacataccaagtctaattacaaataaagtaatattatattaaaactcaaataatattacatgctaagactaaaatagtaatgtatgctaagtgtttcgtgcgtatatgctaagtctaattaagactacaatagtcaattgctaggagtcgcaccaattccgtagtcaataatgtcatactaagtctaatttgcaataaaataatcttatattaaaactcaaataatattagaacactacacaatcttatatgataagtctaattacaggtctaataatcttaattaattgcattacaaatataacaatcatttatattattacgtcacttgcctgctccaattccttctagggctagctcttccactcaggcttgacggacgactccgacaacacgtcttttctgcaagatacaaaaaaatgtattaggataaatgcgaagtaacatatatatatacatacatatatacatatatatacatatatatatacatatatatatatatacatatatatatatatatatatatatatatatatatatatatatatatatatatatatatattgcatttcacgttaacgttcgtcctctttcgttcgctcgttcaagttccctagctcgttcacgttcgttcgctcgttctcattcacgttcgttcgtttgttctcattcacgttcgttccctcgttcttgcttgtcttcgttcgatcgttctcgttctcgctctcgttcgttcgatcgttctcgttctcgttcacgttgtcgcggcaacgtacgttgacgtgttcgttctcgctctcgttcgttcgatcgttctcgttctcgttcgttaacggcggtgtggcggcattggggcggcggttggcgcggcggcgtggcgacggcggcggcggcgtggcgttgtggggccgtggcggcggtggcgtggcgtggcgtggcggcggcggcgtggctggcggcggcggcattgcgcgcgcggcggcgaaggcggcggcggcgtggcgacggcggcggcggcgtggcgttggcatgcggcggcggcgttgcgcggcgtcgaaggcggcggcgtggcgtgtcgtcgtcgtggcgcggcgtctcgtggcgggcggcgcgacggagagagatcgagatcggagagatcgagctgcatgaagggagatctggcggcggcggctctcaccccagagatgcagcggcagcggaggaggcggaggcggcggcgaggacgacgagctcgagacgacggcgagatacggcggcgtcggcgcggggatttgccctaggcagtggcggcgaaggagagaggccgagagagatcgatcggccgaaaacgtttaagtgttggtgaagaagacgagggcgcaccgggaatatatatacccctggatctttactcccggttgttctcaacaaccgggactaaagatatctttagtcccggttgttctcaacaaccgggagtaaatatcttttcccgctatttcgaaattctttttaaacccggttagggttaagaaccgggactaaagattatagcactgcatatgattttcgcttacatatgtgtttataaaatagaagttaatgcattaacattatttaaagtacaaagattaatgacaattacttcgaaaaattatttttggctgtaataaattaagtggataaatcgtaataagcaaatatatgacttataattaataaaaattccaatatatatatattcttagcatatatatgaatgatattattatattggtaaaaactctaattaagatattaatgtacatactgcatgatttaaaattaataaaaattgtaatcatcatatgtacttagcgtaggaattatattaaattaaatgctaaaaactctaattcatatatgtaaatgccacatgcatgatttaaaccttttaaaaattcgaatagtcatatataagtagcatatgaaagatagtaaattaaattgtgaaaaactctaatatatgaatgatagttttaaaaatatattaaatttaatacttttaaaaattctccagtcaattataattagcatatgaatgatagtaaattaaatgttaaaaactctaattaacatatgaaattgccacttgcgtgatttaaaacttttaaaaatcctctagtcaattataattagcatatgaatgctagtaaattaaatgttaaaaactctaattaacatacatatgaaattgccacctgtgtgatttaaaacttttaaaaattgtaagtatcacatataactaacatatacatgatttaaacttgttgaaacctctaataatcgtgcgtaattaacaaatgccatacatcaattgatttatatggataatcaatacatccaaaatagtttacatcgtgtacacaataattacggcattacatcggcggtgacggttgaccgcacgtactttctcctcactattgttccctccttgtgatcgctgcgtgagtaaggggtgtcttcatttgataggaggatgctagggtcaatcgtcaccgtgaaagggggttgcccatccaactgatcgtaatcctcgtcagtcttgtcctcaactccgacgatttttcttttgcctgggagaaccacttgacgcttaggctcatcaggccctctgcccttctttcctttgctagacatgtccttcacgaaaaagacttgcgttacatcattggcaaggacaaaaggttcgtccgaagtatccaacctgttaaggtcaacagttgtcatcccactgtcatcaatcattacgcctccaccagttcacctaacccattgggcccgggacaaaagaacctttgagaggcccatagtcaagttcccatatgtcctcgatggcaccgtaaacgtggaagttgttccatcgtgtcccatggcatcgacacgaacagcgctgttttggttcgtgctcttcatgtcttgggctctcgtgtagaatgtgtacccattgatctcatatccctggaatgtcgcgatagacccagacggtcccctcgccaggaaggcaagttgttggttgatcgactcgttacccatgagatgttgtcgtagccacgcggggaaagtatcaatgtgatgccgtgtaatccatgcatcggacttaccgatgttcctggcgcgaactagagccaagtgctcctcgatgtaaggagttaccaatgaagagtgttgcagaacagtgaaatgggctttacggaataaattgttgtctaccgtcattattgctttccttccgagagttccctttccccgtagtctcccttcatggcgtgattcaggtaccccgattgggcgaaggtcttcgataaattctacgcaaaattcgatgacctcctctgttccataacccttggcgatgcttgcctctggacgagcacggttacgaacatacttcttcagaacgcccatgtacctctcgaaaggaaacatgttgtgtaggtacataggcccgagaatacggatctctttcacaaggtgacaaagcagatgcgtcattatattgaaaaatgaaggtggaaatatcaactcaaaactgacgagatattgcaccacttcattctgaagggcttctaatctatccggatcgatgaccttctgcgaaattgcgttcatgaatgcacatagctttgttattgttgcccggacattgtctggaaggatactccttattacaactggtagcagttgtgtcatcaacacgtgacagtcatgagactttaggtttgtgaacttcttctgcttcgtgcttattattcgcttgatattcgtggagtatccagacggtacctttatgctctccaagcattcaaacatactttccttctctgccttgctaagagtgtagctggctggactcaagtaatggcttcctttctcctttggttccgggtgaaggtcgccgcgttgttccatatgcttcagatcattacgtgcttccagtgtatctttcgactttccgtatacacctaggaagccaagaaggtttacgcaaaggttcttagtgaggtgcatcacgtcgattgcgtggcgtacgtccaagaattcccaatatggtaactcccaaaatatagagttctttttccacatcgccgcatgaccatcttcgctctctatatgctggcttccaggcccctttccgaacactactttaagatctttaaccatagcaaacactgttttcccgctgcgatgtttaggcttcgtacggtggtcggccttatgttcgaagtgcttgcctttcttccgtaccgggtggtttgctgcaaggaatcgatgatgacccatgtatacaaccttcctacagtgcttaagatacgtactttctgtttcatccatacagtgagtgcaagccttgtaccccttgttggactgtccggataggttgtaagtgcaggccaatcgttgatggttacgaacagcagcgctcgtaggttaaactcctcctgtttgtcctcgtcccacacggggacacaatcattcttccacaactgtttaagatcttcgaccagtggtcttaggtacacgtcgatgtcgttaccaggttgctttgggccttgaataataatcggcatcattatgtacttcctcttcatgcatagccaggggggaggttgtacatacacatcgtaacgggccaagggctatggccgctgctcatttctccaaaaggattcatgccatccgtactcaaaccaaaccgtatgtttcgtgcgtcctttccaaattctttaaattttctgtcgatgtttcgccactgcgaaccatcggcggggtgtctcagcatcccgtcctgttgacgctcttcagcgtgccatcgcaacattctagcattccccttgttcctgaacaaacgccttagccgtggtattatagggaaataccacatcaccttagcaggaattctcttctttgttagctgcccgtcaacttctcctggatcgtcccgtctaatcttgtatcgtagtgctttgcaaacagggcatgcttctaggttctcatactcctcaccgcgatataggatacaatcgttcggacatgcgtgaatcttatgaacttccagtcctaacgggcagactatcttcttagcctcgtacgttgtctcgggcaatttgtttccccccggaagaatgttcttgacgagtttcaataaatcgccaaatgccttgtcactaaccccattttttgccttccattgcaacaactccagagtggtatccaactttttgtgcccctgctcgcaacctgggtacaacgaagttctgtggtcctccaacatcttgtccaatttatgggcctccttttcactttcgcagtcttccctggcgtcctgcaacatctgaccaagatcatccgcaacgtcgttaccatcagcagctatttcctcctcgcccgtttgatttccttcaaatccaacatactgagcaaagtccggaatattgtcgtcttccacttcatcttcttccatttcaacaccttgctctccgtgggatgtccaacaattatagcttggcatgaaccccgactcaaacaagtggaaatgaatagtcctggatgcagaatactccttctgattcttacacttattgcatggacaacaaataaaacctctttgcctgttagcttcggccactctcaaaaaatagtgcacgccgtcaataaactctttggaccgccggtcagcgtacatccattgccgatccatctacatgagtcaaaaaaaccgcacacaaataattattcttacaataatgacagtcatacaataattataagatatctttattcatacaaaaatcataaaatattacaccaaataattcttaaaaactatttgtaaagttttaaactaattttaatgtgttttacttcttttaatttttattttagtttgttttctattatttaatattaactttcactagagttttccttctcaactattttataaaaccttgtttaacaaatgaactaaatttctatatattctttcttccccacacacattttctctctcatcaacttacaactaaattttggagacaaaaaaagtgtgcaaaacataggtgcaaatgtagtatgacaaaaaaaacattggaggatgaattgcaaaccttttaggcacctccgatttgtatgtaatcaccaaaataaattcaatagaaattttggcatgacctcccctcttttttgaagaaattttgaagcttgctcgggcagctggaggaggaagaagacatatatataggggtgggactttagtcccggttggtagcaccaaccggggctaaagatcaccgggatcattagtcccggttggtattaccaaccgggactaaagttaagatctttagtcctggttggtgctaccaaccgggactaaagatcccgggggggcctgacaggtcctgacagcattcgaaccgggactaaagatagtcccggttggtaacacaaaccgggactaaagatcaaatatgcccgttaccttttgaaccgggactaaagatcatctttagccccggtttttattgcatccgggactattgtggaaatcggccgaccgacgaaagatggtttctccaccagtgttagcaatatactcgtcgacagtaagttgtccgtgatgattttatcaatcccaaaagatgtcggttcagtcattaggttatcataccgcttgtgtttgtagtattgtgtgtttataacaaaaaggatgcatgcaaaaggctagtccaggtcaagaaagactgatatatagaaaatgaggcagcttgatgtatatatgcgtgcatgccacacacacacacatatatatataggcaacaagtctaaatttaagtatttttccgagtcaaagtagactagctacgcgggtagaaaacgactcctgcagccaagattagtatatatagtagtatgtatagaagtacgtagaattggttcttcgtcgtagatgaatgcagcagcatacacagcttcctggaaacaacaatctttaaacggcgatcgaagtcaccaccggcaacggctgttttaccaccgtcgtcgcacgctagctagcttagctgcgtgccggccggtcaccgttgttggctttaatttctgatcggttggtttagtttgtgagtggatggtcggtgggacccatcgaccggcaatctaggatctattcggaagagcttctgacaactatactttatcttagaactagaaattcccctaaacaatacatttttttcacatttaaaaagttatatacaagctgataaaaaccctattttttcggattttgatcagaaactaactaacagctactcccttcatccctaaatataagggattatgggtatgtgatatattccaagactatggatctgacatttgtccatcctaagatatctgtccagatttatagtcttaggatatgtcacaatcacctataatctcttatattttggtagggaggcgggagtatttctcaaagtcttaaattccctaaaacaagtctctaatgacagtgtgcagtgtgggtgggtcccatgtcgatcggtcggccatgtgcctgcctgcctgcctagctaaaattaagagccgtactcccgcgttactgaacagtacacacgcacgcgcgtggacacgagattatatttgagatggagtatatatatctagctagctatagtttgcatgtatgaatgtatgggccatatgcgatgcaatgaaatgcaacttggtagagagggtagcgatcgaatatccaccaccgtcacggcgcattaatttgcttaagttggctgttcggcccgtgcatatgggtgtactcgttttcgatcgatctctcaaattttaagatgtttctagtggaactatgatctattgcctcttacatctcgctcttttgtgcatgccgaatggctaaaaaatttagttggttcggaacagatgattagcttagatttttgaaagcatgtaaaataagatatccctccgtcgcaaaatatagcaacctttactggataggacacatcctagtacaataaatctagacatactcatgtctagattctttgcacttgtcccatccagtataagattgctatattttaggacatagagagtaagttatttctatatggtaattagtcgagtattaattataataaatttagaaaaatatatttattaacttatatgtaaaaaacttttgcacgaaatgtatcacttaacagtttgggaaatgtattcatcaagaaattgtgatgtagtcgcttcaagtagctatttaaaacttacccttagttattagtgatcatcattcgagtgtgcaagcgaacaaatcgtataaaattataaacatgatttaagaaagtcttctcataaatacaatcatacaatgcgtttgcaagaatgacaccatttgaaaatccgtgaagctatagttatactatgtgtgtaggattttttttatataaaaaaacaactttttataggcaaattgctcataaagatcacagtacatactttgctttctcagccacatatcgatgctttgtgacaacaagatcaaaagggctaaaagataacaagataattggattcctacggcacgcaatgaagtacagtactacgcatcttggagatcgacttggagcgcaccatgcattgcatacacacacacacgctattgttcatcgatccatgaacagcaacctacaacaagtagcaaagcaaaagggcaccaacccaaaatggggcacacacatgcattaattgtcacgatgacctgtcacgtactgtcatgtggggcccacacactgctctgctagtacgtactagtacctacctgtcctcccacgtacgcgtgtacggcgatgacgtcagcggcccactgtcgttggagtccacgtggaccgtacacgcgtacgggtgctgtccggaatcacggtacggtgtacacgtattacgaccctatctcttctcactcttttgagagaaaattcaacgccgcatgcattacatgtgcttgctagcaataacaattactccctccgtttcaaaatatttgacgccgttaacttttttaaacatgtttgaccgttcgtcttattcaaaaattttaagtaattattaattattttcctatcatttgattcattattaaatacattcttatgtaggcatataattttacatatttcacaaaagtttttgaataagacaaacggtcaaacatgtggtaataagtcaacggtgttaaacattttgaaacggatgaagtattaagagtcaattactttgaccaatgtaattttctctccgttcttgcattagtcttagtcatgccggcctggttaaatatatcaccactcgtacatgtgtaagctcctcgagttgtgtcaatcgcacgaagcttcgtaataggttttgttttggtttgaagatagaactgtcgtatgatgctttctgaatttattcctgatcgatgacctacttatacgtactaaacgtgtgttaaaaggctgaacttaggttgcgttgttgtcctgagttgggaaccttctcctccggaaaaaaacaaaacaaatcattagcgcatgattaatcaagtatcaactaaaactaacttaaaaaatatattactatgattttttaaagcaacttttataaatattttttttaaaaaaatacacacgtttagccgtttaaaaagcgacgtacgcgtaaaagatgaggggtataagttggtaaagctaattaccaaacgagcaaccttaaaagtgtgcgggtatgcatgtgcacgtgcatgtaattgaaaaagaatagtatggaaatatactttgtgaaatataaaagtgtcctgtatatataattaaccacgcacgagtcaaacttgtgaattgtagacctatttgggatttaaaatttaacggtagttgttactactgctccactttggtgcatgcctggatcgcatatcatatctcatgctctccaatctttatcatatcttcccatgctttccttttttctttcttgatgaaaagaaaaagaaaagtgaaaaaaaaagatgatactactggattgttaggaccgtttggctcatctttccgtaccactagctactaccataccgtacctacgcgtacgaatactgcacggtggtcaagttgcagcatactataatatggtactattgcatgccacgaaagcgacccgtcggccacacgcaagaaagcacgacttttgatctcgatacatcaaaccatatatgcatatctttcggttgtcaccaagaacaacataactttaatttgacgacagctatatataaaaggaaaaaaaataattaatcttccttttagaatatgattatccttgagaaggtcgggacgggagagagtattttctaatataaaatttgatagtaccaggcacgaggtattttaaagtatcaaaatctttaattagtatataattttagtataagtatgttttcaaacactgtaaatttctttttaagataatggaatgaattatgatatttgcttcaaacaagcttcaatcgcttgttacaacggacgttctctcaacaaagataaactaaacaatttcaacaaattaatggagggcaaaagctaagactaatatatctaaaaaatatatttatctaagtatattataaatcttcatctgaaatgggtaaatatatgtataactatatatggactccaaattttagcatgcaacatgtaatagttccttgtaaattaattaacgtctaggatcaggagcaagaataggactagacgatcaattaattagctcggatgcatcatgcgtgagatatttcaaacacgggtgttattttaatggcgtactatgatcagttcgctgtttgtttttcaaaagctatctgctgaaaggcacgttgtgcttttctcctactcacatcccgatctttttgactcggagtctactagaatggactatgtcttgcgattaaattaactcacgaataaactaactgctaatctagacatcggaccttaattaaaaaggtgttgttagttatggtacggtcccgcttaattaaacgacgagtatgcatattttactgcaaacttcgatcaactagctgcttctagcgtgatatataccttaattttatgccgccttaactagttaactgtaattgtcttgtcaaattagcatattcttatgagatggtttagtttctagatactaaaaattatccataaatttcaataacttttggacagtccaaattatgttaagatctttgcttacactacagtaaccatcgttctcttctccctcaccgacatgtattccaaaatacatattccaaactatcaatattgttgggctaggtggcagctagctcaacgtattccaagtctttgatagctagcgccatatatctaagatgctctcaccttcaactaggggtggacaaaaagctcgggctcgtgagctcggctcgggcttggctcgagctcgtgaagctcggctcggctcgaagattaaacgagccgagcccgagctctctccacagctcgtttgcaaatcgagccgagcccgagctagctcgcaagccgcacagtaggctcgtcaagcctgtggaaaacatgagtacatgtcctgacctggcccattaacaagttgtttcagtctagcccatgagaaacagagaaccctaccctaccctaaccgctcgctgaccctccccattccccatcccacgcaggcgcaggcacgccgccgctcgcgcgcacgaatagcgtctggcggcgattggcgagaggagttgccgggccgccgcctccggctccctcccctgcgccgccggcccgccgtctccctccccagtccctagtcgcccctcggtgccgccggcccaccgcatccctcctctgtgcggctgcgccggctccggcctccctcccaagcgacacttgacgatcaacggctcgacgcttcgtgccgccgcggcaccgcctccctcccctacgttgcctctggcctccctccccagtgccgctcgagctcgacgtcccctgcgtcgccggccctacttgttgcttacatcgcaagccggctcgagccggctcaagcttttatacaagccaagccgagctgcactttttgctcgttccatttatcaagccgagccaagctaagcctgttcttgatcaagctttcacgagccgagccgagcttagctcggtttggctcgtttccacccctaccttcaaccactccgatttcccatactcacaatccagatccacccttatagcaatcccctaatctaattaaatggcaatcaagcatgcctgcatgtatactaagtgtcccttctatcttagccatataaacatatcgatattaaaagttgcttagggctgttcagattgatgttattttcaagcatactgttttttttacaaaattatataaaaaaacaagtgtctaaatttattttttttgttaaacttagataaatacataagaaatcatgctaaaattttgacaatattgacaacttgccaaattttcggtgttgccaaaatttcgtaaggtttattttggttacgacctgaatagccccttagtaaatttatagacctcaccaaattaacctctacatttgcgatattgagatgaactgacagccatgcacatacgaaacctatcaaccgcggaactgccaaatagtttttcgtaggtgaagtatttctggtgtttataacgacgctaattaaaattatggatgattcagtaaattgaaggcatcgatttgcgtggcgttgtatctcgatgccacaatattttacacggtgtttgtaccgtacgtgtgaagagctagctagcacgcgagaataatggtcgtcaaaagcttcgctttctacggtgccgtcctcttgttaatttcccctccagagtcttctagaagatctcctcgatcaatcgatcgattctttaatttctacacctgctaggtaggagtagctagcagctgcctttttttttaatttcttttttttctgaaaccaaatttatttttcctttctgctgacaacgatagcagagggcgattttttttggtcgtcaaatcgaattaattgtggttgggttaatttttaccagcgcgtataaatatacatcatctatacgtgtcttgccgtctctgtgccgtacgtaggtaatcgccgtgtttagttttcaaaatatttcttcaaactttcaacttttccatcatatcaaaactttcctatacacatatacttccaatttttttatcacatcgttttaatttcaaccaatctttcaattttagcgtgaactaaacatagtctatatgtacgtattctgtggcgtcgacgtcgagtgaaagcgtaggcggccatcgtcttctacaaaccgtgtagaatttaccttccgtcgacatctgctcgatcctttttccactgatgatggagacaccggctagctctcacagtctcactcttggtccattcacctgtgactgtgaagggacatgtaccgactgggctggaaaaattaatctagtgatgatggataactgtattttctcctttaatacatgctgcaaatgttgctataacattgttccaaattggagagatttctgcaagaaaggtattggcatcacaattcacacaagatctatcatagctagtcgaactgtaatggtcttatgctagtatgagtagaggacgtactcatggaatgtgagtgtacgtatcttccatataatcgaagagttttttttcttttttacggttttgctatttcacttttgacagattttggacttctatctttcgttttttttatccgtatatgatattgcatcaagatttatatttctataaatctaacttgcagttacactcagttacagagcacttgcactcacttacgatgtatatcaaaattagattttacaacaatattttttctctagattgacgatttttgatatatttgtctttttttttgttttatttcattcacaaagatatgcatctattagttaaaaatcctgtaagatttgaagctctccatcgaaagatttgataaaatagtcccaaaaaaatagggggctcctagctaacgcgtgctcgctgctagcgagcactcctcccctattaactacctctattaacactattagttaatatacttaattacctctattagttaatatacttaacactaatgatagtaattagaaaagattcgggagatttttttactaacagattaaaaaaattttatgttagatttgaaaattttcgatttaaattttaaaatttaaagttaaattttgaaaactttcaactcagaaatgaaaactttcaactcaagattcgaaaactttcaagtccagatttgaaaattttgaaaactttcaatttaagatttgaaaactttcaactcaagattctaaaactttcaagtccagatttgaaaattttgaaaactttcaaatcaagatttgaaaactttcaactcgagattcgaaaactttcaagtccagatttgaaaattttgaaaactttcaaatcgagatttgaaaactttcaactcgagatttaaaaactttctagtccagatttgaaaattttcaactcaaaatttaaaactttaaactcaaaacatgctaaagattaaaaaaataatcagaaaaaaaggaaaatgcgaaaaaaaatgggtaaagaaaaacaaaaaaaaagagtgggaggcgtgcgcgcgccggcgctgggccttatgggccggaaacgcgcgccgattagcaatcgcgcaaaaaataggaccgaggaaataataaatcgatctcgtattcgtttgggcgttaggagcattgggccacggcccacatagcccaacagagaagctcactgggcctctaacttccctctccaacgtcctcgccctctctcgntaagacgctaacgaccaaagcgtccgcgagtcgcgacagctcaaagccgcacgcaacgccaccactgctccgccgccgccgccacgcgccgccgcgattcctccccccgccgatcgaacgccacgcgcgcccgccgcggaaaccctagcctcctccttcgctcgcccgagcgccgtcggcgggaggaggattacttttggtcctgcgcgcgaatcgcggatcgcgattcgcgctagggtttcggccccgtgtgccccgacggccgcctggtccccgctacgccggcgacctcacgcggaatcgagaggtaaagtggtagtaggagaggaggatgagggtgcgacgggtcaggatacctcgtgttcgtcttcgatttgtgttttgcggaggtgtcgtgggaatcgccctagtggattaacttctggcgatttaaaattttgccgatttcttgggggtaacctagagattctggatggtgtcatgatagtttgactttgtgctgctgctgcctgtgtgtatgtgaattctaagccatggcatatcgtaatttactaccttagaattcggaggcttattgagattttaatcatgatctaatgaatcaagtatagtttttgtttagggtgcctgtgcagttgctgcaacagcatttgactttacaacattgtgccaagtccagtggctccacctctgacacttccatgtccactatcaaatctacaattttatatgcaaaatcatataccaaatagtccaatttctatcgtccccttcattctccaccgtcccatctacgtacaaaatcgtaaaccaagtggctataatatggaatcttgtaacttgtgaagttggtttattacttggaattgctaatcacatggtggagggatttctaagaaggggaacagacacttgctataaaaaaaagtgaaacttgaaaagtggaatttgatattgagatgattagcaatcaaaggaacgtcctcttgattagttgattgaatgtgcagtagaagggtgccagtatggtggttttcgtgttggcatttgcttaaccttgtgatatcatgcatctcttacaggacagtagaaaaatctacacccaaaattctgaagatctccaagaactttgcagtctaacatcagtgccgaatatcagaaatggatcatgggcgttatgctccacagcatggatgggagaacaacagtgtaattgaagcctttccctttattagctaacaaggaatagcagatttgctggccatgtggttggccagcattgtgatgtaaagaatttgaagaagcggccattgcttaaatggaatgggttacatgcctgttctgtagacttacttgctgactcaacttctgttgaatctacaggcattggatgggtatggtgtcatcaatggcccagattataggtaagtcaataagctattgtgatggtatgttagattgttagcggttgtagtcatgcacatcttccattctattcgacttacttttgaagtgtgctcagctataatttattgggagtagttgcaatatttttttccattatgacatgttgtccactttaatgtgctctgtcatattaccatattttctacaattgactcaaattgcagggccggtggatcctacaatggtaggaggtttgtggatgatggcttcccaggagattcatatggaaggggggcattctatcaggacacacatgatagaaatgtgtatccacctgcaccctctgtccccatgttgtctcaacctcgaaggtttcatgatgatgaatattcaactgctagagat

SEQ ID NO: 24032 - DNA, 8368 bp, Oryza sativa
tggttggtttgttgccttgcttagctgcaaatgtggaactctacattcccctgacttgtagtaaactgtaatttttcgcgagttgttgaaggcattttaattcgaactgacacttttacacttgcaagtgtaactgcaagctactaaaatggtagtagaatctaggggctgtaattcaagttacctttgagcccagcttatcttaaggttgtttctggtgcaatactctgatatttgctagaatgatagatgcagttaggaaaataatgcagcatattgttgtttagttctactgaataggtatgctatgtggtttctgtcacattcacacatcagtagttcacttggtggtgccttaagtgaagcgcttatgattcacgctgatgtgttgcagtttgtgttcaacatcaactgaatattgggtaggaattaatgtatgtgctccatttgccacaggatttcaagtctgccactctctaggaggaggaactggttctggtatgggtaccctgctcatctcaaagatcagggaggagtacccggacaggatgatgttgacattctcagttttcccctcaccaaaggtttctgataccgtggtggaaccttacaatgccacactatctgtccatcagcttgttgagaatgccgatgagtgcatggtacttgacaatgaagctctatatgacatctgcttccgcactctgaagctcgccacacccactgtaagtgaaaacatgccataattatggtactgtgctcagttatcgtactctgctctatgtggttattgatcattgatttcatcctggtacatcagagcagtttataatcagtcacctttatgtcagatgccactaccaatttactcttttgtgaagtacggagtataatgaattagctggtccatgttccccattgttgtgtgtttcatgcatcctggcactacttgatcaattaatgagtatgtctggaacttgcattcgaatacactgatactgaatatatagatgataagtctgtactacatgtatggggtctacagtgttgatatgaatatgggtttcttcatgctgttttacctaattctgactctgctttgtttctttccttttgcagttggtgatctgaaccatcttatttctgcaaccatgagtggtgttacatgctgcctgcgcttcccgggacagctgaactctgacctccgcaagctggcggttaacttgatccccttccctcgtctccatttcttcatggtcggctttgcaccgctgacctcgaggggatcccagcagtaccgcgccctcactgtcccggagctgacccagcagatgtgggacgccaagaacatgatgtgcgccgccgaccccaggcacggacgctacctcacggcgtcagccatgttccgcgggaaatgagcaccaaggaggtggacgagcagatgctcaacgtccagaacaagaactcgtcctacttcgtggagtggatcccgaacaacgtgaagtcgagcgtgtgcgacatccctcccaacggcctgaagatggcgtccaccttcatcggcaactcgacgtcgatccaggagatgttccgccgcgtgagcgagcagttcacggccatgttcaggaggaaggccttcttgcactggtacaccggggaggggatggacgagatggagttcaccgaggccgagagcaacatgaacgacctggtggccgagtaccagcagtaccaggacgcgacagccgacgacgaggaagaggactacggcgacgaggaggaagacgaggttgctgcctaagccacctacctgcctgccattcctctcgctctcgtcatccatcgtagatgatgattgagatgtgctcccttgtgttattattacctagtactgtattgcaactgtcgatctgggtcgtaagatgtttattttaggtgatttgatgctctagttactcttttttttccttgtgttgattaatggtgtgttgtcgatgcgaattgtgatactagctttaactgtggacttaaattactagatcctggaattgatactgtttgccagtaatatcgtgtgttgcgtgatcattattttttccactacgaatacactgcgatgtcattagtgggcgtgtgctaggatgtaaacgtggatgcagttgttctaagcctccgtggtttgcttgttatctatcttatacagccaaaatttgaaatctggaacttaattttaagttaattttggggttcattcatctttcatttcccatatcgacttttaaaatacaatggcatgtgtatataagttgtgcccataaattactttggggtgcttagttcatttcccacggctgatgagccgtagatggaacaatcagagctgcaacttttgtagtattcgttttctgagccctaaatagctataatacttatacttgtttggtttgttttatagataatggaatttatttgagacaaatcggagtcagtaatggactttttcaaattttttggattcaagaattgtatcgatgtcccattcgaacaggcatcaaagtcgttgtagtatagtggtgagtattcccgcctgtcacgcaggtgtgacccgggttcgatccccggcaacggcgtttccattttttttaatatgaacgcgtctagtccgaatcgaattttggtcgggtacatatattttttacaccgatcgattcataccaacgatcgatcctacattgacaagttccaatgttgcgttgctccggcgaatcagatcatcgtcgactaatggccggtaccggcggcggcaaccagcagcgtcaacgacagtatggacggctacctgcttagtagtgtagtgttctggaaaaacattccaaatggtaacaatttttttgccaatgccaacaaagattagcttcaaacaaaatggtgccaaattttggtatggttgagaatggaaacaaaccaaattttggtatggttgagaaatatcacaaacatcgatatttaatagtcatacgacaagagctctcaataatttaaaatttaatcatactatatgccaggatcaagtctgctcaacacaagcacaatcaagtgatgcagggacaaataccacgagtaaaacattactacatcgacattacaacaaaaattggcaatacagctcaagacatctccctgaatcttgccatagccttcttctggatgatggttttgtagctatcaccagcttgcgcctccagcgacgggtcagaagatttccgctgctgacttccaagtccagccctcacatcgacagatttagcctgcactggttccttgatgccactaccagtttttccgagaccctgaatatttgcgaaggaatagcaagcaaaagagattgccaatgtatactcaagtcagagaatattcgatttacacagcttccagactgaggaaatattggcaaattgattcttctgcagtcacagttaacttctcttgtctcacaaactactcaagcctactggagctattttccctcaagcattagtgatcagtaatttccacatttattctagccttacgaggtagagccaacaaacacaagtaaatcacaagaaatgatagtttatgggtcaaacaagatgataatataatccactaaatttccttgcgaggaagcctaccagcgagattcgacaatcaataagtcaatacattagctttacccataacagataaagatttgctcaactcagtcacaagtgcaggaaataaaattctacagcctatataatgcaacggcaagcccaatataaaaaacaatgagtggctggacaaacaaaaacggacaccagaaagaattattcaaatacaggcagcagcaaggaaagccatcaaagagtaataaacaaaattagttatagaacgtaccagtccttcttgccaacccatattgcgcagaatacgattgcccacattgctctcatctattgctctatcagcagtgataacctcataattttcagtattgccaatttcaccgctagaacgttcacccacccctggaggaaatggcattgaccccatctcacttggaccccttcgagggtactcaccagcttgacaaggaatatccagataattaatacaagtcgatcaagctatataaagagaaatagccttttattgtgccccctccgattgtgaatacctagttctactacaagtttacaactttatcaatttacgtatatttgtaatctaatgtttccttaaggtcatgccaaaaaatactccactcaactctacccatatcactgcgttttactatcttttagtttgcatgcttgtggtgttattgggagtctctggtcttattttattcaattcatgatgtgctttggtcaaagtgacaagtatctatgagtatattttacaagctaaatagaaagtactgtaatgacaaaaaaagctatgctgtggatggatagtaaactcttgtgctaaacaaatgaggctagaaaataatgtctgtgagagcattcttacttggatccagtccatcattatcacttccaagtgaagaagatgatccatatagatttcgcctttctgcagcccgatctctgtactgtgaatgtcctggagcctcagaaaaccgacgtttaccactccctgaaactccagatggagtataagatgctagagcagataattctgttttgaagggagcagaagtaggtgccccagcatttgctgttaacccacatgtgcttgttggtatgttggagaaagaatcagcaccaccagcatcagatggcgcatgaaatgcagtgtctgatctgactattcctctaccagagcctcttatgacacccataatggtagttcctaaactgttactgacaggtgtaggctttatatcagaatctatcatttctgtgggtgcagctgttcgtccaagagaattatagctagcaggcgagttcatgtccttagcatttccaacatcagatttaggcttagctttcactgcaaatccagttgaattgtgtaaattgtttaatttatcatcagcagagttggatggttccttgtcatcaaggatagcacgccctgcctggccttcttgatttctttgtttccacattgctaggacattattcatctttttcttattcgccaaaagactaccttttgatgccaacttgatctcttttgctctctccttttctttcttttctgcagccagcgctgcacttgcagcagcttgaacagcttcaggtaatgaagttttctcactttgtttaatcgtggctgcaggtgcagaaatcactacatttttaccactactttctgaggtcttcgtgctagtatttgccatgtccccagctgctttactgctgttctgttcactacaagggacatactgttgagtttgttgatcatatgaataccacactccagcattaccatcatagtaaagtcctgaaaacaaatacaaggttataaactgtaatactttaacaattgacatggagcaaacatttttttttaaaaaaaaggaaaattggaaaacatttcaaaaacaagtcacatggaaagtatttctgaattgatcatagtaagaaaattgtggcaatatacataccggtatttccatcataatagaatcctgaggctgaatcatagtaataaccagacttttcatcccaaacaaatccagactgtggagcagagccactgctctgaggttccgagttgctattcagtttgtcatcaggattgtactcttttggggcccaacctatagcatcatactggtccaaagggtaaaagaaataaaataataagcatcatgtctataatctgcataaattgtatgtgaaaaacaattgcaccttaccctacagggtgagaaattattggttttagtgcatcatttaatggagttacataacagcagttctcattttcttcaatgcactgtttactttcctgtgcacatggtgacaaattacaagtaggggctacaactgacctgctgagaaaatgatgcagcctcaatggcagctgcagcaaggctgtttgactgtgaagcccctgataccggtccatgtgtgcttttagcataagttacacgtaaaacctgaccattcttctcaagtgtaatcccattcgtagcttcaagagcttttgtagcttcttccacctaacacaattggatgcagataaatatgggagtagacatcaaaggaaaactcaacatttttcccaccactacttactgaatgaaaatggatgaaagcaaaacctctggacacatgagtaaacttatcccgaacaaggcgaatgtcctgcacaacaacagcatgtcattctctcaacagaaacggaacactgcaaatttcaagagtcataagcttcttcccacctttataggtgcatgcttggcaaattcatatcgaagcatttcctcgtcagcattttcatccagaccacgaacaactaaaacatgagttggacctgaaaatgctagtgtctaataaggcaactggcaaaatagttttaataatcctacaatagaagaacagagctttgcctagttcagatcccctttttggatggagtggagtagaacttgttggatcagctggtagagaatcttccgttcgtggttcattacactacaagaatagaatgcaattaggcaaaaaaaaatcaagagcttaaataaacaaacatacaatcagttagaaagaaatgttattcccctgatgcctttataattgtcatcttggtccttggagatagacaaagtagttttcatgacaaattcactaatggcattttccatgtgacacatcttattattttgtttatatttatactagtggctaatgatccaaacatcatgagttaatccaaaagcttacagtttatgcaattatgacactacttaatttgcaacttctcattaacaatagggatgtgaatcgaaagggaaaacagtactccatcaaggaaatcgaggacagagaaacaatccaagcatgctagattggatttataaacagaaatgacatcatgcaaacttctgtaagacaatactaaatgcaatgggtattgcgatgaagaacacgcctacaaaaataatttacaacaatacagagtaaaacatacctgaaaacatgaagttctgcgagcaaagttcatgcatccacatatagtacatatccaatcacatggcgcagcagcagtcctgtgcccatagttataccttgtaaaattttcttctccatgagaaggcccactcatcccactagttggtttactactgcagtaaacaagttgccagcagtaattacagtggaagaaaaagatataagtatatacttttgcaaaaggtaagatgcatgtaaattgttttttctcaatgtgtccttctgcaaaactaagcttgatgcaagtaatacacactagacaaagacatgaataacatccaaaagaaaggaacgagcaacttaacacactgtgaatctttaacacaccaatggtagattgactgttttgcatcgcaagcttatcacaatataaaaacatttacatgaccttagcaatatgctaccaaaataattagatatttttgtgccctatttggtcagtcatatgctatttggatcattgtattgctaatgcaatcacatagttcaattgaaaaaccttaagtgggaaaatagtgagcagtgaaacaacaaaaggcagagccacacgagaatttggtatatgaaagacatgctccagtgaaaaattactattacatgatgcacccagtttaaacagttcaaccattattgaaccatcgaatatgctgcaattgtgttgttcacacctcagtatcacgtaaagcagactactcaacaatgttacatacaagtaaactggtgaataaatatagacgacttcagctattataagaaaacaaaaagggcacgtacctgtactgaaaaaatacctttctaccatcaattagaaggccattgtctccaacaccttccatcattctgcgggcagcttcctgtagagtacaataaaatttctgagcatgacactacacgacggtctgaacaggtaaggtgatagatcttttacggttaataccacagtagggaagtcgataaaagcaaatccccgagacatgccagaagatcgttccttaattacgcgcacactacggagagggccccactcagcctaaaagatatcagactccaaatgattaaatcgaaccagacaatacacttgcaaccagtttaacagtttatgaagaggaacttgtacaagaatctggtttaggtcatcttcattagtcttctgggac

SEQ ID NO: 24033 - DNA, 606 bp, Oryza sativa
ttcctcccctgcgggatggtaggactagtcccgccattttttcatttcttcatggatgtcctggagttctatgacctccagatggcgcacctcacccccaatgcggtgatgacattgtccatcttcgcgcatctgtgcgagatgttcatcggggtgcgcccctctcttcagctgttccggtggttcttcaccgtgcagtcggtgtcaccgccgtcggtggttggcggctgctacttccagccgcgggggccggtgttgaaccgctacatcccctgcgcccttcgcaagaagtgggacgactggaagagcgactggttctacacccccctcgccaacgaagcgcgcctccgacttccaagccagcccccggcgcaggtctccagctggcggaaataaggatgatctgtgccgtggtctttttgcgtcttagcttgaaataagggcccgtacccaagtcccagtcctcgaaaagcgcgggtcggggctagtgcctggggagatccgcatgtcgagactggccaggccgggaacgtggtgaccgagggttatgggtgacccaattgtgggtttttgccgattcccccccgaagttcaccacgccccggg

SEQ ID NO: 24034 - DNA, 775 bp, Oryza sativa
tcatggccaacttcttttcccatgggcataaagagacaggcgcggagtcggctaatgaacctgccacccgcgtcggtccactcctgggaagatttgtgccaacagttcaccatgaacttccaaggcacatatccgcgcccaggcgaagaagcggacttgcatgcggtacagcgaggcgatgatgagtcgcttcgctcgtacattcagcggttttgccaagtccgcaatactatactgacggagctcgtggctcctcaccgggagaccgcgcaggcccccctttgccagttcggccgggggcttagggtgaaatctcaagctctcgctctccctctgtatctggaaagatcgtctgcccgcaagacacacgagacacggtgatgtatacaggttcgggccgctgcgaagcgtaataccctactcctgtgtttttgtggatttgtgtatgaatgagctccaaagtgtcagccaacttcttccccgttctaagctctaaatctggaaagaatcaaaacccctcctctatgggcaaggtcctccttttatacttcaaggggataccacatgcacctttctctttccaaactggactgttctttttctctttaatgggcggagatcggtacggtttccatccgggagcccttctgatgggacagcccacacctacccccacctcccccgaagacagagatgacgcgggaccgtggctggctgtcgatgacgcgaccagtgccagaccggtcattcttgtccaccacgcgtcagcctaaca

SEQ ID NO: 24035 - DNA, 6588 bp, Oryza sativa
ttttggcgtcccggaggcctcactaacaaagtagaccggccgcttcacctttccgcggggccgatcctcttcgctaggggccgtatctccagggcgctcttcatccgagaggcagcgcggggcgccctcggcttctgcgccgatatcctcggggtaagagggcgacaggcgcggccttcccgcagtggcccgaggctatcctgagggtcgggggcgcctgacaccgtcggacaagcaggcggagggccaactccggccgtcgggggccttgggccgccgttcggcttgggggcctctcggaccctgacttctccccgtgggtagcgctggaagagttcccttccggaaccgaggacggcgcacgcgcgcaggtccgggacgccgccgaccacatcgtccacagcttcgagggtatggcccctcggctcgcgttcgccctcgactccgacgaggagggcggcgacggtggtgcggacgacagcgacgacaaggctggtgacccgggcgcgtcggagtgagcccccaggcccccgccaatcttgaatagctttttctttcttcttccgaggccttcgggcccccttcttgtatagacttatttaatctgcaaccaaataaagaggaaatttctatgtcaattctatttgttgtgtgtatgagacgaggatggtctgtgccgcggtccttctgcgtcttggcttgatcaagggctcgtgcccaggtcctagtcctcaaatggctcgggtcggggctagtgcctggggagatccacatgtcgagactggccaggccgggagcgtggtgaccgagggttatgggtgacccgattgtgggtttttgccgattcccccccggagttcaccacgccccggggcacggctcggttctgggccccgtttggcgattttagccgacccgagcccccgaggacaggatcgagcacgagcgtgctaattcaagccaagattcttcaaaaggaaacaatggcacagacatcgtccttaggaaatcgaaaatgcttttattgaaatacggaagagaaaaaagataagcccccggccaaccctgcacgcccggggggggtgcggggttggcccgagcccaagacctgacacccgacccccactaggggtagaagcgacgagggtgttcgatgttccacgggttaggcagctctgtgccgtcacccgtggccagccgaacggagcccggccgggggacgccgatcactcgatacggaccctcccacattggtgagagcttgctcaatccagcacgcgtttggacgcggcgtaggacgaggtcgtcgacgtagagtgatcgggcccggacgtggcgctgatggtagcgccgcaggctctgctggtagcgcgcggcttggagggccgcgcgccgccttcgctcttccaagtagtcgaggtcaaggagcgccggccttctttctgtcgctcgcaggcctcccctttcgggtggccagcgaaacgccctcgacggcgaggacatgaccctcgtcgtcggaatgggccgacctcttcttcctcctcctgtcccgccgccctgtctgagcagcggatccgggggcggccgaagctgccactccgggaccggaggggttccaggtccatgcctcctcctttcgagccactcggtccgcaagctgaaaaagctccgcggtagtctggggctctttggaggcaatcttttcgagcatgcggttgtgccgcacaccccccctgaacgcgtagatcaccgcgtgtgcagggatgcatggtatggtgttgcggacttgacagaaccgctgaatatacgagcgaagcgactcatcatcgcctcgctgtaccgcatgcaagtccgcttcttcgcctgggcgcggatatgtgccttggaagttcatggtgaactgttggcacaaatcttcccaggagtggaccgacgcgggtggcaggttcattagccaaccccgcgcctgtccttttagggccatgggaaagaagttcgccatgaccctgtcgtcacccccagcggcctcgatcccggtcgtatagacctggagaaactcagtggggttgacgctcccatcgtacttctcggtgatggtgggccggaaccttgggggccaacggacattccgaagactcgccacaaaggctctacagccgacaccacccgccgggggcacggagggctggtcctcacgtccgtgtcgaggtgacactctggacgaggaagcgccctccgttgcgcggggagtacgccggctattacgccggcgctcgatgtcgaggcgggcatccggctctccatgctgatcctcccgagtcgaaggtgccgacgagggagtggcagccgaatggcgtgcaacagccgccgctcgccgcgccctccgccttgatgacacggagccggtggtagcggcgccggaggtcttggtggtggcggaccgtccaccagcacccaggcgctgctgtgccgtcatgaccaagttggccacgtcgtccagccatcgttgggctggagactccgggtcatggacgacgggcgggtgtcgtaggagcgcgccagcagcctgaagcgcgccctgaggcgtgctgccgtcgccgtagacgaggaggcgacgctccccatctcgccgttctcctgcatcacctgcgactggtgatgctacggatttgtcgaccctctcaagcgcctccccctgcttagggctttggtgcggaggaggtgggggagtacgagctcgacggcgtggattcggctccccgtcgtcgccgctcacactcggagagaggtcgtgcgcttttccttgctcggccattaggctgaacaagaaaaacttggcgcacacggaagagtctgagagctcagaaaacacacgctgagccccctacctggcgcgccagatgacggagctcgtggctcctcaccgggagaccgcgcaggcccccctttgccagttcggccgggggcttagggtgaaatctcaagctctcgctctccctctgtatctggaaagatcgtctgcccgcaagacacacgagacacggtgatgtatacaggttcgggccgctgcgaagcgtaataccctactcctgtgtttttgtggatttgtgtatgaatgagctccaaagtgtcagccaacttcttccccgttctaagctctaaatctggaaagaatcaaaacccctcctctatgggcaaggtcctccttttatacttcaaggggataccacatgcacctttctctttccaaactggactgttctttttctctttaatgggcggagatcggtacggtttccatccgggagcccttctgatgggacagcccacacctacccccacctcccccgaagacagagatgacgcgggaccgtggctgtctgtcgatgacgcgaccagtgccagaccggtcattcttgtccaccacgcgtcagcttaacaacgtgcatgtttgcccttcttcgtgtaacaccttgcctgtaatggttaggatgaagcctggtataaatctgaccagggctaacgtgccatctctaagagataacacgctagctccggcttgagacgagtgcctagaggctttcgtcttgacgggatggggcaaggcgtgcgtcagaccgccagtcgccacctaacccgtgatctgaccggtctgtgactggtcacagaccggataaaggaacgcgctgtactgcgttgcatgcagcgtgacacgcttgaccagactgcaataaatgctgttaggtgagcacagctgtgctcacttatcccatatatgtggcgcagacttccttaaggggtcggggtgcctcggccctcggggccggggcaagcgcaacccgaccccccccctcgggggaaatcaggaggagggcggacacctcaccctcgggcccgacgtccccgaagtgccaggccacgtgggcgattgcgtctgcctcaagcctctggtcatgatactcccggtcccatatcaccgacatataccatgcatccctgcacacgcggtgatctatgcgttcagggggggtgtgcggcacaaccgcatgcttgaaaagattgcctccaaaaagccccagactaccgcagagctttttcagctcgcggaccgagtggcttcgtaagggaggaggcctggacctgaaactcctccggttccggagtggccagcttcggccgcccccggatccgccgctcagacagggcggcgtgacaggaggaggaagaagaggccggaccgttccggcgacgagggtcatgtcctcgccgtcgagggcgctccgcgggccactcgaaaggggaggcctgcgagcgacaaaaagaacgaggctggtacacccagcagggagcgcctcgccggcagatggtgctctgtccacaacacctccctccacaatctcgcgaactgtcgtgcggtcaaaaacctggccgagcgaacgaggaaatgggaggaggacaggaggcaggaacgccgtgagggcaagtccccggcggttccttccggcaaacggcgaagtgaggccaagcagaaggcccccgctgttgacatcgatgatggtgatgatgacctaggtttccaagaacctggggccaccattgccaccgtcgatggaggagcatgtgctcacgtctctcgacggagcttcaaggctatgaagcgagagcttctggccatggcccctacccatgaggcgatgcgtcgggcgcggtggtcggaggttgctctcactttcgaccagaccgaccacccaccgtgcattgcccggggagggcaggttgcgatggtggtttcccccaccatctgcaacgtgaagttgggacgtgtcctcatagatggaggagcggctctcaacatcctttcccccgcggcctttgatgctatcaaggccccggggatggtgctccagccgtctcaaccgatcatcggtgtgacgccggggcacacgtggccattaggtcacatcgacctaccggtcaccttcggtggacccgccaacttccgcacggagcgggtgagcttcgatgtggcggacctcagtctgccctacaacgcggtcctagggagacccgcgttggtgaagttcatggcggcggtccactacgcctacctccagatgaagatgccgggccccggtggccccatctctgtctgtggcgaccttaaagtcgcgcttgcttgcatggagcagcgcgcggaccgcctcgctgctgcgtccaagcccgagggtggtgacgagaggcttggcccctctgcccccaccgccccgaggcagcggatggccacatgcgacgaggtcccggtcaaggaggttgccttgggcgacggcccatccaagaccacacggattggtggtcttctggatggcaaataggaagacgcgctcgtctccttcctgcgggcaaacgctgacgtcttcgcatggagaccagcggacatgcccggggtccccagggaggtgattgagcaccgtctcgccgtgcggccgggcgcaaggccggtccggcagaaagtgcggcggcaagccccggaacgtcaagccttcatccgcgaggaggtggctagacttttggaggccgggttcatccgtgaggtcatccatccggagtggctggcgaacccggtggtcgttcccaaggcgaacggcaagcttcggatgtgcatcgactacaccgaccttaacaaggcatgtcctaaggatccttaccccctgcctcgcatagatcagattgtcgactccactgcggggtgcgaccttttgtgttttctagatgcatattctggttaccatcagattcgcatggctaggaaggatgaggaaaaaactgcgttcattacccccgtaggaacctattgttatacatcaatgcccttcgggttaaagaatgcaggtcctacttttcagcgtactactcgaatttctttgggtagccaaataggacgtaatgttgaggcgtatgtcgatgacttggttgtaaaaacgcgcaaccaagagaccttactctcagatctagcggaaacttttgagaacctccgctccgcccgcataaaactgaaccccgataagtgcgtgtttggtgtacctgcgggcaagcttctcgggtttttggtctctgcccgaggcattgaggtcaaccccgagaagatacgagctatagagcggatccgcccccccagcaaacttagggatgtgcagtgcgtcactggttgcatggccgccctaagtcgtttcatatcaaggctgggagagaaggcgcttcccttgtttaagctcctcaagcgctcggggccgttcacttggacggaggaagctgaacatgcccttactaagttaaaggcatatctcagctctaaaccctaaaccctaaaccctaaacgctaatcccagtcctcgaaaagcgcgggtcggggctagtgcctggggagatccgcatgtcgagactggccaggccgggaacgtggtgaccgagggttatgggtgacccgattgtgggtttttcccgaatcccccccggaagttccccacgccccggggcccggttgggttttgggcccggtttggcgattttagctgaccgaaccgcgccccc

SEQ ID NO: 24036 - DNA, 3000 bp, Oryza sativa
gaacctgtatacatcaccgtgtctcgtgtgtcttgcgggcagacgatctttccagatacagagggagagcgagagcttgagatttcaccctaagcccccggccgaactggcaaaggggggcctgcgcggtctcccggtgagaagccacgagctccgtcatctggcgcggtcgtggaagaatggagacctgctggagacgcaagtcagcccctccgtcatcggcggcgctcgcccgcgccgtcgtggcccttaggggctctctcctctgaggccccgacccccatcataatggttagaatggaggcgcggtcgggatcgctgcagagggggaggatctcctgaggaatgcgagacacctccgcggagctaagattcagcaccctttggaccacgatcttgaagtcctcgggagcccaatcccatctggctccctggtgggtccgcatgtagtcttcaggcccagtgtactcccaggcgctccgggcgcgccgttggagcggcgcaatccggcggcggaggtaatcgccgtacaccatggccccggtgagcccctgggatcgcaggcccgccaggcggtcgaggacggcgtcgtagtcctcccccagatctaccggcgcccgccagctggagacctgcgccgggggctggcttggaagtcggaggcgcgcttcgttggcgaggggggtgtagaaccagtcgctcttccagtcgtcccacttcttgcgaagggcgcaggggatgtagcggttcaacaccggcccccgcggctggaagtagcagccgccaaccaccgacggcggtgacaccgactgcacggtgaagaaccaccggaacagctgaagagaggggcgcaccccgatgaacatctcgcacagatgcgcgaagatggccaatgtcatcaccgcattgggggtgaggtgcgccatctggaggtcatagaactccaggacatccatgaagaaatgagaaaatggcgggactagcccagccatcgcgaaggggaggaagaagatggaccgccccgggtagtctggtgccgggcgcccctcgcccagcatcactatctcccgaccggtggcggactccggcatgaagcggcgcggcagtccggcgtgcctctcattcacgatgcgggaaggcggtagtgcactgccgtcgagcagagcagagccccgtgccatggcggcggaggaagagatgattgagaacgagcgcgtgtggcgaaagtagggcgtagcagagaaagagttagagctcaggtggcgaaggcaagaggaacaatggcgaaaggaaggaagcaaatccttttctcgatgcttttatacccttgccatcgctgggcctgactcctcgtttctcgcgcccactacctcgctccctcgtatctcgctatctcgctccctcgtttcccgtgcccacgcttccactaatcccattcgcccgcttacggcgcattgagtggatatgcggttgtggcaatcgaaatggattgtatcgtgcgcgcgttaattacgctcgccgaccgaagcggcgttaccatatctccgggcgagacgaatctgctcacccagattcgcgcgctgctcaagtggtgtggcagtcttgaatagaccgcccattatggacaaccaaagttaccaataccaatgtgcatggattgagaccgttgggtattttgcccaactacggagaccggtcccacctgtcacagggtggcgtcacacctgaccgcttcccatgggaagggaaattgctctggcataacgccgggggctactgtcggtgatatgggaccgggagtatcatgactagaggcttaaggcagacacaatcgcccacgtggcctggcaccttcggggacgtcgggcccgagggtgaggtgtccgccctcctcctgatttcccccgagggggggggtcgggttgcgcttgccccggccccgagggccgaggcaccccgacccccttaaggaagtctgcgccacacatatgggataagtgagcacagctgtgctcacctaacagcatttattgcagtctggtcaagcgtgtcacgctgtatgcagcgcagtacggcgcgttcctttatccggtctgtgaccagtcacagaccggtcagatcacgggttaggtggcgactggcggtctgacgcacgccttgccccatcccgtcaagacgaaagcctctaggcaactcgtctcaagccggagctagcgtgttatctcttagagatggcacgttagccctggttagatttataccaggcttcatcctaaccattacaggcaaggtgttacacgaagaagggcaaacatgcatcttgttaaactgacacatggtggacaagaatgaccagtctgacactggtcgcgtcagcaacgggcagccacgatcccacgttgcgcccgtctccgccgggagtggaggtaggtgtgggctgtcccatcgaagtgtcattcggacggcgaccataccaatctccgtccataaagagaggaaaagtccagtttggaaagaagagggtgcatgtggtatccccttgaagtataaaaggaggaccttgcccatagagaagggggattgattctttccagatttagagcttagaacggggaagaagttggctcacactttggagctcattcatacacaaatccacaaaaacacaggagtagggtattacgcttcgcagcggcccgaacctgtatacatcaccgtgtctcgtgtgtcttgcgggcagacgatctttccagatacagagggagagcgagagcttgagatttcaccctaagcccccggccgaactggcaaaggggggcctgcgcggtctcccggtgaggagccacgagctccgtcatctggcgcggtcgtggaagaatggagacctgctggagacgcaagtcagcccctccgtcatcggcggcgctcgcccgcgccgtcgtggccttatagggctctctcctctgaggccccgacccccatcataatggttagaatgga

SEQ ID NO: 24037 - DNA, 4283 bp, Oryza sativa
ggaaattaaatatttaccatttttaaaatgtgccatttaataatttatcactcatatctacttattataaaaattgaatatgtttttgccaatactttgatacgccatccgtgtattagttagtttttaagttcatttgattttggaaatgcatattcatgtttgagtcgggttctaagtttgtcctttttggaaatatgcaacgaggcgcgcaagatatctctttaaaaactcacatactaacttgagatgatcggattcctagttgcaactcatgattttctatatatatatatccaagcaaattcctatagtgaatttcaccttaactaaatcgtataacaataataaaattaaaataatcttcaccaattgcaacgtacgtgcattttttctaagtattatgtgacatatgtgtcttcatgtatatatgatatttgggttaagtgatgccacatgtaaaagtgacagatagttaaatatctcatacttgtagccaggtgtcgaaaacaagatttatttgtgctttttttttccctatacctctgttcaatactccatctttccatcttaagatcacattttccgaacttgtaaaccgtgcatattacctattatttttaaaaaagtttataggaatttgcttttaaaaattatattaatctacctttcaatatttttagctattaattaattaattatgtgttaatgagtcgctttatttgacatacatctagggggagaaatcccatattctctagactaacacagctttaattggaaaaaaaaacacatatactccatctttgaaagaatgtacttttgaacttaatttttgtctcgcaaataccatatttttaaaagctactagtgtacatatcggagcaagaagcttctctagcggaaagacaatataccctttcttgagagttcaatcatgttgcaagttccaagctcatggtcgggcgcgtgagaaagaaagtgaagacatgtggcttatacaggttagggccactgagaaacataataccctactccaatgttcttgcgctatacataatgattaaatttacattggaagaggatgtacccttcttcacacagtcaatggttacgaatggtcaaatgttacgcgaaaaagttaatggtgtgttatctagagcggttgttagcgcagtggtagtgtgttatcttttttttcaagggaaatagtgtgttatctcttaggaagcaaaaggtttgaatcctcctacctacgcatgcttcggaatcctgatcaaatctaatggtctaaaatttaacaaattttcttcagaatttctgtcgagatgtatctagcaaaatgataaattaaaaatttataatggacaccaaaataaaaatgttgaatagcatattactggaggtagcaaatgtcaaccctcaaaatgaggaaagagcaaaaagaggaaaaggagcgccatatccacatccattacggattgcagtagcagcaaggcaaatttgcgtttctttctgttttaagcaaaaagagatgggaggtgcgtgtgctccccatgtgcgcaaccgcaaaaccctaggcccccaaacccctcggcgagatcccatccgtccatcgcctcatccgacggcccagacctcgccggccgttgtacttaacgcagccgcaatccacttctctcgtctcttctcttgtcacaacacaatactgcagtgcactgtaaaagaaaggaaagggaaggaagaaaaagcttttgttcatctgctcctttccccccctcaaatccctcccaaatcccaactaatcgcccgatttatcagcccattcctcgcgcaaatccgctccgttagcttctcgccggctattcaaccttggggccatcttttttggggttaaatttggtccagagttgaggctttttctttcgggaggagggatttgggtagcaatggcttgtccaatcgtggagatgtctcggttctagtcgccaaaaccatctagaatccactagtgttttgggaggtcgctgttgcgggagcagccgccgccttttgtgtgtgtggagtggagatggtgaccgagatggcgatgcgaggtgagccgtggcggcgccaggagggggagcaggcgcaggcggaggccgatcgggaacgcgagctggacctcttccgcagcggctccgcgccgcccacggtcgagggctccatgggcgcgctccacgccgccgccgccgccgacgtgttcctggaggacgagctccgggccgacccggcctaccactcctactactactccaacggcaacatcaaccctcgcctcccgccgccgctgctgtccaaggaggactggcgtccgcgcagcgccttcgccccggcttgggtgggatcgacgacgggaggaagcccagaggtggaggtggaggccgcggcggcggcggcgctggagggatgggtccaggggatggcctcattgggatgcccggtctcgagattggccgccagaatagcttctccggtatctttcaggtggtgcttcttctacactagaacaacttatcctatcttatttaactgccattgcattgcttgcacctaagctttcatgacttgattatgtcagtggttcacgcagtagatgtcgagtacaagcattggcataggagttttattacttttggttccttttttcgttcattcaagtagatgagttcgtttgagtcaatgttcatgtctaaattttttaccagggtatacgcttctctgctgcttttactgttacggagttagattggtttattgtgattgataactccaatagttgagttagattggtttattgtgactgataactccaatagttctccaccttcatagctactttgtatgataaaacctcaagttctggctgacgtttgctaggttttggcactataaaacgcctttctgtcgcaaaagtattggtcctgaaacttcgtaagttgtcgaccaatatgctatttgcagccaaaattgttgtgttactgccttgttgtttgttaccacattcttggatctgtacccattccctatgctatgtttgtctcggtcatctgagtaatgtgatctgtacatggttagggagatgctgaatttagcatgcatacacaaaattggtctagattccacggaagctgcataatattcaggaaatattttctgcagtatatttcgttacaagtagatggaaatggttctgagaaagcttcccttgccacacatgctagaatagtgcagtatgataattggccagcaaatgtcatatttatatcttcttctgtttttttttgcaataaagtttatatcattattgtattgatattcggtgcaacatgtattggttggcttctaaaactgctatctagggatgtggcatcgcatttcttgccaaatgcactgcatcatgattacaattattatcttacattgacatgtaggtcatttcccgtatacgtgtgcggattgtataaaatagggtagatcttaactctcaagggaatttaattactcttttcttcagttataattctattcaaggctaaagaaataacttctgacctatatatgatgcaggatgactcgtatcaacacgatacggatagacagggtgccaactgcaatggtacagacttgttgagttcttctaaagtgcagtatggtctacatcgtgagactggagctattagtggccttcactcagacagcaaagcaccatgcttgccagaaaaccagaatgaatcatcacactcatatgcatcaataataggatcatcactttcaagaagtgcatctccagatcctgaactagtgaggagagttcctagtccttgcctccccccaattggtgtgaaacttggtgctacagataagaagaataatgttggttcatcttctttcaattgtagttctcccaatattattgaatctgatgatttggtgtctgctctatctggtatgaacctgtcgtcatcaagagcaatgaacggaaacacaatggaccaatctaagctccatcaggatgtggatgatgttcgtaagttcctttttgatcagtacatggatcaaacaaatggcaatcagcgccattcctacatgaaacgttctgaacaaggacacgtgaaggttcctcaagaatattctggggcttctatgaatccttctgttatgagaagccagatcaatgctggtggtttcacatcatttaacaactcatcggtgggatctggctttgcttctcctaggcttgg

SEQ ID NO: 24038 - DNA, 5467 bp, Oryza sativa
ccactgtatgttcagttccttcgggcagcagaaattgctgcccttgcagctaactgtgaggatcctttgatggatagggctaatctaggaggttcttacatggatctatttggccctcagaaggcgtaccttagtccattgcttcagtcacagaagcaatatagttactacgggaatctcggggttggtcttggctatgctggtaactctttaacaagtcctattcttccctcgtcaccaggtggacctggtagtccacttaggcacggggatcgcagcatgcgctatccatctgggatgagaaattttggtggttcctttggctcctggaattcagatctcggtggtaagatggaggccaatttagttccatcacttctggaagaatttaagagcaacaaaagcaaatcatatgagctctctgaaatcgctggtcatgttgttgagttcaggtactccttctcagtggattaatatgtttctgtataacccactaaattttaaggatatgtggtagaatggggaaaattgaaatatatagaaaacccccataccatattggatagcgctaactttcatatattagttctagattggaggattcagtgattgcatgaaagatgtttaatattggtaactgcttcattccataattgttggaagagctatgtacacagatctctcatctttattggtctaatctttttttttttttggtttacattcagtgcggatcaatatggaagtagattcatacagcaaaagcttgaaacagccagcactgaagaaaaagacatggtttttgctgaaatcatgcctcaggctctcacattgatgactgatgtctttggaaactatgttgttcagaaggtactgataacatttttttgtcagtataatagccatcatgattttacccgctgacagtaatcctttgaaccagttttttgagcatgggagctcagctcagataaaggagttggctgatcagctaattggacgtgtcttagcactcagcctccaaatgtatggttgccgagttatacagaaggtgcagataatttgaaaacccatctgttggttcttgaattaaacccataatgatcattttgcttagtcaaatatattttacttttccaagtaggcaagtactaataataaaaaacttttacaatctgatcacatggatcccttagcaacctatattgtggacaaaagagagtacaagttacctagttgtcagcaaaactcttggtttgcaaggcatgacagattgaatttatatttatacatgtgtgtcgattcctattcatcggtctttgacatataatgcatctctggttatctaagtgcatattggcaaccacaggcatgcttgatcttatccagttatttgtgtccatgcacatatacccttatatattgcatgaagggctcaaaggtgcagcaaataagatgtttaactgatgttatggacaatattcatgcaggccatagaagttgttgatttagatcagcagactaaaatggttgctgagcttgatggacaagtgatgcgctgtgtacgtgatcaaaatggaaatcacgttatacagaaatgtattgaatgcattccacagcatgctatccagttcattgtttcaaccttctatggtcaagttgtgatgctatcaactcatccatatggttgtcgggtgatacaggtacacttgtagtgccacagcatgctatccgttgattgcttcaatatccagtctattcatgctacttcatagctacactaacctttgtcatgcaaattcactggacgcaaagggtgctggagcattgtgatgatcctaaaacccagcaaatcatgatggatgagatcctacaatctgtttgcttgctggctacagaccagtatggtaactatgttgtccaggtcagtgacaaaattttcctttttgtttttatgggatttgccctgtcagcacctgtaactgtagccgcttgctaaaaaaagggtttctgtacttgaaatactgactactacatagatactgcccaaatgccatcaattacatgtaagagattcttaatatttctttagcactgtgatgtgcaaacatggttatattaaattatttcaaccactttctatgacatgtctagatattagagataggatttttatgaggaaagctcagtttgcttggaccttgccgaactgtgtttccccaagagtaatacactcgctcagttgaacatgcttttccttccccttttccaccttaagctattttgcatttatgtatagggtgaacgatgaaaatagtttgcatatactgtgattgattgatcagtggaatttagcagttgtgcaagtagacatgataagcctggaatgttgatgcatgtgcttctttcccctcatttgctctctcactgcaaaaggcgttttctctcttcaataaccaaccttatttgacagcatgttctggaacatggcaaaccccacgagagatctgctattattgagaagttgattgggcagatagtacaaatgagccagcaaaagtttgcttcaaatgtcattgagaagtgtttagcctttgggaatcctgtggagcgtcaagtcctgattggtgaaatgcttggctccagtaatgagagcgaacatcttgaggtttgtgtctgttttaacttgtgggcatatttcgttatttctatgcggtacagttttgcaacatctctgcttctcagaaaattaagcactaatatgaaaagttgatggtccttgctaaaagtgacttgtctttttgtttgaaatctgaaggtgatgatgaaagatcaatttgcaaactatgtggtacagaaggtgttagagacctgtgatgatcagcagagagagatgatccttacaaggataaaagctcatctgaacacactgaagaaatatacttacgggaagcatatagtggcacgcgtggaaaagctcgtcgcagccggaggtacgggacataacacaaagagagataagttttgtgtgactaggatatgatgatttgttatatataacacaaagctgtttttgtgtgtgcgcaaaaaagcggcttgggcttcaaccatcaactgcagcttgaagaataagcgctatctagttgtacagctaacagtggctaggtttgcactggcgtcatgtttttctatctaaaccaacccctactagtacgaggctctgttctgaatggccttgttagaaataaagagagagagtagtagcttgcaccggagagtgtacattctgtagctgaggaactagcacaagggagggagataaaaagaatcttcatgtgtaccgtgtactatgagttctcaaactgtgtaaaaagaggaggagcaaggtgtacaaattttttagaactagagcgaaagagagggctgttgttagctgttttattaaacttttaaaaagccagtcactagtacttttttctttttgaaaaaaaaagaattaatctcagccctgcccggtatcgatgattcgatatcatatcagggcgtcgcgttttgttgtaacatatactactactactgtaccacagatgatgccttgagctgttctgtgggtgaagctggagctattaatctcagctttgctcttttttactactacatttatcatctactggtcgcttgcttgttcttttcagggtagatcgtgtatcattatcgtcatctttcttgtttctggacatattattataatctaaatgcagcaatttataacagtactaaggtggtgttctttttctcctgaagatgaagattaagtttttttacgcaaaacgatgtggtattaacttatgattgattgtgttttaattattacaaacttgaaaaataaattaatatgctattttagggcaacttttatatagaaagttttcgcacgaaacgcaccgtttaacagtttaaaaaacatgccacgagaattcaaaattccatccattcttttcattagaaacgaatgggacctaataaaacactacatcctaaaatatacagtaacagtataacatttgataggatacattcgtactagatagatgaagtctatatttcatttgattcgaaattgctagtatattatttatgggatatgggtgttactactaatgtaatttttatttggaacataggcagtataaaagaaggatagactgtatagactaaggttaggagagtttattttggttgctgaagactgaaggggagtagggtgggagaagagaagagaaatatctggttgctccagcttggcatcgttgaccgggccatcccaacccaatccaatccacagaatcgcatcgcatcgcccacaattttcaattattatacaggaagaagaaaagggaaaggcggagagcagagccacgccgtcggattcgccctatccgaatcttgaggaaatatctccagtcctaatcagcttgaggagtgccccgaaaagagcacgggaataacgatcgtgccactgcaaaagggcgcgggcggacggccgggatgcaaaagcgcatcccccgaatcaaaaatatccggctcaccggtccacgtggaccgtgatctccctttgctctcttctctccgtccccacccacctccactttgctctttattccccttttcccctctttttttattactatttattcgtcttccccctcttgtcttccacctcgactcaactcaactcgcacaaatatcttctctcttctcacccaccgcccgattcttcgagtccccgatttggttcggcctgaagaagggtctgggtctctctagagagtgagtagccatcgatttgagatttgattagtaattcggaggaggaggaacgagtggtttttttgatttgatttgatttgattgagaagaaaatccgagtattatgggcgaggaggcgccggaggagtacgagctgggcggcggggaggacgagcgggtgatggagtgggagacggggctgcccggcgccgacgagctgaccccgctgtcgcagccgctggtgccggcggggctggcggcggcgttccgcatcccgccggagcccgggcgcacgctgctcgacgtgcaccgcgcgtcggcggcgacggtgtcccggttgcggcgcgcgtcgtcgtcgtcgtcgagctcgttcccggcgttcgcgtcgaagggagcgggaacgggagcggacgaggcggagtcagggggaggcgcggatggggggaacgggaacaccaacaacagcagcagcaagagggcgcggctggtgtggacgccgcagctgcacaagaggttcgtggaggtggtggcgcacctggggatgaagaacgcggtgcccaagaccatcatgcagctgatgaacgtggagggcctcacccgggagaacgtccccagccccctccagaagtatcgcctctacgtgaagcggatgcagggc

SEQ ID NO: 24039 - DNA, 7585 bp, Oryza sativa
ctgtactctacacattcagttccataaaaaacaaaactaatactacgaatatagatgcgatatatactattactacaaatctatctagatggtacacatacttttctctttgtgtgatggcaaatgaactgaatagcgaataaatacatatccattcatcatagataatactaataaaaccctatcacatcggatgtttggacactaattataaatattaaacatagactattaataaaacccatccataatcttgtactaattcgtgagacgaatctattgagcctaattaatccatgattagcctatgtgatgctacaataaacattatctaattatagattaattaggcttaaaaattttgtctcgcaaattaactttcatttatgtaattagttttgtaagtagtctatatttaatactctaaattagtgtctaaatatagagactaaagttaaatctatggattcaaacaccacctaatatggtactaggttgtggaatagcaaggacagagagatttgttctagatagatattgggtacacatgacaagattgattgctgcaaggaagagcaagtggctagactacttatttgatgaagaaatgtaatgtgtggagcagcggagaacagcactgatggtgacgagtcccatgaggcatgaggagcggaggagacaagtgcacgtcgcctgcctctctgtctgtatctctactatgtatgtaggagtaaatgtatcagtatcacggtcgtttttatcctttccatgccatgcctgagagaaatgaattggcttcggcttcggattggatatgcttcttcctccaccacacaaccagagcacaagccaaggcaaacctcactgttgcttcccttcccttcgccctgtaccaatagaagttcggattgggtttcgttcttttcttcttcttttttttttcccttgtaccattagaacatggccatgccacatattgccatcgctccatcgctaacatttccacgacggccggcagcctctctcctattaccaaatttcaaaagcttctatacaaactagtgtcaaactagtgtagtactctattcgttttttaatatatatggtactgttgattttttaagatatatttaattattcatcttattaaaaaaataatgtatttatttattttattatgacttgatttatcgtcaaatgctcttaaaattttttatatttgcacaaaaaattttaaataaaataaatgattaaatatttataaaaaaatcaactgcatcatcatgtatttaaaaatcaactgcctcccaacaacatctatcaccggtgaaagcaagaaaaatagttagttcagggatatcatatgctgcctgtaatgtattggatccatctgtactccattatcacgcacgcctctccaagaaatcataagctcattagcggtcaacacgatgcgataccgccataatcgactacagtctacaaatttaggccaatttcaaaatttgtgtggagtataaattacaacgaattttctgcatttgctcttgtttgttcgtacggatagatactactagtccgtcaattgccaataggcagggagaaaggaaaaaaaaaacaaaaaaggaaaaaagagctttgagttgactgacatggccgtgctctcctcttcctcccatggcctcctccacccaccgctccgtctcctcgccgccgcctccgccagtagcggcagcagctactcgattccccatgcgcgcctccgcctcgccgtcactactccgtcgaggctaccttcccccatctcatcctcgcccgacccaccgcccgacgtcgcccacgacgaagacgaacaggaaggtcagcaccacaaggaggagcgggacgagcggtacgggttcgagatccaggtgcgcaagctgcccaagcgcaaccgccgcctcgtccgcgcccgggtccgcgtcgacgccccgctcgacgccgtctgggccacgctcaccgactacgagggcctcgccggcttcatccccggcctctccgagtgccgcctcctcgaccagtccgactgcttcgcccgcctctaccaggtacccccaattcctcctccaccaccaatcaatttaggttgaccttatctgtgctttcatccgcaggtgggtgagcaggatctcgcgctgggtttcaagttcaacgccaggggcaccatcgactgctacgagggcgaattgcagctgctgcccgccggagcgcggaggagggagatcgccttcaacatgatcgacggcgacttcaaggtcttcgagggcaactggtccgtccaggaggaggtgtgagatgctattccaaatccatgttgccgaatcatactaccacatttcattccatgccatgatcccaacagcatgattttttctttctttctttttgaagaagaagaagagagatagtagtgcatagtaagcatgaattgagaaaaggaatcaacccccattcatcccaaacatacgacatactgcattgatttttttagataatggatagaaatccagcctctatacatgtcgcattgatggtggttcagatttaagatttttcactttttcatacaatcagctgctcattgcattaaccatcggtacttattctcgattaaatctgattccagctggtctggattctagaagcaagatgctatgaatttcattttctgaatcttaatctcgagactagggttagataatatgatgatttgggtgtgctgttcaggttgatggtggggaaatatcagcggatcaggaatttcagactatactttcttatgtggtggaactggagccgaagctctgggttccagtgaggctactggaagggaggatttgtaatgagatcaagaccaaccttttttcaatcagagaagaagctcagaggatccagagattgcaagataaggtaaactgtaaacaagggtgttgctcaattgctgttccaacatgctcgagtcaattagtagtaatttctgaacattcttcagtagtactggaaatacaacattagcctgtggaaattatggcaatggtacatttgggagtcatatcttttcttgttatataactccattttgttcattccactgttatcatactgtaccttcttaattctacagagaaatccatgctgaagtttggcagtatgttttcagtgattggtcatctcttaaggcttcatcccaatattacacgtccttgattctcaagaatacacttcagaaaggtaggtatttagcactccttagttttttttttcttttttgaaactttagcacttgttagttagttggacaactgccatgaacctaatgagtctcagtcttgcagggggaaaatgggcgaagaaagatgatgacgcgcttcatgatgttagtggaacacccaaaattatgacttaggtcactgggcatgtcttgtgacaattggattggttgatctttctcaatagaagagaggaaaaggcaaatggattatttggaattcggacagctttggacgtgcctgacaggcaaatggatagagggtcccaaaacctaatcttgcttgtatatctaggattacctttttgccactcaatggagaaatgattaacgtttcgtgattaactacacgatgttgacatatattgcaattttatttgtaaccaatcctaggcagaaagctgctgaattggtactcacttagtcacttgcctcttgtgttgaagcggaggggaggggatattttgggcttgattgggggtgcttttaacttctgtagcttctccgagaatcagaaacttctctaaacagttcagcttttgtctggattctaaaaaactgtagttataaaatctagaaaatgaattaaaagctagaaggtaggaaacctacttttccagatcatcataagctagctaccaaccagttgcttcttagaatctcataaacatgccttttgtcatcttctgttagcttacttgtactgtggaatcatcatctaaatcaaacttgtttgttcataattaatcaaacttgtttgttcaaaatgatgagaaaattgcaatattaggactgtaaacattggggtttcgcacttttgacacaagtgggtgacaaataggcccatttgtgtctataaaatgtgggtcctgtgtcattatagcaaatgttaatatttgcaacgtcataattgcaaatcccccgaaaatgagtcgttcaccatctttgccactttctcgcgaggtagcatagcagtgctcactgctcagtgggagggagcatctcgccgtttcaatcggatcgggctccacaaatccaatcccgaattgaatgatgaaatgcgcggcttcctccgccacgccgagtcgcgaaccccgcgggccttcgtccaactcctcgccgcccagccgccgcgcccctccgccgccgaccagtgccatgccgccgccaccaaactcggtttctccgcctccaaccccttcgccaacaccgcgctcctcgccttctactgccgatcccgccgcctccgtgaggcacagcacctgttcgaccaaatgcccctaaggaccgccgtcacctggaacacgctcatctacggccacgcgcagtcgaccgcgcccgacctcgccgtcgcggccttcgcgcgcatggtgcgcgccggcgtctcccccaccgcgtcgtccgtgtccagcgtcctggtcgcctgcgtcaggctggagaatgccggtgctggagcaatgctgcactccgttggcctcaggtgtggcttctttgcttctgtcgtcgtcggcactgccttggtggacatgtacgccaaatgccgtcgtttgggcgcggcgcagcaggtgtttggggagatggaagagaagaacgtggccactttcacggcgctcgtgacagggttcgttctaagcagaaggcctcatgacgccgtgctgttggtcagggagatggaacgctctggtgtggcaccaaacttgatgacgtacagcagccttctcagctcattcgcgagcccggaggacatagatcatgggaagcaagttcattgcgcagtgcttaagaagggcttggagcacgatccgtttgttctgtctgctcttgtgacaatgtactccaagtgcggcatttgggaagattttgtcaaggtgcagatgtctgtttcatgtcaagatcaggtatcattcaattccgtcatttttgggctctcctgtctgggaagaggtaaagaggcgtttcaacacttcttggaaatgagaaggcacggcactgatatggatgtgttcacctttgccagcatattgaaggctataggtagctcatcctcgttgctagagggtaggcaggttcatactcttattctgaagattggatatgattctgttgtggatgtccagaacagcctgatttccatgtatgccagacatggtgcaataggggaatccaatggcgttttcatttcaatggaagcacccaatttgggtttttggaattcactaatgtcgggatgtgctcaacatggccatggaaaggaggtagttgagatgtttgaacaaatgaggaggctacatgttcagccagaccacataaccttcttgtcagtcctcacagcttgcagccatgttggcttggtagataaagggctcgagtatttcaacttgatgaaagataaagggtatcttgtgggagcaaggacaaaacactatgcttgtatggttgatcttcttggtcgagcaggctatctcaatgaagctgaatacttgattaatggcatgcctataaaacctggtgcatcagtatacagagctctgctcagtgcctgccagattcatgggaaccttgagattgcaatccgagtgtccaagcgtctaatggagctaaatcctcatgactcatctgttcatgttcagttatcaaatgcctttgctggtgatggccgttggggtaatgctgctgagatcagggagaccatgtcaggtaaaggaatagtgaaggagccatcttggagtcgtattgaggaccagatgcaacatagataataagcagcctgtgcttacaagatgcatgccactgtcttggttgctacctagaactgaattatagaccgaagctctgagggtgatgcttaccgaacgaagcaagctagaaatatgtgtaagaaaaggtatgccaaagttagtgatagatttgactacctgctcgtaaatttttggaggtttaaacagttaaacttccttctgctttagtatgaacctcattgcgtttatcattagtgagtaaagcagcaccagattggataattctggtgttataacgatgagttctactggaagcaagataactgatcgccgtataactggagcctaaattaacctgatgtaatgaaccctttagcctatttcttgttttgcataagcataagtgcataacagaaagtgtatttcagttaaacaagaaacatccacttccttctgtacataaaattaactcttttttttcaatctttttttacagggcctttgcaggcctctatggctgtatgtgaggctgtgagctaattgtaggccctttacaatagaaccagcaaaatgtttcatcctaacttgctgtgctattgttgcatgatatagcataaggttctatccatgcaatccttttgttcactgcacattgaactcatcccttgtagttttcagcttgcaatgttctgtgagaagacaaagataagagttatttttcttaaaactgcacattgaactcaccccttgtagttttcggtttgcaatgttctgtgagaagacaaagataagagtttttcttaaaactgcacattgaacccaccccttgtagtttttggtttgcaatgttctgtgagaagacaaagataagagttttttttaaaagagtttaagaaagagtggaaggcgccagtacttatttgacccatatatagcttagtacccacggtgcattttcttgtttgatatgtgcttttgttattgtttcctgcacatcataatttggacccagttttgcaggggaacttccatagaccgagggaagagctggtaggactttgtaccaagcaaatcgaggagcgtcaagaccgagtggcttaggttggtccatcgaagtgggcaagggggagaaacgaatcagaaaacgactggcctggcctgatggtagaatccatgttgtgtctgcctctcttgtgggcgctccagaaaccaaaggggatcactttgagtaatcattcatacacaagtaatcttgcttgatggccagtcatgttacagactgtatcatgcagtttgatgcctgtttaagctaagagaacgggggttttccttcagtttgctgcttgagagaaagcttgtgacaacaagacgaaaaaatgtcatgcttgaggcggtttgggccttgatggtttgggccgaggaagcaaagaagcccaccgagaggatgaaggagggcaatcctccgataccaccgacacgggagagcctccacacctgacctcagcaaaagcagcagatcgacaaattctccccgacacag

SEQ ID NO: 24040 - DNA, 921 bp, Oryza sativa
tcctcccgctcgctcgcaagtgccaagacagactgccatgtctctatcgattccaatggtctgttgcggaaaaggacaatctggtagaccggctcgcacgatacagacacatgcacttcttggggatgctcgcccctccttcctagtaacattcttcaccccccattttctttggttctacttctctttccctttcttgtgctccctcccctcctcaatccgtatatataagctagctgctcgttcttgttggctccttcttcctattatttctttgtttgctccctccccttgctggttggctggctgggtcggtcgggttctttcttgatctgcatttcgccctccgccaccgggatggagaacggacacgccaagaatcttgtggccgtcatcggcagcggcaactggggcagcgtcgcctcccgcctcatcgcttctaacaccgctaagttgccctcctttcatggtaggtaccttccctctcacaattctccattaattccccatgtgttgcatttctgaattatgcatctccctatgtgggctctatgcatatcagcatatgcattgtgtttgctacaactgttgggtcatttccatgtctattgttgtttgtaattgtcttctctaagactctaaccattcaatcagagaccatatataccctgtgttttgttgggatctttctacttgtaacaaaaacaatcttactgcattccacttagcccctgtaagatgttcttttgaaagcctatcaatgttatccaaccgcatgaaaccatcaaattgactttattatttaagattgaattgccatgttgtagtctgcaaattatctaccacaaacgtactactccctccttccttaaatgtttgacgctgttgacttttttaaacatgttgaccgttcgccttatt

SEQ ID NO: 24041 - DNA, 9012 bp, Oryza sativa
ggtcaaacatttttaaaaaagtcaacggcgtcaaacattttgggatggagggagtagtatttattgggtacttgggggaactctaatgctagctatggttcttttttgcatgagttcttttgacaaccctacatcctgcacctatttgtgctgattttgttgtaatttattcgtagatgaagtaaggatgtgggtgtttgaagaaatattaccaacaggcaagaagctctctgagtccattaaccaagcaaatgtaagagttcaaactaattccccgtgctttattttacttctggaatcagtaaatgattctagcatgatcctcgcatattacaggagaattgcaaatacttacctggtataaagctcggagctaatgtaattgctgatcctgatttggagaatgcaggtaaacaccgtaaattgtattcctaattataattattcttaattggatacattgctcttggatgctacaataatgcttagagatctagttaatgaaggaagttctcttcaccaaaaaaaagaaaaagaaaaagaaaaaagccagcagctgcttcagtaaaatgaaaatcaacttatagatacactcaaaattattagctttgatgtgctatttgatactactttggggggtgggtgggatgttgtaatataggtttcataagcaaaatgctatcatcattgcagcctccctgtctacatcatgctttttttcatcttgacaaacaaacacccataaaagtctcctttttttttcagtgaaagatgcaaatatgcttgtttttgtgactccccatcaatttgtggagggtatatgtaagaagcttgtgggtaaactaaggccaggaactgagggtatctccctcatcaagggcatggaggtcaagatggaaggaccatgcatgatatctaaattaattacaaacatacttggaatcaattgctgtgtccttatgggtgctaacattgcaaatgaggcaagcatcttctgaacttcccatgcaaagtttctttgtactccctaaaggtgaaaagtaaccaggtgcacctttcaaatgcagattgctgttgagaaattcagtgaagcgacaattggatataagaaagacaaggaagtggcaacccgatgggctaaactttttacaacaccttacttcctggtttctgttgtaagttcaaccataaaatctcattgaaacaaaccctctcaccagagtgattcctagcagtggttcagcagaaaatgaaaaacctgtgtccttcatgtacaggtagaggatattgaaggagttgaattatgtggaacactgaaaaatgtcgtggccattgcagcaggttttacatgtttgttaatttgtagtagtcattgtttcctttcaaattttaatatttaagtgatggaatcaacttgcaggtcttgttgatggtttggatatggggaacaataccaaggtatgctatttttattgaaaacataacagagaagaattttcattgtatcatagagtttaatgatctgttttatctatttgtcaggctgcaataatgaggattggtttgcgggaaatgcgtgctttctctaagcttctatcccctacagtcagggacaacactttctttgagagctgtggtgtggctgacctaataactacatgccgtatgtatctcattgttctccttttaccattgagctgacaaacactgacaagatgagtgtttcatggcagttggtgggagaaacagaagagtcgctgaggcctttgcacgaaatggtggcaaaaggtttcttgtctaaaacatacataatgtcttttgataattttactctatactttaactttgttagagaatcaaaatacaaagtatgtcgatgttgatggcctatactaaagagttttcacatagatttttttttctgttttgtgatgattacataataactatggtatttcatcattcttacaggtcttttgatgagttggaggccgagatgctacatggccaaaaacttcaggtaagcaaatatctggaaccaagcaaacatggtgaattcgttgccttcttagtgcatctaatctttattagtttcacttgcagggagtgtccacagcaaaagaagtttatgaagtcttgacttatcgagggtggcaagaattgtttcctcttctgtccacagtgcatgagatttgtattggtcagctacctcctacatcaatagttgaatacagtgagcacacgcccaacctctccatcatcaatggttctaatgcgtattactgagctagattctgcaaattgtattattgccactattctcagtatcacttgttacaacagaacaagttgaaacatacctaatgtctgaatccgttatatatataatattattattcagccatgtcacctcataaagtgcatgactgattatgtgtttctgtcccttgttgtttggaaattgagtgaccttgccagaaatccatggattggaataaacaaattcagtttatatggaaaatagagtgaaagaatttcatggtataatttataagggtgcttcttgaatgaaacaccacaaacaacaggccatgcttaagtttaataacctggaagtttaaaaagttaatgaccctcgcccaaaaaaaagaaacaatttacatccagtatgcagttcactgttcacccatttcataattttgtaatatagtgtgtttttacaaacacgctgtgtacattgtttccaacttccaagtatcacaaaagaaaactaatatttgagcctttatatttagagctttccacatttcaataattcattgtatgtagtaaagaccaaggaaatgttgagtgataatttgggaagacttaaatagtgttgttttggattcatggagtgctgatttgatattgaaatgttaaatttggaaggattcccaattacaaactgttgatcaggccttgtaattttggagctgcttttgctgacagacagagcaacaatggattgtagaactataataccatattcctacttcctagatggaatgtttcatccgaaagcctcactggcctggaatcatgatgggtagaggggtaggtggaggtgtgcaaggaacttgagagcgatcactgtattgccttatatgataagtaagcaatgaactaactgaatattccaggaccaccaggtggacttgatgcctgtgctgatccagttctgggtcattgggtgtactgacgatatcattggacacaaacatggagaacatttctaatggaagaaattgcattctaatacagtgaaacacaggaataaaatattagagactgaatttgaacaaataatcattctactataattttctgaatcaattggaattcaagttcctagagttcacactatgacatggagaagaagtttgcgagttatgtaatgaaagaagttaaaagtgtactttctatattttaagtttcgtccaatgacttcatttaagagtagcagattttgcacctagcttttgtcatgcagattttgttaagcttctcttagctgaacccattttcactattatcgaagtttgctagttgaaaatttggtctttgatacaaaatgctgcttcctttcagtaaattttagtggccttagaattttacaatccaagtaccttaagaaccttcagataatgcaactttctgctataggctacttgatacagtgaatagattgttgatttcctttttgaatggcatgtgtttctgatgatctattttaatataagatgtatttcttttactcttaacacatgcaggtattacttagaaatgatatttattttaggagtgttttgtattccctggacagttttcacttgtagttctccaatttcatctcaataatcaaatcttaaacatattgcaatagcatttgccaagataaaattattcatggtacagtatccactatatgaagatgaagcggaaacacgctaatgattgttcatgtcctgtcttagatgcaaccaaaataaactatttcacctttcacggattagttgatttatcatattttagtggattaaattgtccacaacattttaaattccaatcttcctggggaacaaggaccaaaagaatctgccaaacacatcactttcatctttttatgtctacaaagtaacttttggtgttgagcctagacaagacacaaacaagataacatgaaatacctccaaaacttgaacagcggaatttatttggagtcatggcaatatgctcatcgaaattcaggacctagtttctttctttaaaagaaaactgtgactcatgtttcaattccaactggcataagtttttatttctattgtgacctgacatgaacccgtttcaggaatccactgaatgctgttctctgaagatgtcatcaataacagtttcagcttgctaaaggtcttgaaggacctctgctttctagtggagcaaggctcaggaaattcttcatgtcagtgttcttcgttgcggggtcatcaactcatctgtcagatcttggacatttccaggccttcagcaacagtccatgcaagaagtcgtcagaatgcacttacatttcacatctgtttatgactgattacacattatgctcatatgtgctttatttttttaatgatacaacgcatcagtatgtgagcaatatagtttgctcatatttgttatcgtctaacagtggcttgttaactatgttgaggttttatattcacaactaaaaactttgtacgctgggaatacttaaaccccttaacagttcaagactccaggctgtgtttaatattagtccaacatttgcctgagaattgttacttgcttgatgcacttggtactgaaatctgcaaatcgttgttatcattctacatatgcctgagaattgttgcttgcttgatgcacttggcactgagatctgcagatcgttgttgttatcattcattctacatttctctgataaggagtccctcccgttcaaatatgattatgattcgataaaaacaattgaaagtagatgaattcaaaagtcatcaggctgaaattatctgacagtacagaatctgtaatgctgcagatacatccataagcatatctggttgagcaaggtacagaaaatgacatcaaattagagcagccattctggaacattcatcagtaccatggaaaatatgatcaaatatccatttgatttagtcacattttaccagtattagtcttagaaccataacaaacatgacagaccatgctggtacaaaatacgcaatcctcggatcctcactaacttattaagttcttgaccttttgaaagactgacaacaatactaagcagactctgacttggtgtagatccttacagcaacagccaatcccaatatcgccaagggaaccaaaaactggaggatcttgatgatgaactctggtgtcttatcctggttgtagtgtggttgcttcgggggcgtgtacttcaccttggtgggtatcgtggttgcgtcaatgtcgccgacataatactcatccatcatcgcccgagcagtggtgctgtgccccacatcttcgaagtcgtcggtagcatccttggctgcaatattcaagtaccattgtaagctgaaatcagatttcctgaaaccttatcgatcaacaagtatgcaatgcagcaatggggctttaccagtcgaagacaacaagacatcatcacctccagggtgatcctccaaaaacttggtcacattgtacacctgcaagtagcaaaacaaatacttctatgagtttgatttgtgtaaaggggatttttttttcaccatataaggcctcgtcaatataaaagcaacaataaccaagcacatttcagtgtataaaaatgagcaaatgaccctagcaacctcccttatagaacagtttgttgaaaaaatacatatcttttgatcagccaacatcatgttcacagagtcaaaatagcttcttgacatatactacacgagaacatataagctccctaaagttctgagcatattttaaacaggcttgttcatctgattgaactggaaatagagaagtaagcaaaactgatttttccttggctctatgaagtaaaagatcttgcattattctttagcgtttgacatatcaacagaattgtgaatcctatggaataaaagatgaaacaagagctgcacatttagattacaaagaacagtttctcgcattaaaccacaaaatatttataccaggactagtgaggtacattcttatataggctccatgaaaatgactggttaagaaaagatgttcaggaacattacaggaaaaaaaatgtgcagtaggagattctcaacaaaaattaaggtcaggataggctaatttatgagggatgtttgctatcctatcctatctggaaagccatatccgcacagtgatgaaaagtttgtccctaaaagttcccagcaagaccgtgtgtcatactaatcaaaagaaaagagaagagaagagaaaagggagaagaccttgccgccgatgatgagccagcaatcgtccttggtgttgtgcttggagacctcctccagggtcagcaccttgttgttggacatgttgatcttgatcgatcttgccctcctcttgctcctgcctcctgctcctctctctcccaagtcccaactggcaactaccaagagatgagatgagagatgggacgagagaagggacgaggagcgcgaggcgaggaggaggaggagctttggatccaacgacgaaagaaagagagagagagagatcgcgaatgaggaggaggaggaggaggagaggattgaggagcagtagagttgtatagtgggagtaggtcgaagggcccaccagtcatagtcagtttggttggtgggtaagggcgcttgtctcaccgaccccaaccacatggttccttttttttttcttttctgtgtactccacaccaacaaccgtagcagctagccagctagtctgtggatccgatccgtatgcgactagactagtctggtgtgtgggccctccctccctgtatctgtatgttgtacaaatacggtactactgtacttcatgcttttctgtccaacagaagtagtggtggccaattggtttacagttatactacacggtttatacagtcttttggaaattcaaattctctttctgaacgaccaccaaaacttattcacgtaaaagagaaaaatgtgcaaaaataattgcttcttttttcctactggtttatgtttttacccaaagtataaactactccctccgtcccataatatatctagtcctaggatggatctcatcccatcctaggttgctatattacgagtcatgtctagatacattgtcctataatagattccatcccatcctagattgctatattatgggacggaagccaacctgccaagtctgcccaaatcctatgcaactctcacttgcttcccatcatgtgccactaactctataattatgaactactccccacgtccctaaatataagagattttggtgggatgtgatatatcttattacaatgaatctggacagaagcatgtccaaattcgttggactaggatgtgtcacttccaaccaaaatctcttatattttagggacggatggagtatctctcattcagctatatttatatcttttttttttgtcttcttggataacatacataacttagagtgtgtttggttcacggtcatgcatggataggatatggccatccatattttgttggatatggcgatctaattgctttattatgctctactcagttgttatctctctagctaatatcgacatggttcaataatcgtatccgggtgttttcctttttatcgtaaccagacattttcacattctatattttttttaaaagcaacagtgaagacgatataacatggggatcgatgtgggaagaaggttgatttttcggctttctaaagatgggaaactaacagaaactgaaaagcaaactataataagaccagaactgagatgatcgaaagattttaagagagagagagagaggctagtttggtcgagttcgttcttcgttttttatttttacgaatttgtgacagccccaaagtagccaccgattattaataaatattacaaagaaacaaagagggaatcccagtaattattacatctatccatcaccatctttaattttcaccgatgaaaaataatgagagacaaacaatcttgaaatgtggatgggaattgaaaatgaataacaatgaatacgagtactgagaaacacttggaagtgccgagataacaacaacgaactttacaagcaggatgaattaagagagtcctcttcttgtgttattattttgtatccttgaaattaagaaactgatttaatttaagcgttcttggttgggtaggaggccatcttgttgatgccgcagaggccgtcgtgcttgccggtgcccctcctcatccggatgtaccccttctcaccccaatgcgatccccacgagttcttcacgatgatgtaatcgtgtcccttgctggccgtcccgtatccaacggccgtcacgccatgatccagccgcgtgccgcacggaccatcaaacacaccctgaccgattaatcaccattaatttcaagtcaggacaagaagaaaatggcaaattaagaagtaattacaaacaatttactactacaattaaattccattaacctatactcctataaagtctctagtgatggtggcagtgaatcaaacacccactgctgtttttaaaaattgactggtgatatcttttgttattatggaatagcccaaatattcagttcaaacaaataaacaagtggtactaatatgttcgataatttttataatatttattacatactataatatattttcttttatctatagcaaagcatttgtgtttttttagctattgaagagagaacattgttgattaattgtttcatacccg

SEQ ID NO: 24042 - DNA, 1309 bp, Oryza sativa
aattgtttcataccccgctgtagaactggaagttcctgcctgaggcctcgatggcgacgctgaccggctggtgggccagggccttgagcagggcctgctgttgttcctcggaccttctcgtacccggagatggtcaccgccgccgccgcctcgccgtcgtcgtccccctccgtgctgccgcggcggcaggtgccttcctccatcaggtacgggtaggactcctcggtgtggaggccgccgttggcggcgatgtaggagaaggcgtagtccatgaggccgccgctgcagccgttgttgccgtcggtgtcgcagtcgatgagctcctgctccgacaggcgcgtcgggttgccggtcacgatggcgttgatcccctccaccgccgccaccgtcgagaacgcccagcagctgccgcactgcccctggttcttcacctccgtcaccgcccccttcttcctccagtccacctccttcggcaaacttgccgcctccacctcctcgtacctgaacaactgatcgttgctgttcctcctcgccggagtgagggtgaggccgaggtaggcagccttgaactcgtcgtgggtgaggtcggcgaactcgttgaggcccagccagtagccggtgatcttcttgttctcctcgtcgatgtggttgaggttgtccttgaacacctcgaacctcctcagcttctcctccaagctggagtaggccttgcggtacttggccatgaacttctcgaacagctccatcagcctctcatgcgacgccagatcctcctccgagtagccaactatggacaattcactgggcatggctaccgctacgcatgcgccgccgcacagcaggaggagcacaagagccaggggaagcttcgaattcattgaagccgccattgttgcaagctactactagtaggatgatacaagctgctgctgctgtgcatggtagagatgagagaatgcatgtgtatatatagcttagcttttctttctttcttagatcgattgttaattttgcttgaaagcaaagacacgatcgatcgatcgatagatcaactgcgtgtgctacatgttgaaggttatatgaaccatgcgagagctttaagacatggttagcatcttggatgatttggtatctgaagaactagactttgcttttaagcatgcatatgatatgaacgctgggcgcttactcttgtagtagtagtagtattatatggagcatcagggaaactgttttaatctctcgaggggatatcccctcgttttttgtatgtcacttaaatggttataaaaaatttaaaaaaaattgg

SEQ ID NO: 24043 - DNA, 26329 bp, Oryza sativa
tccatttgtacccatcatctgcgagcccaccattattcccacagcttttcatcttcagtgtgtacttgttctccatcgtcttgctcaacgtcttctccggcgagaaaaccctatatatttattcattcttttaattaattttatcatttttccaccaagtaatatatatatcactcctccaacgagcatgtcacaagtaaattaaattacaagcatgcgcaggagtaacatatatataagcatgcagttaattaagctagcatatatacatgcatatgtacaaacagagacagaggtagctacacttacactgggctacagctacttgcagcgaaattgtgaccgtcggcgagtagctgatggtcgccggcggcggtgaaggagagagcgctctcgatgtcgctgatggttggcccagaatacaccgtggagatgagcttgttcaccatcgactcccgccgccgccgcccgcaaggagcctccacctgcagctgctcatccgctgcagctgcggcaaaatattctctctcatcctcctcctccgcctcctttgaattggaatttgaatttgaattggaattggaattggaatgcaccgcggcggtctcatcgaggatctccctcaagagctcctctccgacgacatcgccgccgtcgcgccaatactctttgttctcttgcatcgcaccatccatatgatcaacctaagctgctgctgctacttgcttaattcttccaagataggatcagtttgtttatatggagtattaactggctggttagctagctagtgtgtgagtgtgactcattatataatctaccaacccagcccagggtatgcgtgtatatatagtgagagtgagaggccggagttcgatctctcttcatcgtcccaaaatgacaaatgtacccctcatggtagctagatggatagatcgatcgatcgatcgagtgttagcctgaattatatgtctatatacatatattcactgatcattatgtaaacatatatacatatattcactcatgatcaccaaacagaacaaattacgtgttgagagagatgagtaagcgcgtgtggtgcagttattaataattaaattaattcaatcggtgtaggttgaagcaggccaaaatggattgaattgaagatgggtgcaggtatgtagtaggtgacctttgattgagattttgatatcccggcctgcccttaagtagtaataatccagctagctagctcgatactatatatgaatatatcggacgtttgcaggatgaaacatctggagatgtgtttatgcatgttcaggaaactgcatatgtatattaagttctatatatgttactgccaagaattggcaatcgatggaaccaactgacccaacacaacatatataatggtgcaactaatatgcaattgtcaacaactaaagctagctagcatctatgattgcgaagaattgacaatcgatcgatcgagacttttaaccaatgcatgcatgcaccacctttttccactagcttttacccctgtgctgctacttctcctaattattctctgatccatttgaactgctcgaataattaattagtatgcagctaggtagggcatgcatgcagcactgcctccaaacaatctctagtatgtagcgcgccctaattaaactatgtatatatgtgggcgtagattaagctctctgagacgatatcctcttgacatatattataatgtcaaatattttttaaaatttatagaagttaaatttgacatttatgtttgtggagtgagatttatcacatatttatctatcttattgaactttataacaaaattttataattatttaaagatgacatgtaaacaacgaggagaatagtttctcctcgagtgtttagaatagtttcgccatatatatcaactatgaagtatatactactactgtatctagaaagcacatattgttcacgtctctatcgatggatacgatcgatggaaatattctgcacgcccagcgcagctaattaatcaaccaccacactgatagaaccatgtatatatatgctgaatatgtggccggagaaataactaattaagcgcaagttcagcggggctaggtatgcagctggaaactatacctaatctcatataatatccttgatttgtcccctaaaaagagccctacagagctgtcgagacgaaagaataaatgcaggaatgaagacaaactatgtttcttaataatttgatcactttggccaaacgcaaacatcagctagattattggcatgcgtgccaattcagtacggagtaccatgtaaaagctccacccatcttcaatatattccggcatcatacatttgattatgtaattgcaattctggcaaaatcttgaataatcagccttgtctccaaattaatgtgcagatcaacggcatagttatacatattcttaattaattcttttgtacttgtgcatattgattaattgatccgtggtgtaaatactcgatcaaacctttgaaacactggcgattaacaaattcttaaatgataaattagaaaataaataaacaattgatgtaaagttgcgcgcataaaaatggaaaatactatcataatgtcataaacgtattatattactttattatgatataaaattgattgttgaaattttacaagtccgatcaatattttacaaaatattgaatactacctttattttttaatgtatgatgccgttgactttttgatcgatgtttgactatttatcttattcaaatttttgtgcaaatacaaatataatagttaaatcatactttaaataaataataaaaattatatatttttttatataagatgaacgatcaaacgcatcttaaaaagttaacggcgtcatacattacggagggagtattaatttatgatcggcgcgtgaggaggggggaggggagagttactgtgttcgctagctcagatattgcctattgcataggcacaaggtgaatgatcgatcgaattggatagaagtatgtaggattcatatgccactagttcttgtgattctgtgaaggaagctgatgagctagctatctttatcagctacgctcgtaccaaatccaacaaaaaaaaaagtttgtacgcatgcatgcgcacaccgtccacgggaagaatacagatctgccgcctttggcgtcttgcatgcctttaatttggaggaggttgacttttgagagggagggcaattcgattggttgatactcgtaaaggaagtcgttttggacagcgacacggtttacaaaacacaattttgacttcttttttctataaaaatatttattgaaaagtaatatatgtgcacttttatgaaagtatttttcaagacaaatctattcatataatttttacatttttaaactcaacaatttaagagttattcatgatttatattttaaatgtttgatttaaatattgttctaaaggactttttctatgagtatggaggaagtataattaattagcagggtcatccatgcatgcatcgtcagactcacgtactgctggccaagctagcttaattaattacttgtcgatatatatgatcgttgatgcatgggcagtgacgtgcgactgcatgaataattaccaacaagctgatcgattgatctagcagctgccatactgatactgtactgctgcaaattaattactgtgcgtgtaatggtgaataaagagttgacttataaagaagggtactgggcgggcggtggaatgatgagatttatagtagtaacagtgagaggagagcatgcagtgcagtggggcactgacgacagtggggagcaaagcaacaagaggaattaattagggagaagccatgggatacgacaaggggttgacctgctgcatgcgtaacctgctagcgctagcttgcatggctggcgaccctgcctctgcatgcatgtactcgcctccattcgatcgattacctcgcgtttgcatgttactaggcgcgcagtagcatgcatatttagcttaatttgtcgtgtgcattggccgggactgatctgtgatccatccattcatcttgactcttgagtcagatcgagtcgacactagctagtactcatgcatcttcatcgatctactacttcgtatactccatctttctcgaaaaaaattcatttcttacattctaagataaaattagtgaagatggagaataactaaaatacccttaatcattaaaaaaacagtaatagtgatgggtaggtaaaaggtatatattgaagagataaaattttctgctttacgtgctgagggtaggcagtatggtaaaagttgattttctgtagaacaaaatttaatctgaagttaaattttttttggacagagggaatacaccattggtaataatatataattaagttaaccaagagatcaggtcacctgcatgcatgtatacgtatactgaccaaccgatcgatctcagtcgatcaacagcaaagtcaaagcactacaagctattgatattttcattttgaaggacagggttaaattaaattaagatggatcgagatatcggcggatctaacacgacgagaacgatgagggctcgagcctctactacggataattataggatcatgtgagtcatcactaataatttttttttcatatatatacaagcaaaggaagggtcataattttatttattttatttaaaaccctgctattattttctggatccgtatctcatctagagtcagcttgcatagcatatacacgcatggggtttgttggccttagcgagctggaccattcctgcttcctagctacatatatatattgttgggtggtgcgtgcaaaacagtagtccggagtagtgttacaagtaaagacagtatagtagacataatagccaactagatcgatcgatcgatataattaatgtacagtacatacacatagggtcaacgcatgcatcacaacgttagtactctcttcctagtaaaaagtacccctctctctctctctctaagcaataaaaagtacttggcatttgacattttttatggtcttcgagttatgaatgtaatcagtattatttgatattgaaaaacaagtttataagattatgacggatatgattttccaaaaactattatgagggattctaagagataatgataactgaggtttcaaatattcccaaaatggagtatatataattcaaaacgtaataatgtcttaccagatcgatggagggggcgcataatgttgtaccgtggattgaaataagttcactttagatctctcatcttgacatcgaatttgaatcgtgtcattgaaccataatactagatatagtgtgtcccttcgatttgcaatatcggagtacctaaggtcgcatgactgtattgtgcctagttttagcaacccggcaaaatcaacgtgggccccacacattaacaacctagtcttcttccacctatcaaccattccctcttttctctctctctcagcaggatgtcgggtggtacgaagaatggcgatggttgctaggagaggaattggatggcggtgttgtcactgcgagcacgagcagccgcctcgactcctctctattctaactggcactttattgggagagaggagtcgaggtgaccgctcgagagctccgtgccgtcgtcgcccatctcctctcccgttggctggcgcttgctacccttttccccattagccattgccttaggtttggtgaaatatgggaaagagatggaagaagggagagaggaagagaagaagactaagccgctaacatgagggtcccgcattgattaagccggttgaccacatttaactcgtgacttaagccaaaacctggtataatagtaccattgagacatcggatgctccgatattgcaagttgggggacgtgtggatatgggtaccccatacccacatggcatggttatccgactagttatagaggataacttaaatctattagataaggtaacagatcatgacttgggtattacgtttccttgtatattacggaacggcctaaagtcctggtttgataatattgtagagtagatttaggaaaccaatacggtattggttgaggtttctattttgtaaccctgccccccaacctatataaggctggcagggagccccctctaggggcatgagacaacctgatcgtcagatcaatgcacactcggcggattcaaatccccaaacaggagtagggtattacatctcattgagagggcctgaacctgtctaaatcctttgtctccgcatccatccacttttaggtctcgtgcgctacccccttttattattgccgaattcatgtttcgacagttggcgcgccaagtaggggtgcgtcgagttcctcgtcgaagagtgcgatggaatcaatttcaggagaaacggcgagatcaatctcaccgaattcaatggcttgaactttgaaccgggtttgttcattccaatctaatttttattagattatttttttatcatagatcgatcttctggtatattttcttgtgtcgatcttgtgtcggtcggcggagatcaagctgaagctgtcgacgacgccctcatgcatcgagactttcttcgtgttttgctgacggacatgtggtggctatcgctggtcacagcttaccaggagaaaacactgcatgagttgactcaactgatcaacatacatgcacgatccaaccaacatgcacattacatctacagagttaatctgtttactagttgattctaaccagcaattattttgttgctatctgtcttgcatgtacaccgccggccgtatctactgccggctatatccgtcagcgccgaccggctccaccgtctccgtagtcggtcgccttcgagctgttatcattaggctttacagctgccccggtcggtcatctacatgctgccgactctccgaggtcgcagggccgttgatggcttccgccggctactgctgattgcggcattgcgacccaagctgatcgacgcgcacgacgtatccaagccacgccgtacaacttgggttggctgttccaatttaatttttattagattgattattaattaatccctaatcgccggccgttttgatttcctggcaattttttgttgtttttcacatgatggttgagatcacgacacggccgtcatcgtctacgtcttcaccgaccggccgcttcgtccgccgccgactggtgtttccgcctgcacggctggcttattatgccgccgttgttgggcgtctacgacttcaccgccggcctgcctccgtcgccgccgactggtgtcctcgcctatgcggttggttggtcacaccaccgttcatgggcgtccacgtcttcaccgaccggctggccttcgccgccgccgactggtgtttccgcctgcacggctggcctattatgccgccgctattgggcatctacgacttcaccgccggcctacctccgtcgccgccgattggtgcctccgcctacacggctggcctattatgccgccgctgttgggcgtctacgacttcaccgccggcttgcctccgtcgccgccgagtggtgcctccgcctacacggctggcctattatgccgccgctgttgggcgtctacgacttcaccgccggcttgcctccgttgccgccgagtggtgtttccgcctacacggctggcctattatgccgccgctgttgggcgtctacgacttcaccgccggcctgcctccgtcgccgccgactggtgtcctcgcctatacggttggttggtcacaccaccgttcatgggcgtccacgtcttcgccgaccgactggccttcgccgccgccgactggtgtttctgcctacacggctagcctattatgccgctgctgttgggcgtctacgacttcaccgttggcctgcctctgccgccactgactggtgtttttgcctatacggttggcggactccgccgttgttaatgggcttcaccatctacaccactggcttggttccactggcgccgactggtgtttttgtcaccattgatggactgcttcattcccacatcggctacttctgctgtcaccgagggaatacgacaaagctaagtcatcatttattttattctttatatgatatttttccttttcctctgcctcactacaccaattggtcttccattgagcagtgagtcgggggctacagatgttatatcatattttccataatatttatcttgattgcttgcgacataatctgagtacaaaagtacctatcgagttatggagttctatcttcctatgctttccgtttggtttgtcaatggatggttgcctttgggccgattcctagcacccgggggctcgttggatggaccgagtaacgcaaggtgctaagtattattcggaataaatcaaaagcatagagataagataatttattttctgctcttaataattaaaagtacccgagtagtaaactccgatccgtgaaactttgttccattaatgacgaactcatgtcactcatatgcatgtttgggaaatgcctaggtcgactcccgatgcttgggggctatgactagtcggacagagtgtttaaacgtacagagtcatctgctcggggaaatcaaaattgacaagaggagaaatacatatttataaatattttaaaatacttgattttttctcgagtattatatttatatcagatactactcatcctatatgtttgttctgcaggatccagatccagatatgcataaaagggattcatggctttaagcttatctcttacgctccaggaatggatcagtcagaacatcaccaccggctcgccttgaccgccgccgactggtgtttccgcctgcacggctggcctttatgccgccgttgttgggcgtctacgtcttcaccgaccggcttgccttcgccgccgccgactggtgtttccgcctgcacggctggcctttatgccgccgttgttgggcgtctacgtctttaccgaccggcttgccttcgccgctgccgactggtgtttccgcctgcacggctggcctttatgccgccgttgttgggcgtctacgtcttcaccgaccggcttgccttcgccgccgccgactggtgtttccgcctgcacggctggcctttatgccgccgttgttgggcgtctacgtcttcaccgaccggcttgccttcgccgccgccgactggtgtttccgcctgcacggctggcctttatgccgccgttgttgggcgtctacgtcttcaccgaccggcttgccttcgccgccgccgactggtgtttccgcctgcacggctggcctttatgccgccgttgttgggcgtctacgtctttaccgaccggcttgccttcgccgctgccgactggtgtttccgcctgcacggttggcctttatgccgccgttgttgggcgtctacgtcttcaccgaccggacgcctcgaccgccgccgactggtgcttccgcctgcacggctggcctttatgccgccgttgttgggcgtctacgtcttcaccgaccggccgccgcatccgccgctgactggtgtcaccgcctgcacggctggcctgttataacgccaactgatgctatcttcttcacggctggctacatcgctgtcactactaataggcatcagtatcttcaacacaagctacctacgtttgccatggctgccgactggtttcttcacttccatgactgcatgattctgccagtgttgattggccttaccatcttcatcgctggtcgtctcgtctgctgctgactagtgccctcgcctctacatctggtttatacagctaccactactgatggacatcatcgtcttccgccgccgactcgtcttcactaccggtttgcttctgttgccgccgactcgtgttcacttcatcacggcaacacaactttgtcatcatggtggagcgacttcatctttattatcttcggcactggcaaactctattgctgctacttcacaagttttgctacatcaccaaccataacgttgttgtgaatctcgacatatcggcatgcgacgccgtgttatttaattacaacaagtggctctccaacattcatgatttctacttggacatcttcaacacatatcttcaatcaagtgatgactactcgacaacaagaagctataattctcgactctatgttcagttgtttcccaactaatcaaagagtcgggggctacacaaatacatggctcaaaatttgacaagctttatgtcaagatgaagcaatcaattaatcagccaacaagtcaactctgggagtcatcaattttgtcttcgcttcagagcagtaggtcaagattaaatttacatgtctgggagtttggagtcatcaaccaatcaactcatatcagattcactgagttgaacaacagcatatactttcctccaagtgaagcatctacaacagtttgatggattattgtcactgacatcatcaccagcacctctgcttcatcggctctgacattccgccgttgctaatggatgattaagacttcgccaacttgctatttcgccttcacggttgaccaactatgcaaacgctgatgagcgtcttcgtcattatcatcggcaattacaccgctattgactggatcaccgacatcgtcatcttcatgattggtggatttcgtcatcgcctttgatatgcctcgtctgtcaccgactgattatttcgctgccatggctatacaactttatcgctgggcaccttcatcttcattgatggctgacctgactgttgccgactggttgcttcgcctccacggctgtgcaacttcatcacttttgattggtatcactatcttcactaccaccaatatttttgccacctctgttgggcaatattatctctatattggtcgtcttgtctctatgccaactgcgtcagctaccatcaatgaacaatcgtgactacgtgctcaggggcttactagctcaattacaagtattatatcttcaatttggacttgctccggatacatgcaacatgaattcatgatcataggtctattttatatgctcaaagactggactatttattattccccgtaagggttatcaactgaatacttgcgccagtcgggaatcaattgttacatctattttggagtatcccataagggataatcactcagattagaagctattcatatgagctacgcttggtctatattacccggaagatttattactcgggagcatgttatatgcgtcatcctttaaagggtgtcgaaggcatattttttggcctaggcctaatatgtctgcagcccatattttcaggtgtggcctgtcacgttcttttagggacttaggcactttttgcttaggccaaagtgcgcgtgatctagtgcccaataccttaaaatccttttataccgcagttactcaactttttaggagttggtacaatgcatcttaaaaggtgtcaaacagtaaagctttatatagctgccccgctgactttttatatagtcatggcgctgtttgggtttatcaagcaattgattgaatacaacatcattgctttttgccacgtaagtgtgcatttttattgaccaatattatggcttaggctgattatatattttggtcattttccagacgattgataaatccttatgagtttatttactcggattttataccacatatgccatatatttccaggtgtggtgaaaccatgtgtcttttagggactaaagcacgtctgttaaagcagtgtgcgcatggcgtatgcccaatactttggaaatttatttattcacaacatacaagcttctttatagctgttttgctatgtgaattttcaataatgtagccaactttaggttacactcatcatattttacaaagcagtcggtatatcacttggatcatgttatttggaggattcacaccgcatatgctatatattgatatcaagtcacttggttgattacaattatcaaaaccactcggttggttggattatttattccttgactatatgcttggtttgttcaattaaccacattgtcgggggctacacctattaggtgcatctagtcggtgcacctgactttattttccagccctccacagtcttcagatttggtaaaagtactcgggagaccatgacaaagatgattgaagcactcggctttggagtaatctggttcgagagaagattatcttttcgactgcgaaggtctcaggggctactgtggatattatgggtaccccatacccacatggcatggttatccgactagttatagaggataacttatatctatagaatatgtaacagatcatgacttgggtattacgtttccttgtatattacggaacggcctaaagtcctggtttgataatattgtagagtagatttaggaaaccaataccgtattggttgaggtttctatcttgtaaccctgccccccaacctatataaggctggcagggagccccctctaggggcatgagacaacctgatcgtcagatcaatgcacactcggcggattcaaatccccaaacaggagtagggtattacatctcattgagagggcctgaacctgtctaaatcttttgtctccgcatccatccacttttaggtctcgtgcgctacccccttttattattgccgaattcatgtttcgataggacgttttatatctagcattacggttttggaggatggtatttaaactgtacgtcaccatgagggatttaaggtgaactaattccataaacatatggccacgaggcccgataaaagaaagagtacgtcatggggcctacctctcccaagagaaaagctcatacatctcgctcgctcggtttcttgcggagaatgtaatgtttgggggctttgggcccaattttgatcgcaagcagttgcgggcggcgaaacgatttccgtgtggtgtcctggcccactcagattcacgggccgaatttttgctttgatgctccgcctaggggtgagcgatggatgggccaagtaatctgttgggcgaaaggtgcatgcaagggcccatttcgtgttggtgagctagctgtggctgcttcttcttcttcctcttggtcgtcgtcgtcgtcgtcgtcatcgcttggatgtaccaaactcaagctgtagagacaaacgatatcgatcaggccggtgaaacttggtttttagacgaaggacgtaactaatattcagttggtttaataattaattaacgtggtctttctttcactagctaagcttgagaaggaaaaaagaagaagaaggggggcgtactccagtgtactacagggcagggaaaataaagatgcatgcaagcatgtgtcagccaaataatgggagcgggcgggcatgcatgcatgtcgtcggtcgatcgaggccagggcagcagagcagagccggcgggcggggcgggcgggagtggagtggacaggtcatggccggattctcatgcattttatttctgcagcagccagcagggcagaggagcaacgcccagccggcgctacgtgcatctgctctctgctagctcgtgcatactgccgcccttgcctgcgcatgcatgcatgcactacgtactactgtgcctgaattattcacaccagctgttgtagctactccctccgttccgttttagatcacaacacgttttgattttggtcaaagtcaaactgctttaactttgacttagtttatagaaaaaaatagtatcattttcaacccaagaaaaatttattacgaaaatatattcaattattgatttgacgaaattaatttagtattataagtattactttatttatctataaacttagtcaaacttgaaacagtttaactttaaccaaagtcaaaacgtctcgtaacctgaaacggagggagtagtagccatgcaattcaagcttaaaattgcaagctagtataatcttagtaatgcttaaaattttcatatttagtaaatcaagccatataacaaaacaaaagatatttacataaaccttttaaataagatggatagttaaatatgatgtaaaagtcgacaacgttacacattagaaaacggtgatactccctccgtttctaattctttttttaagtcaaaattatttaggtttgaccaaatttatagaaaaagttagcaatatttataacgccaaaattagttttattaatttaacattaaatatattttgatactatgtttatttaatattgaaaatgttaatatatttttctaaaaacttaaaaaagtttgattatttaaaataatcaaacaacttataatgtgaatatgaaacagatgtactccatccgtgctaaaaaaacacaacttagaaggagatgcgactcctcctagtactacaacgaatctaggaaagagaatggtagtcacatactgttctaggttattattattatttctttggatggatggagcagtatattgcagaccaattaatctggtgcgttgcatgcctgactctgatgcccccagctttggtagctactccctatagatcgatatgactgacagaaggatgatcgatgcatggaacgacgacgacggacatggcttggctgatcgatctgcttcccgccgctgtcaagcaccagctaccactgcatccatgcgcgcacatctcacatgcatatgttctggttgcattggttgggcgccagcactagcaaagatggatgaggtgtacgtccaacaccccagggccagcatattgcagcgcgctgattgcagagtgatggcctactacaaactaatagcagccagccagccctttagctatctatctaactccaacatgcatatagtacgcactttgtaagacaatgtctcaagaacaaaatatgtgctacataagtaccactattttccgcgaacacccaaaaggattgcacatcaatatataattagaaaaaaaaagttgaagttacacgacgtaatcagccagaccggcttatgccagggaaagcgagaaaaagcaaattaaaaactgaagcttagaaaaaaccatgaaccattaggagggtaccacctccgcaatgtaggcaacattcaagtgatttttatatttcggcccctgattatttgttattttcagccactgttgtaatacttgtcgatcattaacgccaaatcagttaaaacttttacattttagatcatgtaacagacaataagcctacataaatacccctaaccattttgtaggttcacctatccttgttttttccttctcccctagctactttctggcacttggacgatagctcacaatatgcaggagtatataactggtgcaggcaggcatccatgcatgcaatgcagtttgacggtagctggccgggatcggataggatcggaatcgcatggatggattcatcacctagctagctagcaatgcaagcatgcatcaaatcaaacctcgctgtcagcaacaattttgcttgcaaggagctcaccgatcaatccagtatagctatatgtacttcctctattttcaaaatatatatagtaccgtagcttaacaatatactccatctgttttcaaatatatatacttcaggttgtttaagtaaagattaagattaaaggaaaacattctatcaatggttcaatatattttgaattttaaattgcttggagtcattttctaagcatttggttgactgaaaaatgtttacatttttacattgaaattattatctagttgtgcataaaatttggacttgcttatgtttggaaacggagggaatattgtgtatccatctgtgtctcttttttttcacaattacgtagatccgcccttgtatgagtgtatccatcttgatctttagctagctactctctctgtcccataaaaaaatcaatctagtaccggatgtgacacattctagtaccgtgaatctagtcatatgaatatgtcacatccagtcttatattcgtttttatgggacgaagggagtagcgatcggtctttttctaacagccgctggccatcgaggcacatgcaggatcatatcgtcctcgatcggctagacggctagctagcttcattcgttgccttcctcaacataaaataaaattaaagctctaaagtatgagcaatgcttattcccacactaagcaataaggctgaacccgcccgttgtcagctaaagtaactagcaggaagacctcataagagcagggataatagaggagactgctatgggcttatgcaagatgttatagccagtgcatataatagcatgctctgtacacatactctactacaaataaataagcatttttatatgtttggtgggaccgacatgtcatataccttctttctcttgatatggatccaagcagtcagcacgtctaggcgctcgtgcctagcgggcggttgaagaagcgccggcttccttctctcacatcgctttttctcttccacgtcagctcgagacatcatctgttagctaatcgtctacttattagacttgctctaagccttggtgtgacttaaaaaagtgaggtgacactcatcaaatttttttactaccggtaattcggttaattatgtgatctggtagtagctatttactactctcaaaatatttattaatggttaactaacaagtacatatttaatgcttagtatatgctataccactgtggatgcactacttttgggtttgggaataggaataacgattgaaaatttttgctttcatcatacatattcaaaattccaaccatcaaatctatattagaaaatattcgtaaaatccgataagtttataatattatgactaaaattttcgttgttgtagatagtatttatttcttttttttcatgctactaaaatgaagttaatatagctattgagggcccaaatttttgtgtggctgttaggacaggccctgtgttggcttacgtggaggttgaaaacccagcgtgtactgctcctgccgtaagcaaaggtggaggtgacaaactgacggggacacggatggacggtcgggattgatggatgggcaaatagatggacggatacgatggatgggattggacggaaggctgtactcgggccccgcggcccagcggtaacttgacaggtgcagcctttatactgtacagtagtagtggaggtgtatttgcagctgcggcatcagagagagactactgtccagcaacatgtgctagctcgagaacatcaactgcatgcaaacagtacaacagcatgttgttttccaatcgatcaaaaatatttttcttttcaggtcgtgccatgcttgtacagtatacgtacataactgctctctgctcctcctctcttttaccgctcctgcaatccacatactgccaagtaatttttctcacaaccctactacagtagctctgacgagtactccatggaggaggagtagtatttgtttttctttggcccaagtccaaaaaaggtcccatgggccgactattccctagtcggctaaggtgtgtttagttcatgtcacattgaaagtttttttgaaattgaaaccatgtgatagaaaagttggaagttggtgtatgtaagaaagttttgatgtgatggaaaaattgttaatttgaagaaaaagttgggacgtactctccgcagcctaagaagaatactttgattttatatatatatatatatatatatatatatatatatatatatatagaaaaagagagagagagagaaaggagaagtcgtcccttgtaataaggtaacctccacacaaattttaagtaactagagagaagaaaagaagtgcattgggtagaaaatgtagtcaaagataatacattgatctctaggttaactttaaatttgtgagtagatgacgcgaataaaattagatgtaaccatcacctttaccgtaaaacttgctctaattcatcactctcctattatcattcacttatagaagttctataagtgccaccttgctgcttcgcttgagctcctctgtcgcattgttgttcttggcagggtctagtgtagacgaaaagaggtgtattttgttcaggaacataatgatggatcctagaaccccatagtacactattgaagtacagttggaatattcgagaatgaaaaataaaactatatatactcgatcgatggatcgatctccacttggtatatgtggcactacagagatatatgaccgtactatgcatatgggactttttctttttcacaattaccaagagagattgatgagatcaggcagcaagacttgcatccgtgtacgttagtggccggatatccatgcaaagtgttacaaaagtaaggcaggctgtggctgctagctagcttcctctcaagctcatgcatgcatgagaagcggacaaatcgagcagattctgcagcatatataagcatcgcatctacatatatatacgtacgtgtacatgtgccgctagttcgatctcactagctagctagtggccagtgttgtacgtatatactctctccgtttcaaaatgtttgacaccgttgactttttaaatacgtgtttgaccattcgtcttattcaaaaaatttaagtaattatttattcttttcatacatttgattcattgttaaatatactttcatgtacacatatagttttacgtatttcaaaaaaaaatttaataagacgaacggttaaacatgtgctaaaaagtcaacggtgtcaaacattttaaaacggagggagtatttgtgatttgtgatcgaaatgcatatatgcaagctgctaaagagactagagtagagtcgtagtagatgatcaagctagaaatgcccaaattaaagtatactaattacgtatgctttttttttgttaaaaaaaatgaattgatcgattgatcagctggtcgtggtcagtggtcgcgtaaatggcacatgtaggagtatactcctactacatgaagagaaggcatgcagtattgtactacatgaaagaaggatggtgaggtcaggtcatgcatgggatcctgtgcaacacgtacacacatgcatgcatatacgcagagaatcgcatgcagatgccgatgcaatatgtgccacggtcgatatatatcgatcataccatcaattcacatgcatgcatgcatctgtgtgtgctagaaagaaattaaagaaagaagaatcttcttcacatactccacttgggagtagtacatgatactatcatgcatgctggcacggaccgcttcaagtttagttgcgatgtactactagcagctaacagtcaggacacactgtgtactgttatgttagcgtggagacgagccagccatgcatatgtagtgctgtcatctgttcatttgttgcttcagcgtacgtacgtaagtaatagcagctggctgcatatatatatatatatatatacatacatatatatatatatacatatatatacatatatagatacatatatatatgtatctatatacatatgtatatatatatacatatgtatatgtatatatatacatgtatatatatatatcgaccttatctgaatgcatggctagcttgaccagctctacctagcttacatgcagttccctttaattactttccacctgcgtgcatatatatataagctgctgcatgcccaggtgcaggaatatcctactccttacatttctatatattcgataccgttgacctttttagcacatgtttgaccgttcgtcttattcaaaaacttttgtgaaatatgtaaaactatatgtatatatatatataagtatatttaacaacgaatcaaatgatagaaaaagaattaataattacctaaattttttaataagacgaacggtcaaacatatttacaaaaatcaatggcgtcaaatatttagaaacagatgaagggggtatatataagtatggcttcttaatcaaatattgctaaatagcagatctagtactacttgtatgttgcaccaagttttctgaaagtactacttatgtattattcatgggtctctcctaaggaggccacaaaagagctgaaaaataaggttagttacttagagactgtttggtttggtgccacacattgccacaccacatgttaggcatgccacagattgttagcttagcgtttggttacttgtttcagttgtggcaaaccacactttcttgtttcatgggcctacatgtcatatactcattttctaactaaacattgccacacttgttgccaacaaattgttggccacactttatttgtcatgccacatctatgacaaattgagttatggcaatgttaggcaacaaccaaacagacccttaattactgttcggaattccactatatatgttactatctatatatgcttgatggaacgtagcgagctacgtaacaagctcaagctggctatataatctttagcttgtaaacaaacgtacgcatgcaagagatacaagagatgaagatggatggacgacagctgtacgcatcgtcgtcatctatgggtattggaattgcatgaagccagccagctagctagccatggtagctggagtagctagctagaggtcgcataagtggggatgtcatgcattgaagagagtttgtttagtttcctctaaaggcaggccttttataatttctgccatgcctacccgtcgatcgttgcttgcatatgtacgtacacagcacgatcgatggatctatatatacatacatacatcatatatatccaggggcggatccagaaataaaaaattggaggactcaattacacagtttcttaaacctccagtcatctagagacctttagtttatcatttatagtgaaaataatagaagggggtgttccaggaggtatctataggtcttgtgggtgtaggggagactcgagtccccctgcacccgcgttggatccgccctatatcgatgaaatgatattgcatgacgtacgtgacgtgcttatgcatacatacatacatacatacatatatacatatatatatatatacatatatatatatatatatatacatatatatatatatatatacatatatatatatatatacatatatacatatatatacatatatatatatgcagctaacagcagtgaaattcaattactactcttactccagtaagtagcaaaatgcagatcagggaacgcatgcagtaaaagcctccgtgtcttttggcccctcactaccgatggcgatgtctaaccaccactctatgtatacgtatgtatctacagatcgagctagccaccatggctacctaagatatataggagtaatacgtactccctccttccctaaatgtttgacaccgttgacttttttaaatatgtttgaccgttcgccttattcaaaaaaaatttgtgaaatgtgtaaaactatatgtatacataaaagtatatttaacaataaatcaaatgatagaaaaagaattaataattacttaaatttttgaataagacgaacgatcaaacattttttaaaaagtcaacggcgtcaaatattttgggatggagggagtatatgcttacgtatatcaattgcaatacatgcattgcttgcattggtccctccggctagatagctagtcacatgcatcatcgtcatacatacaagtacatgcatgtacagtgacatgaacagaaagtagtgtagtatcgtagctcctcagtccttgatcgatcactcgcatgcagctagcttcatcagctcgaccggtatcatatatgtgtacatgttgatcgatcgagttgagtatatgactagtctgtgtgccacaatagcatgcacagtgcataactgtttcagtttggcaggcagaggtgcgtgcagataagccagctaagccgcccgtttcgatcctctgtatttatatgtgccatcctcacgcttgatggcttggcatatgcatctctctctctctctttctctctcagctctctttccctcttcctccatcgatcgatctcttgcatgcaagagcaacctgcttcgcttcagacaaagctccttgctacctaacaagctatagctgtagttgaacacacaacttgtgtccagatcgaccacttcgtcttctcttttttatttgtttcaattcgttcgagagctagtatgagatagaatattaaccgatggagagagaatgtctagctagattattcatattttgaagatatatatatatatatatatatatatacacacacacacacacacacacacacacacacacacacacctaccaccggcctctccttccccttctgccttgcgtattaaagctcctttttaatttcagcttgcagtgtatgtatatatatatatagctgttctatctttctgaagattcttggtaagcagttagctagctttattcctttggctctacctcgctgttgtctctgctccacctagctagctagctacctcttcctaatcgatcgcttcttcttcttcttcttcttcttcttcttcttcttcttctttttagtatctctaactagctgtgtgtatagagatattcctgggctgccgcaggttatattcgttattcttttcctattcttaaaacaaaaaaaaaagttgtagccactatatatgtgagagagaactagtgaacaaaggggatttctgtagctgcatgctaggtagctacaacatcagtaatctcgatatacgtacagtactacaagatagtgcctcgatctgccggcagtagagagtgtgatgccgcagctagcagtcggtgatttctgacgtggcatcatcaagattcacacattacattgcatgcatgcatatgtctatgcatctttgagcttgttgttctgatctcaacaacctagctagctaatatttctctcctggccctgacctgcatgatgcatggttgcacgcatggagagagaagaaagagatcgaagctaattaaacgcatgtgtatatatgtgtgggaatcttgatgatgctgcatcggaaattaatgactaagcatcagcttaattgtaccaacgccgccggcgagagtgatcctccctccctctttctgtgacacattgactagcaggtaagaacttatttcaataaacttgtttatatctagatgggccatataatttagtgtaggttaatttgtgaaattaattcactcacatttgattttttttttcagttgcatatatgtattcctttttggaggactggttatgacttagctaagctagctagggaggacttcacaagtcataacaaataagttgaatggttaaacatatttaaaaagtatatggtgctatatattaaaaacaaattaaatagagtaagttattactggtataacatcattatttagaaaagagagagaaaaaacagtgtgcaagttatactccacagcaaggagctagtaacattgacttttctttttgtcctgtagcgatggatgcatgcaaaaaaggctagtaggattgatgcggtggggggaatcaatcaaatccagtcgcgcattctacgggcttcaattcgatacgacatgtatgctgatcgatcaatgctgccagctagctgcgtacgtacatactactgtacgtatatactgtatgtacttctgctcctgcagctatatactgtacgtactacgcggtagagcactgtagcatacagtacgtacgtgtaggagttgttgtaatttgcagccatataggagtatcgatctctatcaaccatatggttcacaactccactccaaattataagtactaagctctgctaacattgctaacattgatcgatccatctcatcccaggtaataagtatatacttaacgcaatgtcacaatctatctaaaataagtagaatgtaacattttctactataaaaaattctgatagaggcatatatctagatcctattgcgttagtaaataacatatcttattacaagctaattattttgtgaccgagaaagtatccgggtacgtagtaggagtagtatatacatgcaggtagggtcatcatcacaggtgctagctacagtaacttgcattgtgtcaacaactcaggtcctgggctcctggctacctagtgagagctacgactatactacctagcaagatactactaatccgtactatactatgctcctcgactttacatggcggccggatatatggatcgatcgatatcacattggcacttcatgtactccatctgttaacgccgttaaaatttttaaacatgtttaaccgtttatcttattaaaaaaattaaataattattaattcttttcctatcatttaataaatatactagtactacttaagtttttaaataatatttataaaagtttttgacggttaaatatgtttagaaaaactaaaagcgtcaaatatttaaatacggagggagtatatatgtaacgtactacgacactacgtacgtactatatactccagtagaccactgtacaagtatagttatctcttcttttcgcaataaataaagcacatcatatcaggagtgacgttacaatattcatgtcgacacgtcgtatatgtacgtacgtactctactatccgtagcattacacaggtagctaagctaggactaagagtagtacgtacgtatgtatatatatgtacttaatacatacgcatacatgcctgtatcattcatcgatcctgtacaacgttgtagactactcacttctgattctgacttcttgtctcgtctcttcttcttcttcttcttgagctcactactagactggagtaggagtactaggcccacaaacccacaatctgtgcatgggccttacctagcaatagtccgtactaaagattctgtaaaaagcccatttggaaattttctagcgagggactattttgaattttagcccaacagcaatagcagccatttgtctcaatcccggaacaagtccactttgtcgccctaaaagaatgtactaatgtgatttgtatccatcaaccgcaatattagattagatatcataacccctcaactataaaaacgggtgcaaaacaattctctcgggtttttgctgacatggatcgttgaccttatctaactaagtaagacagcatatgggaccagttgaggggtcaaaatatatggtattgtggttgagggatacgattcagataggacatataactgagggagttaaagtggactttattcctcccaaccccacatgccacattgtacatttgtacacaacccaacccatttggaaaatgaaatggatgtagtagtagtatcatctactgttacgcatagtgcagtgccatgatctagagattgctgtgactaactggtcaggcattaaacaatttttaagcacgctaattaagctcaaaccggccggatccgacactgctacatcctcgagcacagtgccggcatcgattcggtttcgctagctgcaactgttgtccctgctcggtcagcttcagttcgtcgcaattacagcaattattaccaactagtataaattaatacatatgaagaagataacaaagaaaattggactacatatttatgtagctagctacaacaccaactttaaaactatgtatttatgaaaagtgataccgtgtattaatggtgtaatatatacttgtagataaatagattattagattgactatcaataatttagagttagtaattgactatatacactattaaaactgctctatattcatactgactgacagtggcggagccaggataaaattataacgggggctaaatcaaaatgaccaagagcaactaagagagatttagggttggttttaaaactttttgggccttcttagtcttttgggccttctaacaacctcaaacaaagtctatattagcccctcatctataaatatatagattatgggggctttaatggtatattaggaggtagggggtctaaagatccccttgcccccatgctgtctccgcccctgctgactgacagcttaatttctctgcttcccttaattattcttccttgtttccctataaaaacctttgcttttcacttttatcgagtatatattcggcgctcatctgacagtgtcgtcgtcctccttgtgtgtgtgcatcgatgagatgcgattagttttaagtaattaatcagtcattactagctagctgcagtgggggaaacaatatgtatatatataatacatatgcataatttgtactccctccgtcttataatataaggg

SEQ ID NO: 24044 - DNA, 15519 bp, Oryza sativa
tcccttatattataagacggagggagtaggaagcaatgggatccaaccctacctggcctacatatatggatgtctccttttccattgatcgagatcgtcctctctgcaaattttctgttcctatcgcctgcactacactgctgatagtgatagccctcctcccccacaccaacattttccttccttttctttagtttccccctgcatgcaaatgtctcacaaagcttgtcacttgctacatattaaccatactgctctcccatctaatctaatcctcgaaaaaaaatacattatcacgccgatcgatcggtcgactctctatagctagctcaataatgtatatatatagtaggagtttgattcttttttttttactatagtgtcagttgcttaataatgttgacccatgcaggatgtgacatataccagatcaaaagtgcatgcatgagctcggctatgcattttcaatctttaatttttccccctcctttctgcaaattaatactgtgaaaagaattatttgccacattgatgcatgtatatattcctgcactcatccatgtgaatgtggcacttgcattttgattgaaactagagaggcgccaaagggcaataaaagtaaaaaaagaaaagaaaagaaaggctttagcttgggaatgacaggagtacgtacgtcatggtggtaaagtgcaacggctacataataacaagcttggtggatggaggaggaagaagaagaagaggaagaagaaaagaaagaaagaaagaaaggtagggaacacattggcaatcatgtgatgattcagaaagagagatgacacttgactacactggacgactagcagtagcagcagcggcagctagcaaagagagatcgatgtgatgcagagcaaagcatgagggactagtagtggttattggtacactgggtgtgagtactacggttggtaggtgtaggtaccaagagaatttttagatcgaagccaagcctaacgatatagtatgagcgatgagatgcaatgctgcaatggtagctagctcctgctgctgctgagtaggataggtctctttctgtctgtctcaaccatagcaacatcaacaacacacacacaaggactggattattttttatactattcccctttgcaaaaagttatttcacatatagacccataataaacatattgcaaaaataaatccaaaacttggcacaagagtccttggcggtgatcgaggttagacatctcaccgtcaatcttgttttcacggtacataatttgatgaatcggaagagaggttggaggagaaaatgaagttgtttttttggaagggtacacgtgaaaaagggtgagtgacgattccttggtgcgttgagattggcgcgggcgcgcacacggctgtcggatccaacgggctgaggtgggtgagtagcccaagtactcctactggtttcattgggtcccacccactcccactcccagcagaagatagcagagcacacacactccactactccactgcactgcagtctctctctctctctctcgcaatcagcattgcacattttgcattgcatttttattgttattattctcaggctcatcagctggatgtccctagctcttgctcttcttcttcttcttcttcctagtccccagttcattctcgatctgccaacttcattctcccgtctataaatccatccacagctagccacccactctctactggagtagttgtaattgtttagagcgtgtggtcgaattaatatccatggaggacgagaggtggaagctgtcgagcagcaaggggaggagcaaatcgggcagatcctgcagcagcagcagcaactactactaccactcctccgatttcaacagcagcaacgccaccacgctcagccggagctactccgccagcgtcaccgccagcaggcacgctaccaccgcttggtccgccgccggcgccggtggtggtggcgccagcagcagcagcagctcgcagcatcagcatcagcagcagcagcagcagagcaacaattcgcagcggctgtcgaagaagtgcgtggaggcggtgaaggagcatcgcgcgaggttctacatcgtccgccgctgcgtctccatgctcgtctgctggcgagactactagctcagtctcctcttccttcttctttttcttcttcttctagctcagtttgattcaattttatttatttgtttcccttccataatactccattgctagctccatgcatcatcatcatcatcatcatcgatctctgtgtgtttctgcctgcatcttaatttgttctttctgtaattaatcttgcattgctctctctacaagtatatacttactagctagtagctagcattctcatcttcttactatctatttagttccttcctagctacctagtcgatcagctagtccaagtatgtaatgtatataaaggtgaggtgagctagtcgtccgggaatgttgattttggagctagccgatgaattgtgcttgctgatttctgttaaatatttatgaaatgccaatggtatatatatcgatctggctgtctgtaattctcagtatttggaggcaggcaggcagagctagagtggaggcagtcaattgagtgacgacgactgaagccaaaaatgagtcaatgcatgcatgagcatgacacggatggatgcatgctagggatttgaatcatcatcatgattgatgatggaccgataatccaaagagtaccaataataatccagaggagaggagaggaaagaaagggagtagagtacagtaggtgtgggggcattggtgtctgctaatgagtgaataatggttggtcgtagccgtagataggcagaagaataatacatactctactgagtatatggtccagtcccgggggggagctgagtgagaaggaggcagggcgagttgatcagatgaagcatgtgtgcgtagaccaagtgtcgtccttctcctccggcccggccccccatgcatatgccttcctcacctactcgctcctcctcgctaaataccactcactcactcactctagtgtgcagtgcaatgcaatgcaaagtactcatctcttccatttcaatcaattgactagctagtcgtcggtcggtctaggacttactccctccgtcaaaaaaaaaaaaaagtcaaaccccaggtttccgtgtccaactttgactatctgtcttatatgaaatttttttataattcgtattttcattgttgttagatgataaaacatgattaatattttatgcgtgacttgtctttttaattttttttatattttttttaaataagacggacggtcaaacgttgcacacggaaactagggtttattttttttgggacgaagggagtatatatcttgggcgttgacgcctgctttaatcaagccgctaattgattgaccaacgtactagtgactgcatgatctgtacgtactactatctgtctgtagctagcttatcagattaatgcatgcattcatgctcctatatactactccagtagtggagtagtatatgctatgactaggagtatctgatatcatcgatcgagcagctgctaatgctgatgctcatgtcgatgctatggcggattggcaggcgaattgaagggcagtgtgcacaacgtagtagagcttgagatgcagagcagagagcagagtagagagcagatgtgacgggcgggccacatgcggcgcacgtgcgagattctgttggccacgttaattggttcatgcatggatctgctgcccgcccgtacattttcggttgatagtactaccctcatttctccgcctgccaacacgaacaccacacccatgcaaatgcaaccaacccctcttccattttactcctccacctatctactagctagtactatactctatttactgtcctgtaaatatcatcagttactacaaacttaactacaagacacattaatcaagcatctaggagtatgcatgctgttacatactgtatactactacactctgcatatgctgctactaacattgttaacatgtcatgaatgctgagcaatgctagcaaagcaatgcaatgcaatgcaaagcgaccagatctgtgagttggaggcctcaacagtgcgtgccgattacctttttctttctttctttctttcttttgccactcatccactgcaggcaggcaggtcgtgcagctgcagcaacaggacagcaggccccttctccttggctctgtgtgtgtgactctcatgactcacacgctctctgatgactactagtgctactaggacagctagcaatttggccctccatccctgaaacacacacaaatgcatgtgcacgcaatccatccgtctatctgccttgagtattttattatgaaaaataagacttagaagattaaaaaaaaaactagtactgctacattttgctttaggtgtaaacatatatatctcattatctaaaggggaaaaaagaggagaggtatatatatatgtggtctatctatgttgagttttgattataacaatccagattgatcaatgcagttgtgtacaaaatgctattggatttgtaaaatagaagaaaatgcaatatgttataaatataattccacttttaaagaaggagcactctagttttcagtgatataaaaatacctacaaatttcagccactttcactttgtgacggctttgatcatgccaagatttgtataggtgcggcacaataaccttatcctctccccgtcccttctttcctcctcgtaatgcatttggcctctccaccttgccccgcacatttgtcacccatgctcgcaggcttcataagtcaccaatagcgttggcacatttcaccagactccacccttcctcctcctccttatgcttatgcctgagtggccgcaggtttcctcacccttcccgtcttccccttctctgatatagtctcctggccacccctctaaatcccggtgaaccaccctcctcatcttcccctaacccacccctaacttctaattagtaggttttttgtcataatttaggttttgttagtaaagagaaagatgaagagatcgatcatcaaggagagtgtcgtcgtcgtcgcaatcgctgataagcccgggctaccccctacccccaccaccctcttctctctctttaatttctctcttgttgcctcccctagtttggaggatgaaggatgaaggtgactcgaatactatgattagttacattactgacatagggttatgagaaccaacaaaaatcaacatgttgatggaatggaagagagatggacacgaatgtatatttaacaagtgcatatgtatttttataaatatatatatattaatgcaattatatatattaaaaatagatcacatgaaaaatcctatatatatcttaatttattatgctcagtttgtggttgctatgttgtgttatggttgttttattacaaaaccaaaaacttacaattaatggttgtatatgttttcttttacagatcaaattatagccacttcaaacggaattttaatagtagtagtattattgtttgtgacatacagattataaaaagaagggggggaaagggaaattgatgggcccgtgctttgtggtcaggtcgggtgggtcattgtatttcagttgaatttaatttgtgtcggcccaaccccaccactggcccatctgtgctctcgtctgcctctgaaatgcatgggtggacgaacaggtcaggtcgtccttttcctgacgtggccagtccttccttccaaaataaaaccatctcgtataaaataaaatatctttatagtataataactaaatctaaatagatgggagaaagtatgatgagtatggatttggtttgtagaaactgttctcgtttggcccagcttgcaagtgtacgggaggaatggtagtaattttcttcattttcagtgaactcaaatgggtacaattttggtggatttgagtacagaaaacaaagtacttctttgacatattttctttgctatgcttgctaagctgcagctagctcctttctggttcaacttgcagcttggaaattgatttcttctctacgataatgtgtcctccaaaaaggaaaaaagaatatttgaatcaagttgcagtagatttttaagttaattattagaagaagagatgggatacatttcacataattcgatccaaggggaccaaattaaacaaactgtggccataagcatatacttcttccgtttcacaatgtaaaactttctagcattgctcatatatatatatatatatatatatatatgtatgtatatatatatatatgtatatatatatatatgtatatatatatatatgtatgtatgtatgtatatatgtatgcatgtatatatgtatatatgtatgtatatatgtatgcatgtatatatatatatatatatatatatatatatatatatatatatatatatgtatatatatatatatatgtatgtatatgttaatgaatctagccacatatgtatatagattaattaacatctactccccccattctaaaatataaggcataaccaaccctaactcaaagaccaagaaataattattaatccctccgtattttaatgtatggcgccgttgactttttaatcaacgtttgaccactcatcttattcaaaatttttatgcaaatataaaaatacttatgtcatgcttaaagaacatttgatgataaatcaaatcacaataaaataaattataattacatgaatttttttgaataagacgaaatgtcaaacatttgtcaaaaagtcaacggcgtcatacattaaaatatggaggtagtatcatcttgtagtttgtatcatcctaataaatacaatgcatgcatccaatagaattagagaacatgagagtagaggatttaaaaaagtaataatttcatggagaatgggccatagttatattatggattatcaaaaaaaagtggttgtgccttatattatggaatgaagggagtatataaatatggacaatgctagaaattcttacattgtgaaacatatgaagtatatgcgtgcatctcccaatcaaaaccaaaattgtaagcaagagctggctaagccatacccggttaatcccaacgcaatgttgaccatcgatccaacccaattattgagaaataacgagaactacctccatttcatattataactttgactcttttttttcgttaaaccatcaatcaagtttgcaaaagaatttagaaaaatctataacaccaaattagtttaactaaatgtttgataatttgtgtgttttgtgttataaatgttgctatatttttttttataaactttgctaaacttggaacaacttgactagaatcaagtttgtagaagaatttagaaatatttatactaccaaattagttttactagatgtttggtaatttgtttgttttgtgttataaatgttgctaattttttttataaattttgctaaacttggaataacttgactagaaaaaaaaatcagaacgacttataacataaaacagatggagaatatacatgaatgaaattgtggatgcactctccatgtatagtactctatttcttttttaaaaaagggagtaaaatcatggataatgtatatatccaccggtgtacgtatcgaatcagttgcatcgtactatatgattgcaagccagatcgaaaccacgcatccccaagtacaaccttaaccgatctgttatgtgcactagaaataacctgtatgaatttatcattatatcctcgtcgtacggtgcaaattaatcaagagtagctgtcaattgtactccattagaggaattaattaaagatttatgttgccgctgctgctgccaacctcttaagtggtccgtctgaaaaaattgattttcgcagatggatgatgaaaacccatcccggtttatatttttcaggtggacatttggcttcgagaatcataccgtctgaaaaaaataaaagaccagtgtcactaaaaatctctttttctagtagagacagatgggttgatatgacgagttggcgacgccctacggcgcctatgggtttactatgcaggagcgagttgaaatgagttcgtgaatttattgttcatggctatatatattatctaaacaaaaactagctagcttgttgagtttttttccagctagcatgctttaagctaatcgatctcgtatgcttcaaataattaagtgtgttgatcagcgatttcgtgccaggtgacggcaccaccactcttttctggtctaaccagattgagagccgctcggtaactttcctttgcacccaaccttctccttgttatgccaccacgtatccgggctttaagcacggtcctcttggctctcgccgataacttttgggtggggaatattcatggcactctcacggtccctgtcatttcttagttactcgtgctctaggacgcattttgtctggcgttggacgagtgaccaacgatactcgactcgcttggcttgccatgcgttatttctcggccaacaatcctttgcttgcgccaatcttctttggcaagctaaaagtcccgttaagtgcaaattattcctttggcttgcgttccagcaacattgttggatggccgaccttcttctcaagcggggtatcaacagccactcggcctaccccttctacgcccaagagctggagacggcgaaccacatccttctcgattgtgtttttgctcgtcaggtctgacgccaagtcttgtattcctctggctggtctgacctcgcctcttctcttggctgctcgctctaggtctggtgactaccttctagggcacgcctatcagagcatcttcgcaatggtttcgattccctaatcctcttgatatcctagcaggtgtggaacgaacggaactctagatttttcgactactcactctttttcaattttggtggtattggagttcatccgtttggaaggtcgtctctagtcttttgtcggcgctgctgtttttggagtatttctaggattttagtgggctccaccaccaccttccctcatattaggagtcttttcttttccttaaagtttttttttcacagttttcccgtttccattttttcatgtacgttggcgacaatctttctggccatttgcgttgtgtaattctctttttaatatattgacgcataattcttttgctcgttcatgaaaagtgtgttcggtgataatgtgtgtgggtatgagtgtctcatgtaattgaaagggaaagctctgccgtcactagtccgtatatgccatggaggatgaatggataacccgcgtttgaagaagctaagtatccaataatctaattaaacatttaattcagagattattggtgggagagcatataccaattaacaaacttagctaatagtcatcatccagttgttcatacatgacaaagagagagttaggggacgacgtacagctcccaagttgtagtacaacttgaccctcaaaaagtcagcacttgtactgcacaccatgcgtagtacgttcgttcgttgatgcacatatatatgcgatggcccgagcaagacttcacgctttatatagtacaatatatttaatttagttccttacttattgaaaatttgatctgacttgtcaatttagaattcatctcccgctaacacacgtcactggattatatattatatcaatcaatacttgtttcagttataaaacttttgggaaagtgatttcatcctcaatgggatatcctctcgtttcgtgcatgccacctaaatagtcataagaaaatataaaataaatggcaatatagactaatatgaaatatatcgtttcacaaacatgcaagtttaaattcaacttcgataatttgtaacaaaaataacaaatattattgtaatagggggataacgccctccctcctatccggttgaaacacctaaaatagtttacggaaagattctaagtgtaaaacagggaaaacactctcgagttggaaaacactcttgagtggcttcttatcagttatatgtaactcatcttacttaaagatgaattctaactacatggcaggtaaaccggggtgattggaaagttgatggaggatgtgcgaaccctcgagaatagaagacattcggctaagaagaactcgaaggaaaaacctattcgagttgagatcaagtcgaatggaagattttgtgggggccacttctcaaccactcttgccagctggagccaaaagactataatgaccctgagaatatactgtaatacccctaaggttgctgacatggcaagggcgttataggaaattcactaaagcccatgagggtagaaatgtaacatcacatgtaagaccgtaggctataaaagctgatcaaatccctgtagcaagacaagatatttttaatacaaaagtaatcctcaagagttgtgtttgttgtttgagctcatttctaaggataggcgggaaaatacttctttccggtctatccccaatcttgttcgtgacctaaggtcccaataaatatatttgtgaatgtgcgataactattttgagtttaatttgttatttttgttgcaacttgtaaaagtaaaatttggttttgcatgtttgtagagtgatatatatatttcgtattaatctatattatcaatttttttcaaattttttaataactatttagatggtatgcaaacaacgaggggatgtcccctcgagggatcagaatccacatccaaaactttttatgtttatagtaaaaagtaaaattcgatcaaacttttgatatcttgaccactgatattagaacaagcttataaaatctaactgtactttgtaatattatgacttctcatggcaaatttatggacgtccttttaaaaatatggatattcgagatgtaattgatgatcaaagtttaataaaattttgttctaataaactgtaaatatttattactggataaggtaaaacgtacatctagcttaacctaacatcatcgtatcccttctttttataaaactaatatccactgaatacctaaaactcaacgtgaaacatattatttattagcactattaaaacacatatgcaagcatgccatatcaactcattaagcacataaaacttaacatgcaagcatataataattatatttataatttgtttcattataaaactaaacatacacatactggatcatcattctcaaattaatcatctattatattattaaaggaatagaaaaaggagcctccacgttcactcacataacctagaaattttcatattaatcgaagaaaaagaaaaatgcagactccatatagaaatacaatttagaaatagctgaaattcggaattaaaaaataagaaatattagaagaggagactagagtccatatagaaatacaatttagaaatagttgaaattcggaattaaaaaataaggagtattagaagaggagactagagtccatatagaaatacaattaggaaataactgaaattcggaattaaaaataaggaatattagaagtagagtatagagtctatatagaaatacaattaggaaataatagaaattcggaattaaaataaggaatattagaagtagagtatagagccatatgaaaaagcattgtccatatagaaatataatttagaaatagctgaaatttggaattaaaaaataagggatattagaagaggagactagagtccatatagaaatacaatttagaaatagttgaaattaggaattaaaaaatcaggaatattagaagaggagactagagtccatatagaaatataattaggaaataactgaaatttggaattaaaaataaggaattttagaagtagagtatagagtccatatagaaatacaattaggaaataacagaaattaggaattaaaaataaggaatattagaagtagagtatatagtccatatagaaatataattaagaaaaaaagaaattcggaattaaaaaaataaggaatattagaagtagagtatagagttcatatagaaatttaaaactaaataaaattcagaataaacataataaaatgaaaagttgtgtttagagtccatataaaaatacaatttacaaataactaaaatttaaaattaagaaaaacatgggaagaagagtttaaagtcaatataggaatacaatttagaagtaactgaaatttgaaattaaaaattaaagaatattgacagatgagtttagagtccacatagaaatacaattagaaataataaaaattcagaattaaaaaagaaatattaaaagataagtctagagtccatataggaatatatatatatatatatatatataatttacaaataactaaaatttgatattaaaaataattaataactaacacgtatataaaatacaatatgaatattacacattagtagtttcgtaaagttattgcaaaatttaaaattacgttgtcattgtaatatattttaataatataatgagaaaacatatatactattatatgagagaaaatataatgatgctagccgcgcaatctgcgcgggccaccatactagtttttataatatatcaatccgagtccttcatcatttctccattatctaacatatatccagcagcaaagcgttgggcatctctaaacccgagtttactttaacacacctataatatatagacgtgtatatatatataagctctcacaatccagcctcctacctagtggctggcccagaagtcgatcgatcgatcgtgacggcgacggcgcgagccacgaccatggccaggacgatgacgatgagggtttcttcgctccttgtcgccgtggtcctcctcgccgcgctctcgttccaggcgtgcagcggccatggcggcatcaacgacggcgacgggcaggtcgacgccccggcaacgcctgcgtcgtcgtccggcgtgcggtccaaggggctgatcgccgtgaaggtgtggtgcctggtgatcctgctggtgttcaccttcgccggcggcgtctccccctacttctaccggtggaacgagagcttcctcctcctcggcacccagttcgccgccggcgtcttcctcggcaccgcgctgatgcacttcctcgccgactccacctccaccttcaagggcctcactaccaaccagtacccgttctccttcatgctcacctgcgtcggcttcctgctcaccatgctcagcgacctcgtcatcgccgccgtcgcgcggaggagcgccgccgccggcgttagcgacaaccaggtcagtgagcagcagcagcggcagcaagccgagggggcggtgatgagccgcaaggaggaggaggcggcggcggtggcgcacccggcgatgctggtgaggacatcgtcgttcgaggacgccgtgctgctcatcgtcgcgctctgtttccactccgtctttgaagggatcgccattggtgtctcaggtcaggacaaagcttgttgcaatctgattcatttaaattcagttcttttaactaattaaattcagtttgactgattttttttttgctccaagtctctgggacaaaattctgtcagtgtgcaattaatgttcattgctagctgactcatttttaggccaattgttatgctaaaacctagagttgtttgttctgtctccagatatttcgatctctttgatttggctaattgatcatctcatctcactagttacttgaattatttgtcctcttgcttaatcatttttacagctgataagttacaaattttcaaggcattaattaatttcaatacaatattagcctgttgttttagcatgatcaaaattacgggatacattatacatagacagatgatgtaacgattaattgctagctagctagtaaaactgcatgtgctatataatttgaacgatgatatggtttcttgaaaatcttgagtgattactggaagaaaaggaacaaaaattggaatgtatatatggatgaaataattggactctctgatgtcaatatgagatgaattgcagcgagcaagagcgaggcgtggaggaacctgtggacgatcgggctgcacaagatattcgcggcggtggcgatgggaatcgcgctgctccggatgatccccaagcgccccttcctcatgaccgtcgtctactccctcgccttcgccgtctccagccccgtcggcgtcggcatcggcatcgccatcgacgccacctcccaggccgcgccgccgactggacctacgccatctccatgggcctcgccaccggcgtcttcatctacgtcgccatcaaccacctcatcgccaagggctaccgcccccaccaccccaccgccgccgacaagccgctcttcaagttcctcgccgtcctcctcggcgtcgccgtcatggctgtcgtcatgatctgggactgatccatccatcctagtattacactgcttcatttcttcaattcctgcgcccatgtatgtatgcttaatttggcttgtttaattaactgtatgtacacatgctgcatgcatgttcgatttctatcaccccattcattaatcgtggccgaaacagttcatgtccactaatgattgctgtatctatctacatatatcaaaccgtgaataaaagttgttataaaacgtactgttggtttcgttggatcattttttctgatgatgaaaaatatcgcatgaatttgagtgcgcagagaccaacaaagaaaggaataagatcactttgactccctcaactgaccaccgaatctaaatcgtatccttcaaccgcaataacagaaatcttacccccaacttacaaaaccggtacaatttgactctcttggtggttttggaaagtggttttgctgatatggcgcacacgtggcagtattgacttggtctttgtcccacgtggcattgacgtggcgcttatgtagcattaaaatttaaaaatataagcagggtccatttgtcattcacacaaaaataattgtaggccccactgatatgtgggtcccacatgtcatcccctctttatcccttcttccttctccttctcctcccttctctatgtctccctctttctcacatgtgggccaccggaccaatcaaccccgggaaagccatggcgaccacgccgaccaccgccaccaccaccctctccgccgcccgcctcctcatccccaccgtcgccgcatcgcgcgcttccttctccaccctcgccctcccgcgatctccctatggggtctcccgctccaccgccgccggttgccgcggccacctcgccgagccatggcgaccacgccgaccaccaccaccaccaccccctccgccgcccgccgccgcatcgcacgcttccttctccaccctcgccctcccgcgatctccctatccctctcccgctccgtcgccgccggctgccgcggccacctcgccggcgcggcctcaaagtccaagggc

SEQ ID NO: 24045 - DNA, 1089 bp, Oryza sativa
ccggcgggtggtggccaggcgtctcgtaggagatgtcgaagattaggtggccggtgcctggaaaggtggtgggcaccacaggcgtcgtgctcggcgtcatcgcgagctccaccgccgcgctgctctccgtcaacgcgctcctcgcggagctctccgaccgcaccgccgctcgagccctcgcctgccgccggctcatgtcaaggggagagagagagagagagaaataagggagagaggaggaagaagggtggtgagagagaggatgatatgtgggacccgcatgtcagtagggcccacaattattttttgtatgaatgacaaatgggtttaattttaatgccacataagcgccacgtcaatgccacgtgggacgaagaccaagtcaacactgccacgtgtgcgccacgtcaacaaaaccactctccaaaatcactaagggagtcaaattgtaccggttttgtaagttggggttcaagatttctggtactgtggttgagggatacgatttagattcagtggtcagttgagggagtcaaagtgatcttattccacaaagaaaagatgcggcccaagcccaacactacggcccatctctccggagcctcagagctggatgcccctctgcctctgcttcactgcttgcattgcatatttgcatacaaacacttctggatatgagaagctcagttaatttgcatttggaaatatattactccagtaaagactatctctcctccaccatccatgcgtctaaccaacaatgaaacgggtcatctggaattgaaaggtggcagatagcaccacacgattatacaatttttcaactgcaaaacgaacattacctcggacattaaacacgcacgtttcagctggagacatccaaactactactcccaccattttaaattgatctacatatagttttttttgtttatttctaaatgatctacatatttgtgttcatttattaagtctattcgttatttgtgtattggagtaaatagacattgatgcatgtatccatgcacacaagtatttataacccacatgcaatatcttgatttggtattggctaggaaaatattgggg

SEQ ID NO: 24046 - DNA, 5273 bp, Oryza sativa
acctgtggaagtcgtcataatcaaactggtacccaacagcctgcatcatcataagattgaaaggaacaatacttaagagggttacagaacagcaaggaagatatgaacaagcacccaaaaaggggggcaactttgctggggaatagagtaaagcatacagaccctcaaaccggccatggtagttccatactgcttgtagaggaggacgcatagctccaaactgatgctctcttccacaccaagcttttcgatcatataagctgaaacatccaaacaacaccacatacctcatcaacatatctgttccaagaaatgctaatacgttgtgcttgactgtttgtgtaccttggatgttccttacgacgtcggctccaatgccggaggtcaccggatacagcgtgtcatcaaggtctaaaaaggaaaatgaacaaggtatgaaaatcttgcagtttcactttaaatgaaattccttttttttttctgaaatgcaattggagacagcaccagtgatggcaagaattactattgaatcattcgctccgtccctaaatatttgatgccgttgacttttttaaacatgtttgaccatttgtcttatttaaaaaattttgtgaatattattcaaaaacttgagtagtagtatatttaacaatgaatcaaatgataggaaaagaattaataattacttaaattttttaaataagatgagcgtttaaacatatttaaaaaagttaacggcgtcaaatgtttaaggagggagggagtactggttaagcaatgggtagcataccgaagacgaggctgtcgccgttgagcctctgctccttgctgtagttgctctcgcactccatctcgatctgatacaaccaaccaaccaacagaagaaaaaaaaagtaacgactttacgcccaaacaaacaatacaaacacaggattgaagagagatatccgattcagatctaagctttggcgttacaggccggactagtacaagatttgactaggatccccaatgaactgccgccatccttgatacacacaaaaataaaaaaggaaattggctggtccaagaaaagaagggaatgggaaaacagacctgcttgatgaattggttgtgtgaaggcagaagattggttcgcgcggtgagccggagtgaagaaacaaaagggatgagaaaagcaggaaaggaaatcgtgggaagaatcgctgggcaggcaggagattgcagttggaagcggccgtatatgtagatggagatggagatggagatggagatggagtgaactagtcgatgaggcgtcggcgccgcccctccccgcgaggaatgagaaggaaagggagccgttgtgctgtggaaaaaaaatatattttcttctctctttcttttttcatgtctagggctaacaacttttttgacggaaatatttgatgggtgttttctcattgcttactttgtccctgatgacgccttacactctccagaaaaatatatattgttaatttaatatagtattaattattataagaaatagtataaatttgtacccatgaaagtgtttttataaagcaagcgttatactacatgccaaattcagatgatgcaacaaataaatattcatggagatatttaaatccgatgtttattggtttcattagtacttgactgtcgttgacaaattcaatttcagttgatggcaggctgcaaacgtgacaggattattgttactagtacttgttctgcacgtattggtatttggggtcaatgtgtaaccatcagatccaaacaaactactctatcctagtagcagtactaatttttgatgagtaaacagctatagattgttgttaaaagtcaatgtcctcgtagcagacgtactacgtgtgcagttatctgtccaaatcattttctcttttctgaaagattcagttatctatccagattgctccacaaacaaagagcaatgaggaagaagtgaaggttcagctctttcttgcttcgtgctccatacagcaacaagaattcttacaagagaagaaataagcagattgaggaagagatggcggcattattgttccatgaagatgagtcgctgaagcatcattgcacacagctcatttggatcacctacctggttgcacttgaactggatgctggattgaattgcttcttgcatttgcatcggcagctcggcaccaatctgtcaaaccgactacgctaccacttctcatgtgcacccatcactccttgcaggctgccgcgtgtaactcgaccacaagaatcaacttgtttttttttttgggttacttcgtgttagtagttctttaaaaaaaaaacttgctagtattattcatttcataaaataaaataaagctgaacttgtgactgaggaagaggcgtgatcatcatggagaaagtcttcttggccaagaattcaatatcatactggctggctgcttgcttgcctgattttaataagtttggaccaggcttggggttgcaccgaccatgctatatgctggttcgctcttttttcctttatgccggctcaaaggcgtcacccaaattccatcttactcctcttcatctcttctttctcgagaacggtctcagcatcggatgccgtttacccgtctgcacaatgctgctttcaggaagcaacaagaattatactactagtaaactgaacaagagtacaacttaaccagtctgaatgcagcatcctgtgtggcaagctgttgtttacagctcaaggcataaacaaaaagactgacaaaggctggcatttaagcaacaaacataatccagaggtttgatccattttgaagtcatgaaatggccacaaagtgtgtgagaataatacaagcatataagtttgtgataaattacaaggcccttgtttctctgcaatgaaattccaaacaagaaactagccgacttatgagcttctaatacaaagaattggttatgttaatatgagttcttctccctttctctcgatctcacagacacacacgcgcacacaaacaataaatgaataattaggcctcacaatttacaaatcgctgaagaactgcacaagttcagaaaattatgtttcatacaaacatatgcattttctttgcctcctattatggtcaccgtatgtggcttctcgagaatgaccagagcccaatatcacgaacaggagcctggtgcaaacaatatggcagttcaagctacaagccacaaaataaataaaatctgtgttcaacaatagatgcctacctgtgtcttcattgaaggaaaaatattccaaaatctgagggtttcatccccggctcctgttactattgtctgcaaatgagtaatatgcatcatttaggacgattcccaggaatatttttccggatacatgatttgcagtttggaaaaagatttacctgtccatcaggtgacattgcaaggtaaagcactcgcagcgtgtgtccagttagagtagcaacctgtttatcgaaaacataaaatacttagtggtactgcactagtggaaatctttcttgaacagatattaaaaattcaaaggaattattctactcttatccttatctgcaaatacaaatgaaaatagccccctgtgaaatacttcacttggatttgcagccatactgatattgttctttttaagcattacatgctcgtcaactatgttgatactaaattccttttaagcgtttaagcaatccatgagtcaatgtctcggcccacagaaaggaatgagttctttggaaacaaccctaggagaaatcagacacataacttcctctgctttttttcacgtttttatccgaatgagtgattacttgatgcacaattgtctaactggtgaattagtaggcttgacagcccacgggaatttaagcttacctttgacatagatgggtacttccacaccatgatttggttttgggaatacccatgagtgctcacaagctcatttacatttttacaccaggcaagattacaaacctgaaaacagaaagcagctggtgaggatgacagtaaaaattcactgaactactttttagaggcttgttcagaactactcgcctggctgcctgtgtccactgaattcagcatgtttccattaaccgtgttccagaacctgatacacctatcagcggttccaccacctgatgccaggaggccttgctgatgtggtgaccatgctattgctttaactgcagctgtgtgttctgtcagcctcaatatcggctgctgcgaacgttggttccatactagcagctgattatcatttccaccggatgcaagctcacggtcgtcgtgcgaccatttcagtccacagacctgaccaaaaaaactgtcacttgatgcacatacatggttctgaaatcttactgtgagatgggatgattttaacttgcatagttagtgagctattttccaaaaacctatggcttggaagtagttagaagtctcacctctgatctgtgccctgagaacttgctgatatagtcacttgggacacggatgtcatgctgcaatatgttcttgtccctgctaccggaggacaagattcgggagctccatgctaatacaccagtccgtgtttggtgtcctcccatgttcctaatccgtttacagcgagagctatcccaaatctgttggaatttatgtatgcatcaaattctcgatagccatgaacaaattcacagagttgaacaaaaacaataggctaattcaagtataggtagtttgagatttgcagacaaaactgtcgcacacatcctggacacattgaaagaagtatgtacgtgttgtgatagtgatagttagtactagaatcgaataaaagtttagagtttcagcaatagggcttatgtttcaaatctttactagtgtacatctatcatacgagatggtgaacgaagcgaattgcatcagcccaggattcaggatatttggaacaattgatgtatatagtttgtgtaattgttgtgatgaaatctaaagagtgtagaaaacaattactactaagtactagatagataaactgaagacaatcatatgctgcagccaatttattcagtagaaagtaaagaaaagaaaataagagggggaacctggacatcgccaaggctggtgccgatggcaagataggagccttctcgggtccagtgcacagcgcagacgctgtccctgggccccaaatcgcagagcttggtgaccttgcaattggaagccgaccagaggtagacgcaattcccgaggccgac

SEQ ID NO: 24047 - DNA, 945 bp, Oryza sativa
agtggtgcctccgcctacacggctggcctattaagccgccgctgttgggcgtttacgacttcaccgccggcctgcctccgttgccgccgactggtgtcctcgcctatacggttggttggtcacaccaccgttcatgggcgtccacgtcttcgccgaccggctggccttcgccgccgccgactggtgtttccgcctacacggctggcctattatgccgccgctgttggacgtctacgacttcaccgccggcctgcctccgtcgccgccgactggtgtcctcgcctatacggttggttggtcacaccaccgttcatgggcgtccacgtcttcgccgaccggctggccttcgccgccgccgactggtgtttctgcctacacggctagcctattatgccgctgctgttgggcgtctacgacttcaccgttggcctgcctctgccgccgccgactggtgtttccgcctacacggctggcctattatgccgccgctgttggacgtctacgacttcaccgccggcctgcctccgtcgccgccgactggtgtcctcgcctatacggttggttggtcacaccaccgttcatgggcgtccacgtcttcgccgaccgactggccttcgccgccgccgactggtgtttctgcctacacggctagcctattatgccgctgctgttgggcgtctacgacttcaccgttggcctgcctctgccgccactgactggtgtttttgcctatacggttggcggactccgccgttgttaatgggcttcaccatctacaccactggcttggttccactggcgccgactggtgtttttgtcaccattgatggactgcttcattcccacatcggctacttctgctgtcaccgagggaatacgacaaagctaagtcatcatttattttattctttatatgatatttttccttttcctctgcctcactac

SEQ ID NO: 24048 - DNA, 3345 bp, Oryza sativa
ttacacaaaagcgaaggtcagaatatttggaactaagatgtatgttgtaatacgttggatatcttatatatatgtctactgaaaacaaaaggaaatgggtcatattagctacagagggattgaaggaagtctctgtgtcatacggaagtgaaggtaaagaggagccgaggaaagcattccccatgggaggatatatgttagacaaggaacgagaaatgacttcacacacagataaaggttagaacatttgcatttggtatattgcattttcatatatgtcattgaaatatatagagaactaaataaattgtttctatatgggccttgaactagagacaatctcaaagaagtccgcgtatcatatggcccaaaaatgaaactaagcaatttgttccctactgggtatgaacacaacatgtagtatataatacatatacacgcaacagaagctgaggatatttggaactgtagggcactagtgtaatatatttcatgtatttcttatatacatgtatattgatttttttttaaaaaatggccttatgagttgcagatggtctaagggaagtttcggtgtcatatggaagtaaaggtgaagtggtgactcggaaagcatttcccatggaacgatacgtgctagacaaagaacctaaaaggaatctgcacagaaacaaaggtcagaatatttttaagtacagttgatgtattgcattttcatatatcatattgacatatgcagaaaactaaataatttttttctaaatgggcaaccaactttagatgaacttagagaagtctcgggttgtatggctcaaaagggaagctaaaaaatttgttccccactgggtatggacataagaaacataagcatgcaaatgaaggtgagaatatttgaaattagcggatattggtgtaatatatttggtctatatcttatatacacatgtttattgaaaatttcaaaaatgggatgaatgagctacagcagatctaaaggaggtctcagtgtcgtatggaagtaacgatgaagagaagccaaggaaagcattccttagaggagggctttttttaggcaatgaatatgaaaagtctgtacacatagacaaaggtgagaatatttggaagaacatttggcgtattgtattttcgtaaaagttgttgacatatatagataatataaaaatattttctgtattgcccgtaaattgtagaggacctcaaagaagtctcagtgtcatatggctcaaatgtgaaactaagcaatttgttcccaacagggtatgcacatcagaaatatatattaacaagcggaggtaacattagaactagtggatgctcatgttacgtatattgtgtgtatatgttatatacatgtatatttgaaattataaaatgggccatatgagttgcagctggactaaaggaagtctccgtgacatatggaagtgatggtgaagaggagccaaggaaaacattctctaaagtagggtatatgttagataaggaatgcaagaagtcttcagatgtagacgaaggtacaatattttggagtgcattatgtattttgtatttttctctaggttgttgacatattcggaaaaactaaataaattgtttctacatggaccatgaactgtagaggaactcagagaagtctcagtctcatatggcccaaaattgaaactaaacaattagttccccacagaacataagaaatatatatacacaaacgaagataagattatttcgaactaaaggatgttagtgtaatgtattgtatgtctcatataaatgtatattgtaaataaaataaattggccatatgggctgtagggggactaaaggaagtctcggtgtcatatggaagtaatggtgaagaggagaccagcaaaaccactcctatgggaggatacatggtagatatgaaaaacgaaaagtctctgcaagcagagaaaggtgagaacaggatgtgtgcacaattcatgaattaatatattgttgacataatatagaaaactaaatgaattgtttctacatggactgccaactgtagaggaactcaaagaagtttcagtgtcatacggttcagatgtaaaactaggcaatttgttccccatagaacacaagaaatatgtatacagaaatgaaagtgagattattttgaaactaaaggagatgttagtgcaatgtattgtatgtcttatataaatgtctattgaaaataaaaataaatgagccatacgagctgcagatggactaaaggaagtctcggtgtcatatggaagtaatggtgaagaggatacaagcaaaacctttgctatgggaggatacatggttgataacgaacgtgaaatgtctctacaaggacagaaaggtgagaatagaaagtatactcacaattcatgaattgtagttttgtatacattgttgacataatatagaaaaccaaataacctgtttctacatgcatgagctaccaactttagaggaactcaatgacatttcattgtcacatggtccagatgtaaaactaaacattttgttttccacataacacaagaaatatatatatgcaaacaaatgtgagattatctgggactaaaagatgttagtgtaatgtattctatgtaagacatagatgtctactgaaaataaaaataaatgggccatacaagttgcattgggactaaaagaagtctcggtgtcatatggaagtaatgatgaagaggagacaagaaaaatcattcctatgaaaggatacatggaagacagggaacacgaaaagtccctacaagcggagaaaggtgagaataggaagtatgcataaaattgaattgataagtatattgttgatataatacagaaaactaaataaattgtctctacatcggcgtcaactatagaggaactcaaagaagtttcagtgtcatatggccatgaagtaaaactaagcaatttgttccctacgagattcggacataagaattatcaacacacattcgaaggtgagaatatttggaaatagcaagtttgtctgttatactttcatataacttatgaatgcgtctagaaaagcaattagggtattcatactgtaagttgttttcctttgaaccttttgtgtttcccttaaaattgtctaagcacgtacattttgatagagcgatgctattacatatctcggttaccaagagacactaaattttatgttaaaaatatatttgtcacctctcaccatcatccaggactgtaaaatttctcattttgatgactttcttaatcttgtatagcctatcgatatatgcatcggcatatatatatatatatatatatatatatatatat

SEQ ID NO: 24049 - DNA, 10794 bp, Oryza sativa
atgcttgtaactcaaagatacaaagtggataattgtaataataataaaataaacatggttcaccaatctagaaatttcaaccattggcggatcttaatatatactctttccttgtcaaaatatatatctatctttgtatttcaaatttttacctcttaaccacttaagaaatgcatttccttaagatcttattcggtttagaggggattaaagaggattggaggggattgaggaggaataattccacaccacaatatgtgtggaataaatctcccccaatccgtccctcacagggattaaccaatcaaggcctaagggagctaccaaaatttatctcacaagttatactttcaattctttttcaaactctctgagacatatacatacatgtgtgaaacattaattttctttttttttctttcttttctatatggtatataaggatagaatgattattttattcataccgctgttcgctgcatgcgaggatgacttggcatgctcacgtagcaccttttgtgggtccaaggactatattaacccaaatgattaatttgaaagacttatttgaacgatttgaaacctcaaggactaaactgagctcgaagcgaaactatagggatcatattcaccctaaaataaacatggttcaccggtctagaaatttcaagcattggcagatcttaatacatactctttccatgttaaaatgtagctatctttgaatttcaaatttttacctcttaaccacttaagaaatgcatttccttaacggaactaccaaaatttatctcacaagttgtactgccagttctttctcaaactctttgaggcgatatacatacctctagctattctacgttgttggttcattcgcaggaatggatcatggacgccatgttcacgcacacggcaacaagatgcagcaactggccgacgtcttcttcttccgcgacgccctccggccgggctccgtcatcacgccgaccatcccgccgacgacctcgctgccggccttcctccctcgccacgtcgccgacgccatcccgttctccgccgaccgctttgccgacgtcctcgccatgttcgcgccggcgtccctcgccatggcgcgcgagatacggtgggcgctcgacacctgcggccagcgggcggcggcgctgctcccgggcgagaaggccggctgcgccacctccctcgagtcgctcgccgacctcgccgcgtcgctcctcgggacgcgcgacgtccgcgcgttctccgccgccgaccttcccaccgacgccgcgaccacgccggcgcggcgcgggaggtacaacgtgacgtccgtgcgggagctctcggcgatggctggttccggttcgtcgtcgtcgtcggagccggcgccggctgccgtcgtggcgtgccacgacctgacgtacccgtacgccgtgttctactgccacagtaccaagccgaccgccgcgtacgcggtgacgctggtggcggcgaccaccggggacggcgacggcgaaggcgaggcggcctcgccggcgaagatggaggcgctcgccgtgtgccacctggacacgtcgcggtggagggcggacaacccgttcttcgtggcgcacggcgtcaagccgggggaggtgtccgtgtgccacttcctcaccaagctcagcatcgtctgggtcccacgccacgagcaggggggcccacgcgcagcagcttaatcatcatcgatgatgtaaacaagctctacaacctaaagtgaacaatttggcgtggtttgtgcgtaatttgcagcaacggtcgatcgagctatctacttatatagtatgtaaaaagtgaataattcagtttgtcatcgtgtgaaccacatgtgtgctgcatatttgtgcgtgtgcatgttcataattaatatggatattgtgtcttcaatatgggtacatacacaagtgcttttatttaacagactatctaaaaaactgtagtaagtttttaataaaaaaatttcaaatctaactatggccctgtttagatctcaccctaaaattttttaccttgtcatatcgaacgtttgaacacctgcatgaagtattaaatataggcttaaaaaaataactaattgcacgtattaggactaatttgcgagacggatcttttaagcctaattactctatgatttgataatttggtgctacagtaaatatttgttaataacaaattaattaggcttaataaattcatctcgcggtttactgatggattctgtaattagtttttttttatagtgcccgaacactctatgcgacaccctatataatatttgatgtggcacgtcaaaactttacacccctagatctaaacaccccctataattgtaatataatccactataactaaaatataatttgtatataattattaaaataatatatgcaactttatacctaacttatatagaaattatactgtaattagttacagtgcagttacactgtagttatacttcattaaatcatatttaactaagttaaatatgatttattgcgcaataaacttgatttatgatgccagccaaggggggggggggaaaaccttacaccgacaggcgcgtccgacgcatcgttgtctaagagggacgggcacatgtggccgggcgggcgcaccacatggtgcgcacgtggcgccgacaggcgcgtcccacgcatcgctgtctaagagggacggacacacgtggccgggcgagcgcaccacatggtgcacatgtggcgccgacgcggaacccatgcagcaccgatgtgacggtgatcggacgaccacaacaaaggggcgagggctcactagccaaccggctggggagtggcagcgcacggtccggcggtgactgttcgatgcagcagcatgcacgacatgtgacagagggaaagaggaaaaggattctggtgctcatcaagcgtgggtgacgggagaggcggcggcggaagcttgcgatggcgacgagatggtggcggctgacatgggacgatggcgaggatggcgctccggcggccacgggcttcgtggaggaggtggtcggggtgcgttgcagcttggggaaggtggagaaggacagggttcaaaatttcgccgaaacagggtccagaatttctgaaaatcgggtttatcggtgggcacccaagaaaacagtattggccaaaaatttcggccccttttgaatttgccgcggcatttttccggcggaaaaagtacacccaaggtccctcaacttgtcatcgagatacaaaatcgtcccccaatcgcaaaaccagataccagacatccctcaactaataaaaccattcgctttaggtccctcggtggttttgaccccggttttgtccgatgtggcggctgagtcagcgtgggacccacgtagaccccacatgtcaggcaatccatgtcagcctcccccttcctcctctcttcctctcttctacacacagtcacacacccaggcggtagcgcgtcggcagcggcggcggtagcgcgtccatggcaccacggcgaggcggggttagcacgtccacggcgatggctggcagcggcggcagtggcgggggccgcgacggggaagaagggagggcgtcggcgtcggcggtgataagggaggggagggcgtcgccacgtgggcgaggtcgaggacggagaccccggcggcggcccggcggagctcctcggcggccaaagatgggcccggggaggcggtagcgaggcgggaacggtgcgggcgtgcaggtggcggcagcgcgcgcctcctgctgccttcgcgcgccatgccggcgcccgcgcggccacgccctctccgtcccgcttcggcgcgtccggccggcgcccagcggcctcccggctcacacactcactttgacctcccgctctgcagacgccaacatcgttggtcatcttccggtccttcccttgcttgggtgacgacatcaccctgcagcaattcctccttggagactgcacgcgcgtcggtttaagagcaacattaaaaaaatcaaggttttttgttgtacaaatcaattcagttttttaactacggtgtgtgtttgattacccttttccagaggtcagggtcgggcttcttgaggacgatgacgcggtcgagcagagtggcaaggtcagggatgcgccagccgcaattgacgggcgcgacgcggtggcgctcgtactcggtgacggtggtgttgcggcggcggtcgaggcgggactgccgcatgtagtacacctgcggcatttggcatggttggcacgccaggggccgcgtgttgaagacgtacgccgtgtagtcggcacagcggtaccaattgaggaacgtgcgcatgggcatctccatctccgcggcgacagcaccccgcgcgtcaccaccaccgcgaacccccacaacactgacaccgtccactgcttgtcgccgtcgtagcacaccgactgctgtgccacgcccgccgatacggcgccgtcatcctcgatctccccttcctctgctgcctctcccgaaccgcctcgatggcagccatcggtgacgccgtcgccgccgcattggccctcggccctcggcgcgttgcagttcatgacggcggtgggggagatcgcgcgcgggcgggcgatgccggcgctggcgccggcgttgggccgcgacgctatcccgtgcccgccatccaccgccgtcgacccgctccccgccccgacggagctccgcctccagtacctcaccatggacatctcgccgccgccgccgccgccttgctcccctgctcccgcgtcgtctccgtcatcactgccgccatatcgccggccgccggacctcctctcccacctcgcaccatcggtctcttccccacctgtcggccagcagcgccggcctgcccagagcccccagagagaagagtgagagagagaaggggaagggagagaagaggggaaagaaagagaggctgactggataggctgacatgtggggcccacgtgggtctaagcagacacgtagggcaaaacctgcatcaaaaccgccgagggccgccgagggatctattttgaccagttttgtataattaagggaccccatatatctggttttgcgattcgaggacgcttttgtatcccgatggcaagttgagggacctttggtgtactttttcttttcccggtccacagcctcccaaaattttggcccacgcgcggacgcgccctagcccagtcaaagtcctagagcccacttccaagttccaatcccgtgaccccatccactcccaaccccgtgcgccgcctcctcctgttcgagagtcgagaaagaggcgagacgagagctgccgccgacgtggccatacatcgatatgccgccggccggcgccgtcgccatgcatctatctgccgccgccgtcgccattcattgagccccagtgcgccgccttgtcctgttgttcgagagttgagaggcgagaactgccgccgccgtcgccatacatctggatggcgcggacgccacatggagctgcatcatccccctcgcgtgtccgcttcctccaaaacccgtgcggccgtgccttagcctcctcgagaagctcttggacagcggcacagcgcggcctctcctccctcccgtcgccatgcatgcttgatattgtgctcttcgattgcttatatgatgctttgcactcagagagtactggttatttacagactacatactccctcccctccgtcccaaaaaaaagacaaaccctatctttccgtaccaatgtttgaccattgctacgtggttctttgcacgcgtgagagaaacaacccgtgacgccgccgttcttcccttctgtccactccccgtctcctcttttcgttgtgccgccgttcctcacctcagccacgccgtcgctgccgtttctcgcctcgccgtgccgtagctaccgtttctcgcctcgccgcgccgcctccgccgcgccgcctccgccgctgtggttccttttctcgtcacgtcgccgtctagacaccgccactctctgcatgcatcgattcacggtgggtagagctgagcggcgcctcggcgtgggcaagtgcggctccccacccaattcgtgtcccccccatggtgtcgggcagccacgctaagagcccgggtcccctagtaccctggcccttgttgatatccctgccttcctactagcccctcttcaaatcttgtgctcaggtgaagtaaattaacgatttgtaatcagtcaatgtgaatatgtgatttgcgaatcagtgaatagtgaatgtgaatatcagaacgttctgctgatttgctatattgtagtttgtatattggatttgcaaaacatgaagtgcacacaaaagttcaagagaaatatatttttctttaaagacgcaccttgataatgtcattgtgaaggtttaatacgagaacaaaattagttctaaggctaggtttatacttagatgtaagatttctttgaaaacaaggattggcatttcgtgggcataatgaaagtgataaatctagcaaatagagggaatttccttcagcttttgaaatggcttgcacaaaataattagtaagttgatcaggtgattttaaaatggcttagtcacatatattgagcaatataggcgaggaagacataataaaaactttcatggctatgaataagcgtagattaaggtatcggcaagtaattttctttccatgtctaagatcttttttattttaaatatctatatgatagtattcgcacgttttgaacttgcttgttataaattagccaattattgatgttaaatgatattatttctatgtttgtatcgcctttttactaaatttttacatctatatatgatttacggtgttcaaaaatttttatatgtaatatgaacttctgaaatagtactaccagaaaaaaattcctggctacgccaacatatgttattttttataccaaatgatctagatacaatctacttgatttcatgcacaaattcagccaaattttaataaattttgtccaaaatttttctcgtatcgctgataaaattccgatatttccgataatcctgtttatcggtacctttgatattttttttatatcgatagttgaaaccctggagaaggatctgaccgatcggaaaagtggtcttttaccagtaagctgtggcatgcttacgtttgggtttggtaaactacgataaaaatacaaaacttactttatatttgtgctattgtttgcctcttacctctgtaaagtcgaaagaagctcaaaggtaagcttaggcttagcaaaaggagacttctaattcatcttcaagctgtagttctatgaaaaagaattggcagggaataaatccacggttttgatctttctggttagattgtaataaatttttgtcaacaacccaattcacaatatttccaaacgacaatatccactgcaacaatggagggtggagatggagatggcaaggatacaagtggatagaaaagttctagtagctaggaaatggagaggtggaagaagaaaacaggtactcgacgagaatccaagcctagacctaagtcgccgccactgccgccattcgcccgcaccgtccaggccaagcttccgttttgggattctctccctctcctccttcccgtagtactgctgcttttatattctcttcttcttaggctctgttcggctgccattatttttactgtgctgcagccaaccagcacagtgtgttgtttctttcggctgtggcaacacagcggcggtacaaagcagccgaacaggcccttaggctttacatggaacatggtcttgggctgcatcaatagtgtggggcggctgcaccttaggaagcccatcggctcctaacaacccgttcccttaatttttggcttgtctccaagccaatgcaataaactcctagatcccatggcacctttagttctgagaattcttcgggatgtccaaaatacaaaaaaacattcaccattgttcctctagcttgcagttgctgagatgaactttggaaatcaaaaaggcagcttgagtacataaattgatactttccattagataattgttggttactgagtaggccaaactcccatgagctagaaatgtgttcagcttgttatcatgctcagcccctgtttgactgagcttgaatataacaccttacgaattttgcacagaagaaacaaccatctcggtagtccctctagttggaattgcataactattaaccttccatgtagcagtaagcaagagaagaagcactttatcaaaatccattgcttcatcagcccatttgagagaaccaacaagccaacaaatcaccatgcagatgtagtacatgattgagaacttgtgagctcttctctttaggatgttgaaccgtgccaaacagcagaaaagtagcatcaacaacatggtgttctttggcagtgacgatctcacaatcacatgatttagtgcattcttccctcatctaggtattaaattgataatctgaaccatctgagcatctagatcccacactaactgcactaattgggcttgcatgagttccattgggtccataattgtgaatgccttgccttgaagaaaatatttcctatttgcaaagtgaatcattgacttggtgccatgtaaagtaagtagcattctacacatgtattgtttagagttcaaatcaagcataccactagaaaaccaattattgtgcataaataggatgtgctgaacatagcacttctgaccaatgcaagcataagaatgtaagatcaatgtgtgtattgattcttattctgtgatgaacaattggcatctgtgattattggttttgatatttggagattatcgttgaagtggttttggagataatcaattttcaggtgatgatcggattcactgttattttatgtatccggtccgaccgagcagaggttgccggtcagaccggtgctatgtgtgcggtcagaccggccggcccgtggtttgaccggccgatgctgtgtcggtttcggtttcgggttgtttctttggatatccgtgattgtttcatggttatggcttctagatggatactatacgtatgtaatactgttgtttgctaataatgagtcaagttggggatagcttggtctcggaatatggtttctttgtttgtttcatgtgtaagtgactcgatgcctcgagacagtatatgcggtgatagaccgggagtcggcttggagataagacgatgtccgtggtggtcagatatcatgcgggatatatactaaggctagagttgatgcacgtggttggtgaagattccatatggcatacgatggaggtattgtgtacgtatgggatgcggagtcgaatttggaaggagtccaaatttggtacgattggttatgtaaagtttgtatcttgtactagagggtttcctaaggtgtttaggactcttagtatgagtttggttcgtggctttaggctgcctacctcatgtataaatagagggggagcgtgaggcttcccggtatcgcttttcggtatcgcttttgagagcaattgagttgatagtttagatagggtttcaagtttagtcaagatttttgtaaggagtgctgttggtgcactttgtaaacacagagagaagcaataaagtttttatctactttgagagttcttcgatttgtgtttcaccagggttcggcggtccaaccggcggcgcaccagcggtcagactggcaaaaggcggcggtcagaccggcagagctaaggcggttagaccggcgatgcagtcaggcagcggcaggcgatttcgacggttcgaccgatcgatctacatcggtcagaccgacgttcatcaggcggtcagaccagcgcatctacttcggtcagaccgcgatccatcgatttcgagggtaacttttatttccgctaaaagttttcggtttttgggtatatcaaccattcaccccccctctggttggcttagttcttgtgtttcgatcctacaagtagtttcagagccttgtttgcttctttggattttaatcgatctagagtttttgccatggctactcctgttaggttttcaactaagcctcatgttttcgatggaatggatttttctcattggtgtagtaggatgcaatcttatgttatggctgaagattatgatatttggagaaaagtttctcatccttatgtaattcctgaagttattaatactgctgctacaaaaactgagtttgaacaaaattgcaaagctcgtaatattcttttgagtgggatttctcattcggattatgatcgtgttgctcatcttcaaactgctcatgagatttggactgctttgagtaattttcatcaaggaacaaataatattaaagaacttcatcgtgatcttttcaaaaaggagtacattaaatttgagatgaaacctggagaagctttggatgactatctttctcggtttaataaaattttgagtgatcttagatctgttgattcttcttatgatgctaattattcacaatatgagatttctcttcactttttgaatggtcttgacatgtctatttgggagatgaaagttacattaattcaggagtctgttgatatgtctactttgactttggattcgctttacacaaaactaaaaactcatgagatgaatattcttgctcgtaaagttgattataagtctagtgctttgatttcttcctcgacttctttggatgttggtgcttcttcatcgaagtcttctgtttttgctttatttaatgccatttccgat

SEQ ID NO: 24050 - DNA, 13061 bp, Oryza sativa
atggctcttcaaagaagtgatgtctccatagtgtcttggctgtgctctcaggtattatagcctcgactatggttattgagctattcccattttcatcctttgcgaacaaaccaagtaatgtctattgtctgctgacttgcaactcatacttagcgcgtgctggtgtggatttgatgcacttttgcttcaccatccgagctttcattaccataatttgcacctgctatggatgtttgatattcttaaatcctctgtcaggtcgatctgcacgagttatgcagaatgaaccccattcctctcaaccaaggggtcctgttggcccttttccagcaactagcatgtgacatcgtcaatgacacgcccagaaagcttgagtggatgacggctgttgctgttgcaatcagtccaacagatcctatgatcgctgtgcatgtgaggccgatattcgagcaggtctatggcgttttgaaccaccaacggtcactgccagcaagcagttcctcggaagcgaccaacatccgtttgatcatgcacgtaatcaactcggtgctgctgacctacaagtgataaccatcttcagtagcgtgctctctcagtagctgctgtaagtttgggcaacattcttgcaatccctgtacagataaaattttgaaaagcgaagtaaaccgataaaagttgtggtgatggtggtgatacattgtggctgacaagccaaggaccactagtcattagcatggtgggcatctggtgtaaattggtccgttgtgttccagcccgttctgagctgacatttttcatgtgggtctgtcatcttgaacatgttattcagcgcatgcagaatatagctctgtactgttaacctctgttgagttgctagtttaaaccgtgattttagttcctagtttaaaccgtgcatgagatgtttgttgctgacttgctgtggcccatgagtgatgacctgaattgaaagtgatagactgaaatactccgttccgtaatatgggattttgactttttgcttgcactgttttgatcactcgtcttattcaaaaaattttgaaattattatttatttttttgacttacttattatccaaagtatatttgcacaaaatttttttttgaataagacgagtggccaaacagtgcaaacaaaaactcaaaatttcttatattatgggacggagggagtagcgtattacaagagcaaaatcaccagagaccgacaactgggcattttcgtatcacctcttacaaccggcattcccaataaaagaggttctaatacttactgcaaatatgttctcatggaacagacccaatatagaagttatatactaatcctaatagtgctctcatagcactaagctccgcctgtccatccatcctaatatcacatttcaccattttccggctagccttctcctgtaaaataaaaggattgaaaactagtgccacacaaaggaattaaacctgagtttaaacgggcgccctgaaaaggatgaaaggcaacaaatcacgcaccacaggcaagccaagcacaacacctccagccatgccacgacggcctagccttctgtgccatgtacagatacaagaaaattattcatattaataaataatattattacaactaaggcagctcaaagcttgtctgaaacgttgttgttcagtgcatatccatgcatatacagaaatgacacaaaagaattcaaatacaaaaccccagtaaactagtgatcttgtgcaaagttcaattgaagaggcgcggccggtcagcctctcaacgcaagagtgccatctcgcccccctttaatggaacaagactctctgtgtagggaatcatgttgacaaggtagaaatcctccccgacaaaatccaagccgcctgatctgggattcctgtacttgagccgatccacatgggccacttcctctacagacctctacagaccggctcactgttgggatacgtgtaggctacgatagcataaatcaaaattttctatcgcgtaaaccaggaatcatgcaagtattagatcatagatcgttaccactcgacgcgctgtgcagcggaagaagacgctgagaagtcgaaggaactctcgcgaagtagcgcgcgtcgatgtagaggaagtagtcgatcgcaccggctcgaccttctcctcctcgtgtgttctcctcgccgtactcccacgccgatcagcaccgcaaaccagcggcgcctctaccggtatccacacgtacagggacggaacgccacgcgcagatgtgctagcacctgcgcgcggctagggttttgctcggggagggaagtgacggctagggtttctcatgtgatgcaatgcctccgccggtcacaccactcacgaatatataggatccatcactcgggtctccaaggcccgtaggactcctattcagatccctatccgaattaagcttatattggatctctatccaatccccttattccggcccattaagcgtgcgaccctgtaggttcatatatactcggctgtaacccgaaaactccttttcggtccacgcgtcaacagcggcccctagcagaacgtattgactcactgggcatacataaagatcatatcggctgaacctctagtgtatactagtatgaacccctttgcctcacgatatcgattaagctcaaggctagatatgtgccatcctctaatagcccaatcattcactcgaacctgttgatagaatatttaacttgtgattgactcctcaatcacctttggcatggtcatgcacttccataatctacaacatcaaggggcccagagatatctctccataggaggggcaaatcccatcttgattattcatatcccactacatgtttcatagcatacccgaaaactacttttataactacccaattacggagtagcgtttagcagtccctaagtaagctactacacatgttgagaaccatgataatctcaggtctaaggattcaacaccaacactcaatgagatcactgatgacacaacacatatggctcttgcagtgtctcatgttgggtctatccaacaacatgttcaccaacatgtgtccacattattaatttggtatctctataccacgatccatgagacatgatcatcaattaatacatgtgctgatcatataaacatatttgttccacatatgatatttgatcagggatcctttagaaatagtaacaaacaacattaagagtctcatgaaagaatcacatattcattaaccaataaggagttatctatttcaaggaacattgtcggataaatatgtaaacatagtatgtgatacaatcatctctatgattgcctctagggcatatcactaacacttaccttgtcgtagcggtaaatatgaaaaccaagtccaaggagcaggaaatgatcagcgaagtcgaagaacagtttgaaattccaccccctcatcaggtagattaccgatcgtgtaaagacgatcccattggtggctgatgtcatcagacggagaaggtgatgatttccatatcaccatctctgtcccgaggtactgagccaggcacagttctcctcctagctcgaccaggtcgagccgtgtttcgtcagatggtgaaacaacatcgtggagtacaagaccgaatgtctcatcttgtaaatcgaagcggaggaaaccctgtggaggaggagggcttccctcctggaggagttccttgcaaatgtgccaatacaaggaacccttgaaatacatagggtctgccgtaaccgggtatggtggatcctccgctatggtcctccaacacgaatcacggttgccgatagtgaacacctccatcccggcagcatcgtgagcccactgattgaaatcgatggatcggtcgaaggaccgaacaatcttgtaagtgttggtgccaagatcaaggcctaggcctgcagtctggaacctgctcttttggccatcaggcagcttgaggacatcacctgtagtaaggggttgcaatttcagaacgaaaatctcaatttcaccctcccaccgacaagcacatatctcacccaaaattttcaaaaatgttttcgaacctccgtgaatttggttaaaatttattcaaatccattcaaaatttatcaaactttcaaaagtaccggaattccaaaaaatttcagttgccaccgaaatttgctggaaaacgaaagtgtaaacccttgcctgtagctgggttgaagacgtacaacctggtattggtggggaatataacaagcccatcatagtgcgacatgccgtaaaccgacctgaattccccatgtaggttggtcgcacgcacaaggtgcgcatcgtcctgctcggtctcctgccaacggtagaaggtgattatgttggagaatgtggttggccagggctcttcgtcgtcgatcatgctgtcaagggtgtgcggggtgatgaggaaggacggcttctgctcgtgtctggagacggcagactgctgctgctgcttgagatgcgtggtgatgaaggacgggttggagatggtggcgcgccacgccctgcacacggatttcgaccgggaaagggttttgacggggaggcggagcaggatctcgtagacgagctcgttagggagggatgatgcgccggggtggcagtggtgctgcaccctcctcctcttcctcctcttgtacgtcttgatcaacgtcgtcgtcggctcttgtgggttgcgatctatagctttcttattattcttcgtggcaattacgtccatggtacctaaattaaacacaccaaaaaaagaagactggactcgtgaatgaataatatgggtggaaaactatgagcagaggatgcgcgatgtacttatatttatgaaaagatagagtgacagcaaacatgaaaacgagtcggaatcgccaatctcggatgaatttcgagaccacgcggccgacctgtccgcatccatctcataatcgaatttgccatggaaaatggaaatccaaaatcgactgctgagtagatagataggttcttcttttttttttaagaactcataaatttatttatataatgaggattacagacggagttcaaagaaaatggcatcccagtacatggcaataaaagataagacatagagaacaacatcacccatttagaaggtaaagccagctgaactaagaaaaacatcctccaagatagtccaaacaacaataatgaacgtgatcgataggggactatggcattgccgtgatgaccacgtccacgagcccctactgaagacgcggacaccgattgacagactggtgaccccttcggctgcctccacggaaaccgcgctattggaggtttgttgatgagtcataaatttatcttaagcttcatcggaccgaacaaaatattgtcaaggagttctccatcaaatctgaagagcacatactgcaatcctatcaataagaatcgactagacagtctatactcaacccgaatggagtcctcaacttgaatactactgcaaggagaattgaagaaagtctccgtaccccaacttgccttaaacatgcaagaattaggatggcggcatttggcggaggtacgcgacaccagaggtcgaagggataatgttctcgcagagagcttcaacaagcaggagcctgagcaaccaaccaacaagcttgccaccaagagatagattggtggccttcccgcgtctccgcaaaccaagttgcaacgacatcaccgagaacccaccggcaaaagctcaacctttcctctacgtgcaccattcctcgtccacgcgtaatatggtaatgaccgatctccacgtgagtctgtgtacaattgtgcgagcgagatcgtgagctggatacgcgagcatgctgggactatgagtatataccttttagcatgtttaaatgtgactcttatgttgatgcgaaaacacgaggcctggaagatctgcttaacttcagtgcaggtccaaaaatcttgcttttaggttcgtgagtgtgacagttgatttgatcctgcaatcaacaagaaataaagacaaagaaaccgcagttaaatccataaatgaagccgatcggccaaccgctgatgacgtatcatttatctttgagccgatgtcatatgtgaatcgatcggcaatcatgaataagtaagaaagaactaaatctactcgatcggctgtagatattaacaatatataatctttatgtcgatatatacttaaatcaagtgattgggatagatcggtcaccatgtcgagacagtataaatcacttagatcgaaatatatattatcaatgagattatagatgttcataacatggccgatcagatagatctagcatgtatcggctaatactctaataccactctatattaagatattaaagcaagtaaaatatatcaaacagaagcctaatatacctaaatgcaacaagatcttaacataaagggcggatttaacatatcaatgaaacatataagctataaagtagttaaatcaggtaagatcgactgaaaccccgatactaccctaatcggcaaccagaatgcaggctagagattgaaattctaatcatgacttataaggtcaaactcaactgatgcagctataagtacaaaaggaagggcaatatctagacaatcaagccgctggttgtttcatagagtggtggatatcctgtataatctagtcaacatagatatttaacctaatcagctgccttccaataatagatgttagccgattgaaggttagataatgatattgtcgaagattatacagaatatatgataactcgacgaattacataaaaaagattagagtatcataaagatggaagcactaatcccgagccataacaagttttacctctagttaaagatcgaaaccgatgcagctcaacccgaaagcaagaactcatcgaaacaaaacgaaagtaaagggtggcgatgcgccgagattgtattgaacgtgtgttagattcattacatggggctcggggtctatttatacccgagattacaaaatatgtccatatcggacacgactcttatctctaacaaactctaaaataccataagtctttgcggcagacttttgcccaaacatatctctaaggaaattacatgaaatatcctaattaatagatacaattgcctatccgagagctttgtctccatcgcggcaatcctcataaaacacctcgatcgattctagaaacatcttcgagaccatctttatctggatcggctgcatcatctctatcggctatatcggctaccctctgtccgatccatttcagccgatgcagactccagccgatgccttcacagccgatgcattctctgtttttcgaattgatctctatatcgaatccgcctcgatcccaatgtcaaacctggttcataatttaccaaatttggtcgtcaacatcttagcatttgacaattcattttacccgtagcaaagcagaggcatttgctagtttaataaaaagttgacttcaacaattttcctaattaccttcctagaaattagaaaccccttccccgtccttctcgctctccactagtagggagccggctccgataacacatgcgggatgcagagagaacggtatatggagagggatcatgcatgaaggaggtggacagtgatttatgttctactagcaaagtgcatgtgcgctgcaatgggaaaaaattataataaacgtgagattattgagtttaaattcgtgaccggagataacattttgtactttttcaatgaaaccttatatttcttttcatatagcgtgctagagtgtaccatggtggaagaaacttttacagggaaaatgacataaaataactttgtttaaaaaaccaaccagatcatttagggcccatttgtaagtggttgtttattagattgtcaatgcaaattgtttacttaattaacatgatgaatttcctatgcattgcaatgggtgaatgtgattagggctgggcattggtcttttccgttaattttgggtggcagcggccatccgcagctgagcgtggtcatgctggcaagtgagagtgggagagtggggctgatatgcttcttaaggtcatgaacatggatgcagagagcaatgacatctaaggtagctagagtagggatgacatctaatcaacatggatgtggagagcactgcgatgatgttgagcaggtcagcagtcattctcctccatagccgcacgcacacacgagtgcctcgcctcctccagcatcgttgttgcctgctacccaacagggtgcgaacaacgccggtgagctctccctccccccaatcggccttctacccctccctcacctagtttcctcctcctccttctcaagccaacagttgcaaggtgactctatccagctagatccccgtctctagggggcttagagcaagtttaatagtactgctaacggttggctccaaaactatctatgtcaagaatagagtaaacttgtaaaatacagtagataatagtttagctgttgttcagctacacacggatatccatgtaactatctgtattttaatctatctttcccacttctctctctctggtcatccctatccactcattccttcccattcaatgttttctctctctctctctcttagcatttcacagcaaagacaccaggaatagttgagcagcagtcgtcttggagcgcatgtggagcatgagataaattagtcaccaacttatctcctctttctctctctctctccattatccccctccaactcacttgtaatcttacgtggaacagatatcgccggtgtttggactgttattgtatctgctcttatcaccctctctcttcttatttctctcttccacatggacacctaatcctacatggcatctttatagccgacacgtacttgcttggcatgcacaatgcataatgcctaagctagttctaaggtgggtctcggtgttgtatattgccacccccacaatgtatgtgtaaaaggtgagtattaaggtggacaccacatttcaagagaaagagtagaggagagagatgaaagatatactccgtccgttccataatataagggattttgagtttttgtttgcactgtttgaccactcgtcttttttaaaaaaaaaattggaattattatttattttttttgacttattttattatccaaagtaacttttcgttttttatatttacacaaattttttaaataagacgagtggtcaaacagtataagcaaaaacttaaaatcccttatattatgggacagagggagtatttgtttatttcttatgtctagaccttatagggcttaataccccctctatttccacgttgtggatagccgaagacccaaaaatataaagtttaatcctagtgtgagatgcgtaattttcacataaattcagtgttgtaggagcagaacatcgacttagaatcgtgcgtgttatagttgtttccatataaattgcatagcttgaatacaatctaaatatccttagatcaaaacacaaatcagattatattaactcaaaccaaatattgatctaatttaatcagatttggagatccattggataaaataataatagatatacacttaaaagagaaaaaaaatgtttatttgagcataaatgaatgatacgtagttcattccctttaaataacaatgaagctgccataaaatgagtgagcattctcaaacccaaaactggataaggattttacatagtgatggtaagaaaagaatattgaagcacgaattcagaagagcgacttaaaccatattcacatttattaaattcagtattgaatgtctggacagtataaatccaactatagcgtacaaacaaaaatgccagaaaaaagagggagcatactgatggttcagattgaagaatcatgttgctttttcccagatgtgctaatctgaaattagtcgtagttacaacactgcatctctactcaaatgaccacattaagcaaataaatatctgatgttgataggaggcctctaacatggacatacaaatgaacgagcctaccaaaatcgaaataaagcatggcatgggagtttctcctcgggtatttgccaagtcaccatctatatatcctttgtttgttcagccctcaccttccccttatttacaacttcagtcgctttttgtgtgctcaccgttttcattgttagtcgctgatgaagtagccccatgctgaaacatttgcagctggatttgcaacatctggaaaaaggaaatgatgttatgaatcctgttgggtataaacaactaacataaaagaatattactgttcaatgttattccgaataagtatgccattggaaaataaggtgaagcatatttttttttgctattttggcgcatggtaacgaatgccaaactgaaatgatctagttctctattctcgttatcgttaattagtctaatgaaccatgtttactgtctaaagttagttgatgaccataatcaagcatttaaaatgcagcaatgtttacacttgtatgctgcataccattctgcagtgcacctcaagatatgtccataacaaagggataggtacgtcaaataactgatattacaaaataaaactgcttgctggcatacctatagacttatattacttcatagccgtcacatgaatatggtcaaacaaattaggtgcattcatttcaaatcattttacataacacccacttgaaattaggtgcatttgaaattcaaaatcaacccgtatcaagataaacataaggagcacaatccttaacaaaaacaacagataaaataaataggaaaaggagaaagggctatgtagagcataattctctttctcacttagctagctcattttatatttttcattcgagttcagtggtctcattttatatttggaggtgagagctcttactaacaactttcagcctatgtgcgtgcaaattcagaatgttataaagttatgcatccatatgacacccagtttcccatgaatctaagtcatcaatgtctaacccaatggctcataccaagcatgtaacttgagtgcagttaaagatgtgtttacaacagacatatccagaaatttgcatgcagcctgcataagcctctggtttgtattaacaaatgtgacacttggtagtgccaatacaaaacatatatcatgatttaagttagctttaggaatcaaattgcatccttacctctatctggctctttatagcattttcatatgccttctgcagtgaactttcaagttccctggtagttgtcactgaactaacagcaccacgtgcataaaaagtaggcgctgaaggatcggcagttgcatggccttttggcgattgattggaagtacttgcttctcctgattgtggaccatttgatgtagactgtggaggagttgaatacctatgttgaatacatgatacttatcagtgtcaggacacacagagcaaatgacaaatgattacatcttgctcagcttataaaaaaaaagtattagaaacacatttcattaacccaaccttggttacagaaatacctttttttgtgggaattggttacagagacagttaagaacaaccaaatatgattaactatgtagtactccctccattccataatataaggcacaaccacttttcttagatgttccataatataaagcatgcatgcaagcatacaattaattatgacatcttctctattaaattattactttttaaaatcctccactctcatgttatctaatcctattggatgcatgcattatatttattaggatgattcaaactataagatgataataattatttcttggtctttgggttaagggtggttgtgccttatattttggaatggagggagtataagcaaatgctatgcaaataaaaatcacaggaaaactgtgaataaatcgtgcaaattaactcttctaagagtaaatttcacaaaaccagactatcttcaggtaaatcatcacaaaaatcatgcttttacacaccaattttaggtaaccatatttccttcacataacatttcactactctttaaggcccaggctcactcattgttctcacaagcttatcttatttccatttctaatgcaaatgtatttatcacgaaaggtaagatatatggattacagataagcatgggttgagtgaagttccttttttaatacgacgtcatgtggaaaataggtactagacatccttaatccacaataaaatacattggggcatcgacaactacattcatgcaagcaaacaacaaagagatagtgagaccaatgagtatgctcagcctattggagatgacagcaacactcaaaggcataatgttaaatgtcatgagagagagagagtatgcctagcattggaagaataggcaaaaaaagaacaagctctacaatcattatacatcatattaatgaaccatcagtacagcacaattaaatttataatcatccaacaaagttcatagatatgtacttagtcacagaaaaaaaggcagtttgcaaaaaaaaaaaaagaatgtctaaactttgtagaagtcacaagttccattatccacaaaagaattttcagatttggcatttgttatcatagttattaccaagtctgaaatggaattacaaaaaagtttgcagtagtctctcccagcaaaaagtagaatcagtacctgttcaaattgttcgctggaggataagcaaaggatctcccatatagggaagcagccgaagcagctgcttcaagttttgcttggcgcctgcttatgttctcacctgctgctcgttctgaacctggtgtgccattacctggaactattttttattatgttgaattagaacaaagtataaacgttgtgcaaaatgatacaaaaaggtttagacagtcaccaggctgaactccaggatgaactccatgcggacgtgctgcagtacgcccattatctgggggcagaattggagctctacatgtagggcaagtgtgttggcgttctaaccatgacctcaaacaatg

SEQ ID NO: 24051 - DNA, 753 bp, Oryza sativa
caggaagaggcagtcgacgacgagcaggaacagcatgaaggagacgatcctggcgtgcgacagcatgggcacggagggcgtggtctcgatgtactcgaccctcttctgcgcgagccagtgcagcgccttgacgagcagcagcgcggcgaccatggcgaggaaggagacggagaagtcctgcctgaagatggtgaccgcgaagaggatctccaccacctcccgccacgcctgctcgttgagccgctccacctcggcctcccggagcgtccccaggaagagccgcttgacgagctgccaggcgacgcacatggcgacgaggcccgtgttgaggagcagcacgaagcagatcttggaggtggagaggtacaccatcgccgggtagaactgctccctgctgctgaacgcgtagtacaccgccgtcgccgtcgccatcaggctgaacgccgcgtacgtctgcagccgaatcatctccgccgccgccgccggcgatcccgccacaggctgcaccaccacccaccacccaccggatcacaaaattagcacaacaaacaaccagctcatcacgaatcaaaactaaaaaagaaaaagggacgggaatcgcgacgatatcgcgaaccccccacaaaccctagaccagatccaagctgctcttaccgatgcgattgcgagcacgatggtgatggcgggtggattctccggctctaggaggaggaggaaagattgggcggagacattgtcgcggggatttttttt

SEQ ID NO: 24052 - DNA, 5800 bp, Oryza sativa
cttggtgggagaatgggcgtgaggcgagagtggttgtggacgctgttcaccacgtcggatgagaacgcgtgggtgggtcgtagactagtagctggtgttgcccgtatgcgggtggacttggttcatggaacggttgtggggtgcgacgatggcgtgtcgctggccaatggcttgtcgccacgtggagattgacacgtcgacctgtgcttttttttctttttgcccttgggaattagtttatagtgtaggaatgctaggggtggtatgtctatggacaaatgaactccatcagaagtttatagtgtagcgtcattttacgccatttgatctgctcagttgctgtaaaagagctgacgtaaaataaagatacttagaaaaatatatgttgtaaaatgatgtaaaatgacgctacactgcctaaacttctgatcgaatctaatagctgacgtcattttactcattttacgacatcattttttaaaaaataaagacacttagaaaaatatacattgtaattttcaatatttacacataatcctttaagcactattcgttttggaggaatttcagaagatttggattcctaaagatcgaagcgtatgaatgtcattcgattcctaggaatgtagagataggaaaactaaagaattttttttattcacacaaaccttatgaaaaaaaatcatatgtgcatacattcttattctttcacttttcctattcctatatgttgaaattcctccaaaacaaatagacccttagcaaaaatgcaacagtacaaatcaacacaacaaggaaaaaaacaaaagagatactactagaaacgtataaatacatcatgagcaacttgtgtgtgcctagcgcatacaaagcttcccatttttttttggcttatcagctccagctaaactttatattttgaaatttaatttagagtagactttgagagattttttttatcatagtttacttttcagcattaattttacattatattggttgtttcatttatttttctacatcttatcactcatggagcaaatgatgaggctaaactaaaaaaaactaactgaagtcactcgagaaatgtgatggcagttttctaacaaaaccgaaaagagatttggtagtcaatactgaaatttggcaactcattagattgcaatattgtccacgagctattagacaacacgtcaagtgcaaagatagtgcaatcaagccaaactctgaaaaatggaatagaaatctaggagtataatttcttatgagaaacaaaatcaaacaaaaatcaactggcgagggaactcgagttttatctatgcaataaaattcataaaagtttaacccacaacaaaaaaactaaacgtttaacattagggcagcaaaaggcacaccacacataatgagattgaaggttgtcggaagctagagtaaataatcgagtggcaacgtcttatattctggttgaaaattcataacgatcttgtcgaaattgaatggcaactcaaaaaggataggaaagaaaaggttggcatctttatttgaaatcaataggcaactcaagttgccagagaaaatattgcagcaactcgagcttatacaaacgaacacgtcaaaaacttcaaagaaaaaccaggtatcgaagtctggttgaaattaaatagcaactcgtataatcgtattacaagaatcaaattgcagcttgaatcccttgagggttgagccacatttcgggctatcatatcagagtagcaaacctcaccagaacttaacacagaaactctgaaagaaaatacgagaaaacacacttttggatggacatagctatatatgcccatgtggccaatggaattttgtggtaagaattcagagagaacttttgtttacgtctgtccaggaaaaaatagttcatgttgaggcagaaaaaaattttcttaggtcttctcgttatgtacccaaatgagctaaggtagaatacaacttattcttttcgctgttcaccaatggaaaagaaagggaaaaaaaagcaaacacattcctatatcagtacaactatgataacacgaaaggacacgacttattgagcaactgctgccttcttctttggtggtggattccccccagcaagtagcacatatgagtagaagcagatcatagcggcactggtaacacaagaaatagtaagaggaggagcaaaaggctgaaatgaacaattcattcaggcaagaaaaaagataaggggggattacctgagtgcagtgtaaaaagcccagggaagcagtttctttgtctgacataacaggattgataaatcagaaaaagagtaagattcagaattcttgagaacaaagaggaagtgtcacttactgtggtgtacgcctggaagtgcttccatgctaccgcagcagcaacagctgcaaatgatgagcagagcaggttattcacagtcagaactacaatcttgcttataatagcaatctgggttcaatttcgaatatttctgaactcgcaatcgagcataaacaatgaagagatatatcctattatactatcagatattcaagtcactgcaaaatcataacttgattcattgaaacctgagaagatgttaagttaggaaatggcgatacctgcttgtgccagtatgaatggcaagcttgacttgccactcctccaaaccttaaggctaagcacaccaagggccaatattgcaaggccaggtgcaacaccgaaagtaagacttacggtactcctccaaaacagaaatccaacaaggcccatggaaaataaaattccacctgaatttgaacaattaaatgttagtaggactcattattataaaatagaaaaaggtctcattagcctcctagaacactatgatcagtctatttaacctcttgaagtatgaaactgagcattcctagggtatgaaaacaggtttaaataacccccccccccctatagtggttttggaggtgctttcaccatagtggtagcagacgtgctaatgatgtagtcactcacttgggttggctctggttagcaatgactaagggtgttggtgccagccacagcgaaaggtagtagctaaggaataagatggaagtccacaatcagtcgatgacatgtaggaaattacctaagtcatggcgaaaccacctccaaaacttcatattttagggaatataaatctggtttcatattttagggggaaactttagaggacagaatggacttattcctagagaatatagatgcaacaaaaaataggataacagtattggagcatttaaccagcctccacaaaaagatgacacatacaaagattcctcaactagattccatagtagaatggcagagggcattatgccctttagttaggatgtgtttagttcatgctaaaattggaagtttggttgaaattgggacgatgtgatggaaaagttggaagtttgtgtgtgtaggaaagttttgatgtgatggaaaagttggaagtttgaagaaaaagtttggaactaaactcggccttaaaggattactttaagatcatgaaatgcaagaatttgaggacatcataaataataacagaactgaaccaagctatgtttttaataagaatcaagtaacagtcagaatgtcagaattataaaatcaatacagaatgttgctttgaaggaagttgaagtcataccaaaagggatccctaggcaaaagtcatgtattattgcacccttgtgttgaggaacagcctcttggtctatgtctatttctgcattagtaggcgatacagtggttggctgttgattttcatcttctgtatgctccgcgacagcattaggatcaacaggactgctggtatactccgccttcatgcacattgctatcaatggctgcaaggccataaactagacataagaggaggaaaagttttcacaaagataaggaagaatgtaaagactagtgggcaaggtatgcctaacttcgtctcagaaggaagaatagtaagttacttgaataggagaactgatatacattcatctacagacatacataaattcatgggattcaactaaaggccattttgttttaataaaatatggcctccagggttccaaagataacaaaaacatgatattgcaatatcaaacaattcataattatctcagcacaaaactttgctgccaacaaaatgatctttgcttagacattgagtggtctgcaggaaccaaaaaatatagatcggaatcctgcaaggtgcaggaatttaaatattagaagacgatcagcctgtcatatagatactatctcgcagcttacctaggcttggtttgacaaattgtcttttaatgtcaatcatcataaatggaatgttcattggtctatacaatatacgctcatctgccatgtgctatcgtccattgcatactaatataatcttgatggcccagcatgtatgttcacttctccatattgaacccacttgtttatgccaaaaacatgccaacagaagttacacgacctgcggtatcccatccagggatctcaaccgcagcaatacacttgactaacacaattattatgctctttacatagatgctaatgactgatatccaacagatgtgctactacagcattaataccactgctttagaatctatgtaaatgagttcttgagagagtatggaagtgctatcatgaatgcttttgtgagaccaggtagccataaatacctcataatatctgttatatagcagtatgtgtttataggatttatcacaatattactcccaaaagcatattacatttaattacacaaggtttgtacgaaaaggttatagttcccgaatccattcttggaggggagacgttattgcagagcacagactagctggttagcacataatacagaggaatcactgaaatcaacaggaattcgccagcagacatggcaacaataggagtgctaaagcacgacgtgatgttccattatgtggtgcctgtaacgttcccattcaattggcaatgtaagtaacaaaaaaatggggaatttagttatttctttgctttctaagaaggttttaagttaaacatatagagaaaataaaagaaatatttgttacccgaaactgatgtaaaaatacataggctagtgatagttgacctctaattttaatttcatgtttctttttaaacaaaaacatttcttgttgatggaaatgatacgcagatctcctttgcattcttggtaaaacggagtctcaacgtgtttggtttgtgtattcctttcttaacacaatgcatttctagtttctaccctgcaggcctgcaccatgtcatgaggtagtacatttctaaggaattcaaacgcggctaaaatcactcgatgcgctgaaaacctccagcggcgcggtctgcctcccttaattttgccaatccatcacagccgcgaaaacacttaaattccagatccaggaggaggaggaggagaaaaagaagttacagaaacctctctcaccttgggcagcacgacgccagcgggaaccccgcggagcgatccccgggcgatcgacgccgggaccgtcgacgtagcgagcggcgcgaagcggaggacgccgccggagggggccggccacctcctcgccgccgccgccgagggcccgcggagctgcgccgccaccgccgccgccatgtcgatgttctctcggtttggacttcggttcccgacgcgtggaagccggaaggggagaggagagggaggagtcgtcgtgctcggcggctaactctccttctggctcctact

SEQ ID NO: 24053 - DNA, 12019 bp, Oryza sativa
gggagcgagcggcacgtggggaagcggaagtgggtggacggcttgtgggcccgaagggacggcgcactagcgtgggttacgttacgggctgcttggcccggtgggaagggggtggttgtttggtttgaccattttgattattattataattgtatttatttatataataaaaataaatgaatatgtgaaaaaaaagatatacttctcacgtcaaaactgtagagggaaaatatttggttgatcatttagtattccctctttgttataaatatttgacacctagaataagatttggtcaaaatttttagattcacatcatcaattttattttatgttatactactaagtttataaaatatgtaaataaatactccatccttttcatactgtacggtgacttgtttctaagtcaaatatttttagtttgataaaatttatagaaaaatatagtaaaattttcaacacaaataaaaatgatattaaaatatattcaatgtgtcaacggggttacccatatgccgaatgaatagagtattggggtacgttggtacgaggatctacacgatacgacatcaggcaaacaagaagacaagaattatactggttctggcccctcgtaaggtaatagccctaattcagcttatatgagattgatatggaaaaaccacggattacaaatagagaaccaacaatctcgagattaccggcgagacccttgttgagatgtttcgacgagatctcctggtgagtacacttcacgtcctccagattgtaggctacagtggtggtggtgttggccttatgattcgatgatctggacccctcagggggtgtgccttttataccctgaatcaccttagtctttaagtagaacttgaatgctatagaccctgcacgatatagtataaacccaatcctctccgagtatgattctgctattcacttgcccgtgaggataatttccataatctcgtgttaatttctttatcgtatacggaaatatattgtacacacgaaggtacgccatatctgtatattccataagtcgtaggataggaggtatgtcttatccataacatgacacaatgttagatttaataaaacgaaattggtgttgtagatattgataattttttttataaacttagttaaagtaaagaagtttgaatagggaaaaagttaaagcgtcttataatatgaaacagattgagtacatgatattattatagtgattttcaacacaaatcaatgtatacctctttttagattacacattcaaaaaaatattgatggtcataagttcaaaagtttaaccgaatgatggccaaacgtcaaatatttatgactgggtgaagtatattaactaactatatacaaaattttagtatgttatcttgaaaaaggaatattgaaaggctttttataagtcaaagttctattagtttgatgaagtctatagaaacacatagcaatatttttaacgcaaattaagcatactatcataatatattcaatgttagatttaatgaaacgaatttcatattgtagatgttgctaaaattttcttcatagaagtttaacttaggaaaaaaaatcaaaacatcttataatattaaacagagagggagtagattaaactagcctgaagctaactgctggtcaactttgcatagaaagaattattaaaattttgaaaaataaattttatgaatccagttaaaatgagttgtgcaaatgttgcagcattaattgttatttttgaaagtgcattaatccccctagtgggttatggtgattaatgacaaatgtggttaagggactaatgagtttattaagctactttcaggtgcattagtccaaggtgtggaagatggatgcttggagaccccccaaaagtataaaatcaaagcggaccggaactcgaggagtgcataggataatttatttattgcaatcgagttttaggaaaaaccgtactattaagaggggttccaggtggtgctctgagatatggtgctcttagtgtgaaccaagtgacaattttccctagaagtcatttttgcaaatactccatctgtcaaaaaatgcaagtctggaacttcctgtcttccaggtccggaagttccggtctggtgaaagagattttcctatgtattgttccgaagtttctgtcttccaggtccagaacttccaatctaatttccagttcaaaattgttagtaacggctagatgacgtcacctagctgttatatctaaccagcttgtttccagctctttctttggccattccactttcccttttcgaccccagagctgttgctagcctctcccaaatatttcttgccttctccactcaatcttgagcctaattctagtgagaaagagagattgagggggagagaagaagatttggagatgtgtgaaaactaggatcttgggtgagcacttggtatatcttgtgggctgacatctcggtgcctattactcttggagataatctcctagacggttaggtgtcacccgcgagaatccgttgcatattgtggatgtctcgggtaagtttgtgaaggatctcctctcctccgaaagggaacgaggtaagttaatgaagttcttgtgctgagattctagaggttttccaagtagagcaacccacacttgtggtgaatttctagaagtaggttaagttggatcttggtgatcactcaattctagaaatttgcctaggggtgtttggggttgaaggctgaggatttcctctagggtttttgtacaagtgaggcaaggggttaattgagacccagctctttggagctcctcaacggagagtaggatcgcttgatccgaacttcgggaaaaaatcgctcttatctctttctgtgatgtttctgtgattgtctctgtgattgtgtttctgcttagaatacctgtgaatcatcttgggagaactggctaagtttactgttctgaatcttgaattacatccaagtctctgttatacccggaagttcctgtccaaagaacaccggtagtttcggacctggaaaacgggaagttccggtgttccatatcaggaagttcggggtctgtttgaattttaccgctgcgatttatttttaagttttcaaggacaacctattcacccccctcctctaagcttcatcagcacattcaattttgtcatatggccaaaggcttgacgtatcacggtcctttctcagcacaacaatgttgtctagctgtccaaactacagtgatatagcttaattgtaaaagcatctgcaatgtaggggtgctaaaggagagagaaacaaaagactgttgggccttttgcatgggtactaatccaaaggagagagaagaaattgtctcaagccaagaaccaggtaagggcaagttttataaaagaggtagatgctacatctaattttaaccagatcatcaactaataaatataaaggtaacatgtataatatattacatctttgataattctaatacactaagtcccaatgtttatttgcccaatcactcttcctctctctccttttgtcttgaattttgtgtagggttgcctcttgcatgtcttctctccttcacctcactatttaagctcatgtggcatctaggagattatgcttggatgcttatagtatttgccctaacaagggtatctttgggacccataagagacaacaaacaatagaaaacaatgttgagagagaagatgctctagttttcttagtatattccaagatgatgcaaactacacggatttttttcagcgtgatgtttgtgcatgtggcggagcttaggacccctaagtaaatgatacattgcggatgctcatagtcaaagtatagcttattattaacaattcttaaagaaaatgtttaattagtttggtcatactatgtttattttctagttgaagtaacagcgaatcgtggtctaggcataagatgcatacgactttagggtctgaagaggcatcggatgtatgggatggatgtgtgcatattggggggatttgtaattatgacactgcaaacattaaccattgctataatgatattggactcacatttcatagacacagatggacccatttgtcatccactcagagtgtcaaaacagcgaagccctcatgtttgcagtcctaatattgcaattttctcgtgcatattggggtgatttttcaacaaaatatttagtgagtccatgaatttattgctagtctctatacgtcgagcatgtagggtgtgtgtgcgtgttgataacttcattgcgtaaaggtggtaattcaatacgacataacacatgccaccagtgaatggtgcataaaattaagactctttagtcaaagaaaacaaactaagacccattttatgaagggagaacaaaaataaagtggaaagtgcctttgtgtcgcattttgtgtagggagaacaaaagtaagctcatcttgcaatcactgaaaatatcaacacaaaatcaccttttaaaaaaaggcaaaatttgctacaggacaatcaaaaaatatgtaattggctaggagacaccacaaaaacgtgacacggctgatggacactaaaaaatggtgtaattggctataggacactgaaaacaatattttataatttccgggttaaaaggggtgagaaactttccgaaatggcgaggttgcccctagcgcagctgctggcaaggttgtcgacggcgagctagctggcggcggcgcccacgcaccaggagcggcaaacgaacggaggcagacgcggtcagggagggacaagggtcggccacgcgcgaggcctacgacggcggcggcgcggagcgcgagcaggaggtggccgcgcgccaggccggcgatggcggcggcgcggagcacgagcggcggcgaggtttccgttgagcacgctgcgagcagcggggattctggttctcaaattcctgatctgcggcgccccggacccggcgaacatcacggcgatgcacagggccacgacgacgacaggtagagcaatcttgaggaaaagatgagctcgtcgggtggagttgcccggggctggacatggcggcaacctgcagctgcgccgtgcccgccgcaccggcgagccgtgggaggtagatggcgccaggggcaatctcgccatttcaaaaaatttcttacctcttttgacccgaaaattataaaatattgtctacagtgtcctatagccaattacacaatttttgtagtgtccatcaaccgtctcacgttttttcggtgtcttccagccaattacacattttctgagtgtcctgtagtaaattttgccttaaaaaaatcccatgttttctctactcaaggataaatattcctttatggttcctccttctactaatacatccaaaagcaccaagctaataaaatccacgtacggatgcatgatatactagactcaattctctgttactatgagaatttagatggttcatttgcaaatattatgaggtctaaggtttgaaagcaaaccatcacctttattgtaaaaaacatttggtttatgttcattccactgtaatgttccactagaatccacatgacataagtcatgtccatcccactgttggaattaatagatgggctaaggcccattcgaagattaattctttggaaaatcataaaaacccacctcatgggatggcatgcatgtagagtttagtaccaccttgcttattctaggagagagggacctccttaaaagggaggatgccctcctagccaattgaagcatgtgtggtggagagaagaggggaaacaagcgcgcgctcgctcgcctcgcctggcaggcgacgcgcatgcacggcgtacgcgtcgaatggtccgcaaaattggctcctcacctttgcgcagatgcagtctccttttgcagttttgttttgctgcaggaaattcggatttgttttgttttggaaacattccgaaaaatccggtgcgtgaaaacggcatggagccaggataggttacgcgcgacttatccggttcggtttacgcggcgccctgatcaggcgatctatctctatataaaccgagccgccgccttcacgcaacacacgcgaaatcaatctagggtttgcctcctactctgtaatgcgccgtcactcgtagactactccatcccgctcgccggcgtgcaccggcgatcaggagagcaggtctccggaacctctgccttcgacgtcctgcaccgggagaaggcggcaataaggtttttgggaagcgcttcgcgcgactgctccctgttcgtccgtgacggctcgccttcttctccgctcgcgtgcttcgcgccttcatcgacgctcgcaaccgcgagtagttcctgccgagcaaccggtctttccgccacctcggtacgtgttcgatatgttgtgcatatttgatttatttatgttttactgcttagtttacatgtgtagatctaatgatgtgttcaatctagtttacatctgcaatgtcatgatttatttatggaataaattaaatcactatgtgcttataatttcaacaatccaaaaccttattgtaggcactgtgattttacaatggctagttttgccgatgcactgaggccggataaattcaccggtgtgcactttaagagatggcagatcaggggcactctgtgtctgacggctatgaaatgcttctgggtgagtactggcaaacctgaaggaaattcttactgctgatcagcagaagcaattcgaggaagccactactctctttgtgggatgcattcttagcgttcttggcgatcgtctggccgaggtgtatatgcatatgaccgacgctaaggagttgtgggatgcactgaatactaaattcggtgctactgatgctagatgatctgtatatcatggagcagtttcatgactacaagatggctgacaaccgttttgtagtcgaacaggctcatgagatacaaaccatggttaaggaactcgaactccttaagtgtgtcttacccgacaaatttgtggccgggtgcattattgcgaaactacctccatcatggagaagttttggtactgcactcaaacacaagagacaagaatactccgttgaggggttgatagcgtctcttgatgttgaggagaaagctcgggaaaaagacgccgcatctaagggcgatggtgggcagtccagtgccaatgttgtgcacaaggcccagaacaagagcaaggggaaatacaaagctcaacagaccaccaacttcaagaagcagaagaagaacaacatcaatcctaaccaggatgagaggacttgctttgtgtgtaggcaacctggtcatctggctaggaagtgtccacaacgcaaggggatgaaggcacctgcagggcaaacttctaagtctgctaatgtgacaattggcaatactggagatggaagcaggtatggtaatttacctactgttttttcagttaatcagtctactaattggtgggttgatactggggccaatgtacatgtttgtgctgacatctcattgttttcttcttattaggtcgcacggggttccactgtcctaatggggactgggtcacatgcttctgttcatggtgttggcacagtagatctgaagtttacttcgggaaagatcgtgcagctgaagaacatgcagcatgtcccttctatcgacaggaatcttgttagtggctcccgtctgactagagacggatttaagttggtttttgtgtctaataaagtagtcgtgtctaaacatggatattttattggtaaaggttatgagtgcggaggcctattccgcttttccttttctgatttctgcaataagtctgtgaaccatatttgtggcagtgtggatgataagactaatgtttggcactcacgtttatgtcatattaattttggcttgatgtttcggctttccagcatgtgtttaattcctaagttttccattgtcaaaggttctaagtgccatagttgtgtgcaatcgaagcaacctcgcaagcctcacaaggctgccgaggagagaaacttggcacctctagaactcctacattcagatctttgtgaaataaatagggtgttgacgaagggtggaaaacgatatttcatgacgttgattgatgatgctactagattttgctatgtatacttgttaaaaacgaaagacgaggctctagactattttaaaatttataagacagaagttgaaaatcaacttgacagaaagataaaaaggcttaggtctgatcgtggtggagagtttttctcaaacgagtttaacttattctgtgaggaacatggcatcatacatgagaggacgcctccctattctctcgagtctaatgggattgctgaaaggaagaaccgcacactgactgacttggtgaatgccatattggacaccgcgggactacctaaggcatggtggggggaggcattgttgacctcgaatcatgtgttaaatagagttcctaacagaaataaggacaaaacaccatatgagatatggattgggagaaaatcatcactttcttatttgcgcacattggggtgcttggcgaaagtcaatgtaccaataacaaagaagcgcaaacttagacctaagactgtggactgtgtctttctgggatatgctcatcataggattgcctatagatttttaatagttaaatccgaggtacctgacatgcatgttggtacaattatggagtctcgtgatgctaccttctttgagagctttttcccaatgaaggatacacatagtagttcgagtcaaccctctgaagtaatttccagtttaatcacaccaccagaacaaactgaacatacacatgaacatgtcactgaggaggatgtcagtgaagctcctcgaaggagtaagagacaaaggacggctaagtcctttggtgatgatttcactgtgtacttcgtggatgacactcctaagtcaatttcagaagcatatgcatctcctgatgcagactactggaaggaggctgtccgtagtgaaatggattccattatcgctaacgggacttgggaggtgacagagcgaccctatgggtgtaaatctgcggggtgcaagtgtgtgttcaagaagaagcttaggtctgacggtactattgaaaagtacaaggctcggcttgttgctaagggctatattcagaaagaaggcgaagatttctttgacacttactcacctattgctagattgaccacaattcgtgtgctactttccttaccagcctcacatggtcttctcgttcatcaaatggacgttaagacaatttttcttaatggagagctggatgaggagatctatatggatcaacttgatgggtttgtagttgaaggtcaagaaggcaaagtgtgcaaattgttgaagtctttgtatggtctgaaacaagctcctaagcaatggcatgagaaatttgacaaaacattgacatctgcaggctttgcagtcaatgaggcagataaatgtgtgtactatcgccatggtgggggtgagggagttattctgtgcttgtatgttgacgacatactgatatttgggacaaaccttgaggtgataaatgaggttaaatcattcttgtctcaaaattttgatatgaaggatttgggagtagctgatgttatcttaaacattaagctaattagaggtgagaatgggattacactcttgcagtcccattatgtggagaagatcttgaatcgctttggctacattgatagtaagccttctccaacaccttatgatcctagcttgttgcttcgcaagaacaaaagaattgctaagaatcaactggaatactcccaaatcattggctcgctgatgtacctggctagtgcaataaggcctaatatctcctttgttgtgagcaagttgagccggtttacctctaatccgggagatgatcactggcgtgcacttgagcgagtaatgcgctatctgaaaggtactatggaattggggcttcactatactgggtatcctgcggtattggagggttatagtgattctaactggatctctgatgtggatgagatcaaagccactagtggatatgtcttgacattgggtggtggtgctgtttcgtggaggtcttgcaaacagaccattttgacgaggtcaaccatggaagcagaactgacggcactggatactgctactgttgaggcagaatggctgcgtgatctattaatggatctgcctattgttgaaaaaccgatgccggctatcctaatgaactgtgacaatcaaacggtaattgtcaaagtgaatagttctaaggataatatgaaatcatctagacatgtgaaaagacgattgaagtctgtcaggaaattgagaaactccggagttataacgttggattacatccaaacagctagaaacctggcagatcccttcacgaagggactatcacgaaatgtgatagataatgcatcgaaggagatgggtttgagacccatgtgagttatactatggtggtaacccaatctatgtgatcggagatcccatgaattagaacctgggaagaacaaaccattagtaaactagaggagagtaccaatttataccctctctaagtgaagatgcatgtactctcgtgagctgcaaggcaggttggctatgtcttaatgagttctgttggctttaattagcgaagatgctgtcctgcagagcattcttgaaagaactcacctttgtaagcttgactgttggtcgcagtctatggagattttgggtgaatcttctaggaagtttactaaagacctaggagtatgacttatacgctccacccgaggggtagtctacagacggtctagtaccagataagactctgagtgaaacttgcttacacaagacttgcaattcaaggcgtagtccattgttcaagttgtgagtaagtgtagcttggagttctaggtggatgttcaaccttaatcgctctccattgaaccgctggtatataaacagtacgttggaaaaggcaaatctcagtgggattttgagatttggtgggggattgttggaattaatagatgggctaaggtccattcgaagattaattctttggaaaatcacaaaagcccacctcatgggatgacatgcatgtggagtttagtaccaccttgcttattctaggagagggggacctccttaaaagggaggataccctcctagctacttgaagcatgtgtggtggagagaagaggggaaacacatgcgcgcgctcgctcgcctggcctggcagggcagggcaggctgcgcgcgtgcacgacatacgcgtcgaatggtccgcaaaattagctcctcacccttgcgcagatgcagcctccttttgcaggctgcgtgcgtgcacgacatacgcgtcgaatggtccgcaaaatcacccttgcgcagatgcagcctccttttgcaggctgcgtgcgtgcacgacatacgcgtcgaatggtccgcaaaattggctcctcacccttgcgcagatgcagcctccttttgcagttttgttttgctgcaggaaattcggatttgttttgttttggaaaaattccgaaaaatccggtgcgtgaaaacggcatggagtccggataggttacgcgcgacttatccggttcggtttacgcgggcaccctgatcaggcgatctatctctatataaaccgagccgccgccttcacgcaacacacgcgaaatcaatctagggtttgcctcctactctgtactgcgccgtcgctcgtagactactccatcccgctcgccagcatgcatcggcgatcgggagagcaggtctccggaacctctgccttcgacgtcctgcaccgggagaaggcggcaataaggtttttgggaagcgcttcgtgcgactgctccctgttcgtccgcgacggctcgccttctctccgctcgcgtgcttcgcgccttcgtcgacgctcgcaaccgcgagtagttcctgccgagcaaccggtctttccgtccctcggtacgcgttcgat

SEQ ID NO: 24054 - DNA, 9060 bp, Oryza sativa
ccaccatcaaagacttccccctcatcttgaaggagaagaaagaaactagtcacctaataaagagattagtgttaacacatcttttattactttaaatcatatactattactaaatcttttaccttggaccagtagtctacatgtcagcgagaaagtctctctctgctgcttcatgaactcctcaatcccatcttcatctcgataacagttccatctctctctgctacttcatgagctcctcaattccatcttcatctagatagcaactctagtgacatgggttggctgatggtgattgggagaaggtgggcttgaaagctcgagtggcatgccagctcaaggggagatcgagctcaagcttgtgagtgaggatggcccatgcccacatgcttgtgctacagatgacaacaccgtttcatcacccaaccctgtgccacggtgtctcatcttttgcagtttgcacctatgcaaccacgcttgtgtccttctagcacgtgaaatggtggcagattgcatccctccatgcatggtcgacacaacatcctcctgcccgatgaggtcgtcatccttgagggagtgagaaggtagggagaacaaagaatggtccgacggtttctttgcaatcccttgcctcacttcctgcttgtgcatggaagaggggctcatgcaaaaaaagtggagttgttcatagggagtcatccattgttggttctgttgtctgtcgagagattgatgatattatcaacgtgaattgtagacaatctcgcttgtctaaccaatcatgcatcagatagagggaagaggagggagactaactagcatgtgggatactactccaaggtgcaaatttagtccaaaatgaagagagttgctaatagtccaatatgtaatttatgtaataaaaaccggtacaaggtgtaattcattcactctcaaataatctactactatcattcttcttgattatagtctaacatagtatgcgtgcgcttaccataattgactattaacattttacgatacttgttggaaaaactatcccaaaagtcacttaatgcttgatattccacccaataagtcatttattgcaaatgcctacccctacttggttttattgcaaaaccaccccagcgcgcacatacctaaccgaatccgtatgttatcactgatgtagagccccacatgctaaactagctagatcaatcttgtccaagtgcttgcattaaacttattctttatgtttcattgattttttttctgcatacagagaaactcaattaaaaacgtttaagctctcattactaattctatttgtggaacttccaaaacaatatcaagacaatacttctagaaatatttaattttcgtatagaccacattgactcatcatcataaattataaaaacatattgatttggttaagcacatatgcgctaggttgatttttgcaacaaaatcgagtagaggggtggacatttacaacaaaatgacttttgagatagaatataaaactttatgtgacttatgcgatggtttttataatttttcatactttttttaagataatgaactttgtataatagttagtgatagggtatgactaatcttttgcaccctgataagctaggattgatgtggagatacgtattgtcgtattgatattcgtaaaatctaattcgagagccttctcgatttagcgctatcgcgcgacgctggtagagtcgtccgatcgctcgcgtcaccattgagtccatctgcgtgggcctttctagataagaatcgagatgaaaccactccaaccacacgcacatgtaattcttgtttgagaaagaagtcacaaagagaaaggttacagattctcccccatgtcatttttctcttcaaacaaaattttctctcaaattacttatccgatctacaatccgattacaccattgtgttcattacaattaaatctttacaacaagatcttacatgattatattacgatgaaaaaatatttatatttgtaaattacttttattatatatttaagttacttttatcatatatataagttacttttagatttgactaaattacttcttagacatataaaagtaaattcaataaagtctgaaagtagtaacattgtcacgacattaaaagtaaattcgttgtagggataaaaatatgactttatctagaaattaaatttaatcaacaaagatcaacacatgtaagtttaacaatttttaaaagtaacttcaatgttaattggaagtaacttttgcatggttcaagttgaaaagagatactagatggagtacaaactagctaccactagctgtgtagtcacgtctaatgaaaaatgtattagttaaagttactttcctttgttataagttacttctataatatatgtaaattacttttagggtttattgaattatttttatatgtctaagaagtaatttagtgaaatctaaaagtaatttaaatatattataaaagtaatttattatttttcatcaaaatataatcatgtgagatcttgttataaagatttaattgttacgaacataatggtgtaatcggatcatagatcggatgagtagtttaacagaaaaactgtatttgaagtataggtggatagtgccttttatagatagagtggtagctagtttagacaaaccagctaccactagcttcacgtccattgatactgtgatcatatgttttcgatctacctgatactactggctatattctaaactccacgaaatcatatcggaactaaaatccctatttgtcccattaaaattcatacgctcgttttggtcggtcttccctatttcagctatttggtgctctactgaccgacatgccaaaaacacagtatgaaaacagtaagaaacttactatttattattattttctatgtaaaaggggacattttcatatttatgaatctaattatttagtgccaactataatgaggcgatgataaaaattagaaaatctaaatatttagaatcgataatcatgacaaagatactattattatattagtttgacgagaatatcagcatgatcgggaaatttccgtttcacataaaaatcacccacctaaataatactaataaaatagcgtggtccacctacaccgagtccacagttccacacaggcgcacatcccgtacccaccccggcgtggaaaggaacccctgctgcgtcaccgctggcgctacccaccagcagcgtcttccgttgcctcctccttcccagttcccactcccacaggtagaggaactcaactcatcacaacaccccccaccccagtcgccctcccggtcgtcgacgtcgtcgtcgtcgtcgtcgtcttggaggcgaagaaagaatccggccacctataaatatactccccccccacccccacgccgacctcaccgccgctgccctcccctcctcctcccccctcgcaacctctccccgattaaaccccccaaaacctaccgttccatcgcggcggcgcggctcggcacggtggtggtgggggagatgcacctctacaacgagtggctgccgccggcggtggcggatgcggcggcacgggagcccgcggcgttctccggcgcggtgggggaggcgcgggcggcgtggcgacccgacgacccggactccgcctacgccacgctcaagtggatctccgtcttcgacctgtaaaaatttgtccctctccctcccaagcccctccccccccccttctgttctgttcgtgttttctaggttacggcggtggaggaggcgggtgtttttaggtccgggtggggttgcgatttcgtgtttcctgattggggcgcgacgagatgaggagtagctcggaatggtgcgaattgaatttggatagttcggacttctgatcggggggcgatcgcgtctggaatggggaacaattctatcctgtaatcgtcgtgcaaaaatttccgtagcttgtttagtgcttttggtgctatctagttgcaggctatctcatgaatttgaggtatggtgcgcagtaatgttgcttttggggtttagagcatgtgttcccagctaatggcggggataggtctaactgctggtggcactgcgctcttaagtcaaaacatgcgccgttatcacttatatattgatcactgcatggcatcgtttggtttcatcactggatgacaccgttatcaccctctgattcttacaaggagaccctgctggaattagaaattactgtgctggttcgagctatggatcatgctgacaaggtttctaaaagtacttttgacaattaatggtctctgagttgcgttttgaactttctagaagcatgtttgcttattcttgagctggtatatacaaatagtatgtggattttaacatttgcttttgagggctaacatttctcggattattcgatccaatttggggatttgaacagcagagtaattggcagaagcatgttgaattaaccttgtactggtgtacacaattaccgtagctgcaagcaatttgctcaactcccctgttttttttcatgaacttaatttaaaatattgaacgaccacaaagtgccactggaaagaacttttctcaataaaatgaaaagtatttttgttgtgggtgtgcctccatgatccaagtgctgtgataataacaatggcatctctgctctctactactggacatttcatgtgaccctataatccatcttgtctaccttttctaccagcactgaagtgataactgcatggacatgtaaccctaaaccctataaacctattcaaatctcacatactgtcttgtggcccacaaagttggcctgctagtaccaaatagtctccaccagaatgaaaattacctgttatctaaaaaaaaagggtctccactaccactaggttcatccccgttgtttgtgaatttgattttttatatgttagatagtaaactgtagttagtgtcaacatcctggttacattgtttacaactagagcaatgatattctttttgtaggaaagatacatagataacaacataattgaaaacgcttgatacaaacaaattgtttaaggcctcctgtgagttaatttggttggtttctgggtttacaaatgcaattaatatagatattttgtttctctatgcatttagttttatcaacgcaaagagtgatatttctcctgaggatgtacacgctcttgtagagctcgggttggagatatttcatgcatcacagaacaagttcgttgttcaggtaatgctagctatttacgatttctatatggctggttttgaccagtttgacttcagatgatcaatttttccctggtaaatgaatgcaaccagattaagtggggaggcctgctcgtcaggtttttgaaaaagcatgccaagaggatttcacttggtgtgcaatggaggccactgtatgatacgttgataaggactcatttcaagaggtatatttcgaatcaaacacactttttaagtgacgaagaatgacaaaaatagcagagttaatttcatgtctgttacagaaatatgggacctgagggctggaaagtaaggcagcagcactttgagactgttacctcattggtgcgtgcatctaggagtttgtttcctgaaggtgcagctgcagagatttggtcagaattcaggtttgactgcttattctgacttaagcatgggttcttttacttgtttcatgctcactcctattctcttgctgcgttgttaattttgttatttataactctgtgttgttgatacacctctataaacctgtacggtatagtgtttagcttgacaagatcttactgtaatcaaccaagcatctaccaagattagaggctttaccaggattctacatgcctagagacctctagtgcaggtctactacttttattttggtagctacacacaataagaaatgtccaaagcatcaactgagtactgtggtgttatgtttgcatgatcctctaattcttgtaccattatttctaatgttattgcttttctatactaccattgctgttaaaatttggaaaaatacaatatgtgattgatttttgtgagtgactatggtagcagttgtatttaccaatgacatcccattgcaccatagcagtttgcaatttgtgcttgacaatatgctaccaacattgaactgccttacctgatactatattgaactacagccccttgctgaaaaatccatggcataactcagcatttgaaggcattggatttcttaggctgtttcttcctgcaaactcaaggaatcaggatcatttcacgacgtaagtgaaacaggaagatatttgatcaataagcttttccttatatagctagaaaatcttcacttattgtttttctatcttctggtatctttttatgtagtgattggattgcagaatgtcttgacatatggggttctgtcacaaattgtaacttctgggatattcaatgggctgccattgtagcacgctgtataaaaggttccatatctgttgactgggaaaaatttatacccttattgtttacaagatacttgaacatgtttgaggtatgttgtcatcttaattcattctatggtactagccagctctaatgtttggaaggtggcgtggatactagctggttaacgttttgcatatgctgcaaaactgcattttctatgaatcaagtgttgcaagtttaattaattgacaagcatattagaatagcaatctattttgctgtaacaaaaaataattaactaaataaaggttattggaatacttgtatttttaaaaactgaatcagtttctgtaatcttctgtccttcatctcttgtatataaactgtctgtgtaaattatgttatattgcagtgggagactctaccgctgtttcattaagaaaaaaaggaagcagctattattttcatgtgccctgtaacttgctcgttaagtgtatcaaacattttatcatttcttttgtgaaggtgaaccaatgttttaaataatgcagtggaatcatagtgctggagtgtttctgttgtagataattgcattatagacaatgaaacatgcatgatcttgtttgccaaatgcatagtttgatcatttgtgcagtagagacgcatgtcttgtgctatttaactgtcataaaagcaccattatatgtaaaatattttgatccacgcaaaaagttgcttgataaaatactctcaatttattttgatactgttactttctctatgcttaggttcctatatcaagtgggagtgggtcatacccctttccattgaacgtgcctaggaacacaagatttttattttccagtaagactagaactccttccaaggcaattgcaaagtccatcgtaagttattcgaatgctgttttctttaatttttgtacaaagggaacatagagatgcaatttttatgatactttgtaaaattcatcttgttcctttgtttgactagtgcaaaacacatatattcgttttgaagaatataaagttcaggtgggctggattacggccttctgtggagtcctaagaaaataggaaaactaatttcaataaggagccatacctattttatttttaaaaataagttcttttgcaggtataccttttgaagcctaaaagtctggcattggatcattttgagaagctcgtaaattttctagaacagtctgtcttctgacctctggacccttttgtggttgctgcactggccttcttttttaattttaactagatttgtttaaacttgtaggttctatcatccatcaaatgggggtcggtggacctactcattggagcgtttcttacgatatcttgttctttactttgaaagacgccttcagcatgaacaattgtaagagaatctttgacttgcgtgacaacttgcaagatgtttttcttatcgattgcatcatcatctgatgttatatttgcactacagtgaagcactggatgacaaacacaatcaattttgtttgggaaaagaagaaagatgtggttttgtcaaagtagtcctgaaatttctggatcgtggtcagtacagcaaggatgattctcttgctgacactgtgtctattgcaacttcaatcctatcttatgttgaaccatcccttgtgcttccatttgttgcaactaatttccagctagccttagagacagtaagttgaatttatgctgtatatttcatattttttccatagagattttgttgcaactaatttgcacccccttctcaagttcatatttttgttggaaaaacgaacttactgttttaatttattcgaacagactacagctacccaccagttaaagaatgctgtcacatctgttgcattttctggacgtgcacttattctaagttctctatgttcgtctcaatctgatgatagtagcactgctgatacattaaatgatcttatcgttacttctctttcaaatgcgttacttggtatggatgccaatgatcctcctaaaactatagctacgatgcagctaattggttccatattttcaaacgtaagtgtatttatctttctcaccttttcttgcactgttgaacttacaattgctatactgagcatcctttggtgtttatagctagccacagctggtttcagtgatgatgtgcctgctttcctccaaacctcctatctgtcagagtggcttgatgaattcttttgtcggttgttttctgtccttcagaatttggaatcaagtagtcctatgtaagcggcaaaactaaattcctgtatttaacttattgttacccgatatctttcagaacatggcagttgacatcttgtttcatctggatattgcagtaatgagggttaccaaagctcaatcatgtcaggaacttttcttgttgaggacagcccatactatttttgcatgctagaaattgttctggggaagttatcaaaacctttatttaatcaggtattgcactagttagaagttgatccactttgctgtccttaaacctatgaatttcctgtcatgcacatgtttcctcatatttttttttgca

SEQ ID NO: 24055 - DNA, 8166 bp, Oryza sativa
tttcatttcttgaatcgttacatgtgtttacatacagttgtgcttgctaaaaatgcaggctacactttctcctgctctggaaacagcattagactactacctgcgggttttggctattgctatcagttatgctggccctgtcttgctcaactatagacaagaatttaaaaatataataacatcatcattccaggccccttcgtggaaggttcatatttccttcatcattttgtacttttggatacatacgtatatattacaatttgaaatgatggattccatcttttgaatacctaggtcaatggagctggtgatcacctccttcgctctctgctaggaagcctggtttcatattatccaatagatcagtataagtatgtttacaatatgaatacccattttaagggcatgagcaatggtttagacaactgctacctgtataaactttacacattatatttagataatgtacaaacaacttgtacaatagatttgtctaattagtggttcatataatcaatgatttacaattgatagatgatatgatgctatctattcgaccatttgctgatccagatggcatccttctctctctgatttcaccttcctccacttcagtcctacgtggcatcccctcctagattctgacacacaccattgttctcgccccaagaaaaactgcttttacctattttaaaaagattgcttattttgtaggcccttttcttgtcagcccattgctaatattattgaaccatggggctgttcgaaagctcatcaggacagggaagttgaaatgttaaatttcactccaaagtggcatgatcccagtcaagatgaactatcttttgcaaatgaattgttagaatttcatttccaatcagcattggaagatcttgtgagtatctgtcaaagaaaaaatcattccgagacaggtaaatattctagttttgaccatggaatgaatcctctctttttttttttttttcgcattgggtgctcaagtagagggggcaatgaatgtcatgttattaaaaaaaatggtacatgcatgtttaagtctttatgatcatgtttgttgactggaagctgattacagtagtgttgatgcttaattgtttacctatttaagtatttacttttattagatgattccttcatctggtgtgttgtttttcttttaacaggacaagagaaggagcacctaaaagtaaccctattacgcattcattctgcattgcagggtgtaatgtcttgcttacctgaaatgcggccatcatataaagatgggaaatccaaggtagtggagcccataatttttattgcaggatctgctggtagcactgttggcaactcagaaatgcgtgaaaaggctgctgaacttgtacatgtagcttgcaggtgaacatttgtttcttgtacacccaaatttatctgcttagtcttttttagcttattttgtctcaccatttgcatttcttccaataggtacttgttgaaagaaagaactgatgatagtatactcctagcacttgttgtacgtgtcattgatgctttagtaaactatggtatgttaattaactatgctcaaagactcatactggggtgtagatttgcctgtttatatattctactgctgtaggtagcttggaatatgaagaatggtcgagccattttcaagcttggaagttagagtctgcttccataattgagcctccatgcaactttattatcccatttcattctcaaggcaaaaagaggtattgtcctattttgttcagtctgattctagtatatggattttgagtgagttcattttttttttgtctccaataggcctagatgggcacttgttgataaagcacacttgcataatacatggagaagttcacaatcatcataccatagataccgtacaaatgctgatgtatctccatctagcctcatggttaatttgatgaatgatctcctagatctctcactacacaactatgaaactgttcgctcgtaagtgctctagctctttcttcctctttcaagcttgcttatgtatttagttatttgtatatgccgatatagtttcacttgtggctaagctttattattcatttaattggaatattactatcaacatacgcatccactttatgaactcaacaatcgatgaaattggttgtgttttgctgaaaaccaggcaaacaagaaacaacttcttatcttttcaaaagggggtatttcaattgcttacacgacaccctttgagccatttcttttaaataatacatgcatatttgctcttagaaatggtccaaaattcaatgctaaatgtgaagttggctgttttttttttttttttttgggggggggggggatgagacctcacaaaaactttctttatttttgcaaatgaccttcttggaaaacatttttatatatcccgaggagaattttatttcatctattgcatttttgtaatatgtggatattattaatttattgtaacctcattgtataaattgagttttgatcgatgggttatgtggtcatgccagatattaccacttcactttgttctgatgtttccatttttctgcattatttttatcctttatcctgagcagaattttatttcatctatgcatttttgtaatatgaatactacaaaacaaatggatagtattctatttgtagttacttcattggctggttattgattttgacctaattgcattaatgaagtattgatcaaataatttattgtaacctcattttataattgagtcctgattgatggattatttggtcatgccagatattaccactttactttcttctgatgtttccatttttgtgattattttaatccaggtattctggaagatcccttacaaaattacttaagcgctggccttctctaatttctaattgtgtcctcacattgactgataatttgcgagattcaaaagcacctgaacatacggtgcttggttcttgcaatattcttggaactcagactgttttgagacacttgacaactgtatgtctattttcacaatttatgtaatttagtgttaagttattcataagggcaaagatagttaagttattaaattagtgttgacaatgctaacatcactattccatgcaggactcggtatcactctcttcatttatcatgggcatcttggagaggtagtaggcactactctatgtttgtcctgttatttctaataatttggaactatcagttgttcgatatgtttcattgtaaattatacttaaaaaaataaaaataatcggcactccgcatagaggagaaacttgaaagtaagacacctgtttgacatgtcttttttctttgtagctctcatcatgaatcgctcaagtgtcagaaagctattactgaggtacaattcaataatagaacatgaaggtggtcatgagataatttattacttctaaaatattctgtatacattctttacagctctttgtgaagtataacatacgtttctctgggatatcaaggagatttttcaagaatacagaatgtgaagcagacaagccaggatttatcagtttagttcctaaaataaatgctttgagttttgagagtaatagtctgcattggcggtaagcaattgatataaccgaaccaaatttgatatatctctgtgacatatggcactttgaggctttaaccttgaaatatttaagattcatgtcttctgatagatatacaccaaatcaaatatttcctctattttcttcagttcactaccttttgctgttgattttttccccaccaagttctgaaccttgccatatctttacccactttgactaattttccatgattgcaacttctgctacctcatcatcatcagtctttcataacattaattaatcctcaaattattgaatgaaaatatttctggtagtattaacaacaacattaataatagaaagcacatagtatgtgcaaattgttgaattgaattagctcgataaacacataataacaaaaatatatgattttagatgcatccaccctgaatcatggtgcaaatgtaccatgacaaattctgaaacaattcgactgcattgagataaaatggacccatcattttacagaaagaaaaaaaaagtacatgcaaacgcaaaaatgacaaaattcaatgcactatagaggactatcttttttatttatcaatatgtagactagatttaaatttgttttttttatgataaactttattttgtgtgaatgcttttagaatttcaatttttcatgaccatttgcactgtatcttgaagaggatgccccatgttgccccagatatttttcccttttgttgataggtctaggtctcaagtccagaccggcaggtcaccggttgggccacttgtttatcataattaacattagttaacattaatttgaatcaatagtattttactaccgcattttcatatgctatattaatatacatgtatgttgaaagaagcttgtgcatcgaagtagctgcatatgcaaagtcagcctccagatggaaagtcagccttgaccacatcaatatattttaggaataaattgcaccatgggtataacaagttgagaatttgtaccttgagttgttcatcttgtttaagtgatgggttaccatgtggcattgactggcatgccattttgctctatgtttagtttttcattttgcagaaaacctctcccattcttgatctctctcttactcacatcctgttcctatttcatcaatgaccatagctttcatctgtcacctttcttaccccacctcactctatccattaccctgcatatatgaacttaggaaaaacgccggggtgggggtggggggatagagtggttaactggttgtactctgagcagtcacacagtaaaatggagttgatcatatgcaccacttctacaaagacaaatgctgcccaactgttcagtgccttgtttctaataatagttcagattcgatggtaactgttgtcagagtacaattaattgtttcagccattaatatataaccttggaacctttgtattctcagatacaatttgatggccaacagagtgcttctgttgctaattctggcatcaagaagtgaatctgacatacattcacaaatcttgtcagaaacagctggtatggatagcttactctctttggtggtttcttgtatttgtcaaccatgatatattttctttctttatgttcatgaaaaataaagtttgatacttgtatcctcaattttattacttagaacttagaacaacttttttttttgtgtaggtcatttcttaaggaacttgaagagtcaactaccccactcgaggatgcttgcaatttctgctctgaatacactattacaaggatcacctgataaggcatctcttcaagattcacaacaatcattagatcgccctgaagaaggaagcattttgtccacaggagaaattttgaataatataattcgggaggatggatttatgagtgagactctaaacagtctatctcatgtccatattatttctgataatgatggttcatcgaaagcaagttatggtgcttcatcttttcaaagcggttctgataaagcaatcacttacttctattttgatttctctgcgtcatggccacgcacgccaagttggatttctttagtgggtggtgacacattttattccagctttgctaggatatttaaaaggctaatacagcaatgtggaatgcctgtaatatcatcgcttcagaatgcattggaagagtttcttagttcaaaagaaagatcaaggcaatgtgtggcagctgaagcgatggctgggatgcttcactctgatgtgactgggaatttggagtctgggaacaactggttgatacttcagttgcagaaaattatgctttcaccatctgtggaatcggttcctgaatgggcagcttgcattcgatatgctgttactgggaaagaaagatctggaagtcgtgctcctgttctcagagagaaattattagattgcttatgcacgccagttcctcagtccgtggccaccagtgtacttgccaagagatattcttttctgtctgttgctttaatcgaaatatctgcaccaaaaatgtctccagctgaggagcagtaccatgttaaaattctcgatgaactgcttgccaacatgagccatccgtcggcccaggtagcgttgattcacttgatcatagtatatcttaatcttgcctttttttagtttcaattttatattattttgagttttcatttcagttatacccgaataacatttccttgtcttttaaagaaaaaatgtttgtttcctctttgtcttttgacaatgtggtaacatgcaaccccattcactaggatttagggtctgattatgcatgttctagtccagataggttcactggatcttgggcttggcaagtacaaactcgtagatttgtgatatttcctgctaactggagaaggcttacactatcttctgtcgggatacttgttaggaattaaagatatggtttattaggaaagtagaggttgtattctcaacagacaagggactggtcacgtgaatagtacccctgggatactgtagccaagaatcatcactatataagggacccatgtctttcattataattaagcaataaagaaaactaaagttaggtttagcttgatcagtgtctcctagtgatcaggacaagccctccacctacaaaagtgatataccctttatcccccctatcataagtcaacacccataacactgaaagttcaattctccttgtttttcctgattcactaggctgtaatctgtttgggattagcaacaggttgtcatttagagctgacaaagaaccataacatacttattgctgaacatcacaatattgcaccacttacctatttcagaacattatgtttctgctccatttgttcaatatgtggtattatacacttttgaagttcttttaactatttttggaaatgtacactatgcacaataacacatgtaatgatgcatctgagcttaggtagaattggtcaacactgtttatatttatcataattcaaacacaattcacataatatatttagaaaaatttctgagcttattgtatcaactagtttatggtttgacaatttgccactaccacatggtcacccttttttttttgtcaaaaaaggaattgccttggaggatttaactgagctaagcctattcaccttccattgtgttcagataagagaagcaattggtgtgaccatatgtattgcatgctcaaatatgcgattatctaggttatttgggcatggtgattctctagatgtttctggggatgtaagcatgactgaacaaacagggagtgagaactggtcaaaacagttgacagatggagctactgaattatctatcagtatacaaaataatatttctaagcaactggagtcaacaccagattcagtaactgaaaatggcttggacaagaaagaggaggctgatgtgaaaagaatggaaacggtccttactttatgcttctctccaaactgaaaattccacaattcatttggcatgtttcaaacttatcttgttcttgcttcttttgcagatttttcacttcataattgcatcgctgaagtctgggagatcatctgttctactggatgttattatcggactcatctaccctgttctctcattacaggtatacatcttatgtttacatgatgacatgatttttttttctcgaaaatgcagaactgcgcctcattatattaagaagagagaaaggggctagagccctacaacacaccacacacgacccacaccactcaacacaactcccaactcagaaaactcatttgttcttttctctggttttcaaatcattatttaagtaatgacttgagtcttcccttttcttgttgaaggcttgacaaacatgaaatttcttccaagttgtgcctttttgtattaagtggtctgaaaattttcaccatagtttttgcttgtctactattccctccgggttgataatacttgtcgttttggacaagggcacggtctctaaaaaaacaactttaaccattattttctattataatatatataaaagtgttaaca

SEQ ID NO: 24056 - DNA, 23079 bp, Oryza sativa
tcaacccggagggagtagaagacataagcgtttgagaatctttggattatcatctttgtttggatatttgtctgaatttagtgactctaatagattaataacaataggagttttaacactttggctgaactatcatgtatctgtaggaaacatcaaacaaagatttgtcattgcttgcgaagtcagcttttgagttgctgaagtggcgtattttacaacggccttttcttgaaactgctattatgactattctttcttcagccaatgatccaaactggcggaccagatctgcattgttatcatatctcaggacatttacgtacaggttgaatttcagatcttctcttgatttgctagtgtatcaattattatgataaatgtgttgtccgtaatttattttgttcttccctagtattccctagtattgtgctcagttataggaagatgccttgattgaatcttaccatgatttgtgagttgttatttactagagtaaatttattgataatcaaacttgccttcctggatctatgtcgccgtaatgagaaactagttatttagtcatcaaaattgtgtacgtcactatgttgttcaagtgaggtaggtcactttgtggttgctgagcatggtgctgatctgggactaggaactgcacggccaacatgtggctgccccattccatgtaaatccatttattacaagatcccccaatcaccttctcgtcctcctatcccatccctttctttccagtccactgagcaaagcaccccaaagccctagttaccaaatgccacaacctgcaaaatgcccatatgctgcttcagtagggagattgatccaggagggtaaatcttattcttttttttttttttaatctaaaggcaagatatataatcagatttcacgctttagtatccttaggaagggatgggaaggaggggagagggtttgattgagtaacaaagtcaattgcagagcagtgtgacgtccatatgaaacatggtatcacagattacaagggttaaggatggatatttcaacaactacataaacaaacacaaaagaagatttgcattggacaatgccattccagtttgccagctacagctacatcgcatttgctaaaatgataggtgggtgagaaagggcattgtgaaggacccttcactagcaacatcgcatatttggaagtttttttcccccactaaggttgcccctaggatatccatcttgtcccttggatttagattctacatctcatagtggatgggtatcaaacctcgtagctaagaaatagggcatgtccatgctgcatatactagaaaaaccacctaatcatgtcactcgaattacttgtaccagttccatgactaagtttcttagtttctgagttcgctgacctctatttgaaccactgacaaatttgatgtctcactgctgtcttttgctcttgacactatatcctcatcaagggcagtaggatgtagaaacacatttgcgctcctgtattgcagatctgtaatatttctttattaagtcagctggctttttgagacttatagctgatggaaaataaatgcattatctttgtcgcaggcatacattcattctttccagctcagagaaatcacaaatttggcaaacaattgagaagttacttgtggatagtcaagttgaggcaagtatatatgtttatttggcctgtaccgtacatacttgtttttctcttgtaatattccttctaaaaaaattgtctcagccttctaatttctagcctttaactttgcattagcacccatatgaaagcaatactgttcttattaaagatgctgtcagtgaagacttatgctgtcaactgtatgaattttgttgctgtatttccaggttagggaacatgctgctggtgtccttgcaagcttaatgaagggcatagataaagacctctctaaggactttcgagatcggtcatatgcacaagctcagcgtatccttcatacacggcaaaggttaattttttgctgatttttatattactctctagtctcttcatatcactgatttgttaaaaagatactacatactagtatgttttatacctgctgcttcttgcagaggtgcaaagtcaggccactctgttgctactatccatggtgcagttcttgctttgacggcttcagtgctttctgttccatacgacatgccaaggtaccttcgtgacttcaatccttgtctttttcgtctaaagaggacgatgtagttagattcttcgtcaaatcacatcctagtggcctacttccaaatatggtggctactttactgttctgtttgtttttaaacggacttttcgttgtctttgcagctggcttcctagtcatgtaactctgctggcacgctttattcgtgagccctctcccataaaatcaacggtcacaaaagccgtcgccgaattcaagcggacgcatgctgacacatggagcatccagaaggaggccttcacggaagacgaattggaggcaagctcaaagcggttccctttcaaccatcctttctgatcacaacacaagttgacgctcgctcacatatttgatccttttgtgaatgcaggtcctccgtgatacatcgtcctcatcgtcatactttgcttagatataaggaccacaagattaattttcaagtaaattcatatagaatattttgtatggctgatgagattgcctccatacttggtggatcatatacatatagttacatcctgtagcttcggttttatttccacagataaaggtttttcgtcgtacaaagtcaggcacgtagtatatgtcgaatatgagctgagattatgagatacagtatgttacagtcaggcacattgcttctgcagtttctttcagcagcgggttcgagtagttcacaattaactgcggctcgatggatgcatacattttactcacccagccgggtgcccgggtgctgctgattgcagttgcagtaagtaattccgataagagtacatgcgtcttcttcgtaacaaaattttcaatctctgccactggcaacccttatccagtacacgcacagcatctgatttcctttgatccggtacacggccggcacatggtatcagttgagcagccaaagtaaaatacattgcttttatatagtacaagtacacacatggtagtgactgcaagtacgctgtgtgctaaacatacaggcttgtttattaaggcctgtttagttcccgaagaacttttcacacgtattaaatatatataaaaaactaattacacaaattacgtgtaaattgcgagacgaatcttttaagcctaatcgcgtcatgatttgataatgtagtgctacagtaaacatttgctaatgatggattaattaagcttaataaatttgtctcgtagtttacagacgaaatatgtaatttgttttattattagactacgtttaatactataaatgtgtgtccgtatatctgatgtgacacgccaaagtttttaatccctgaaactaaacagggccaacactgcgtggtagagtatatacaacaagtagtacatgcatgttagagcctgcaagtacactgcttgttaagcatacaagcttgttgtatatagtgtatcatgaaacacctggtataccatggtcctcgaggtatcatgatacacctggtatctcaaggtatcatttggtacctcgagacatcattcggtatcctcaaattatcacctacggtacccttgaggtatcatttggtaccctcaagatatcgcccgtggtcctcgaggtatcatgagatacactcggtacctcacggtatcatttggtacgctcgaggtaccatgatacatatgataccctcgaggtatcatctagtacgctcaaagtatcacctacagtatcctcaaggtagtgcccgtggtcctcgaggtatcatgatacatatgggttatacatggggatttttttaggtatcaggtatgttatagtgatacatttagtctctatgctctagaaagagatatcaagtgattcaaataaaaaaacacaaagaaaggaaaagaatagtgaaaagaaaaaaaaaggaaaaaaaatgtatggttgggccgtggcccaatacacaggagcgcaacagccctaccgggccagctggcctatccatgtactcactctatcctataatataagacatgtacacattccaagattcaactttaaaaacatttaaccaacaattattataatataaattaaattttatttgttaaaattattatcattggattgacatttaaatttactttaagatggttataaatttgttgcaataaaccttatagtatatgagaaatttaaagtcaaagattagttttgaagactgtgccaatggttgaccatgtgttatattatggaatggagggagtacatatgtgcaagtgtaggagtccttgtggtctagctagccacgtaccgacgtatgtatgtataggagtcctcgctaaacgtggtggcttgtgtggatggaagcgtgccatgctagactgtcccgttgaagaatggtacaccgttctttaatatttctatctcagcaaaccattaattcatcaacagtgtgccaacatgatggtactagttttgcagtttttattaaattaataatacttcacaaaaaaggtcgttcattttctgggttactaaagatgtaacgagcaaatttcttgttaactagatctggcttatgccttttgttaatctcctttagtccactgtaatagtaccaatttgagttccctttccttagcttcacggcttgtttgttgaatactatgtgattgtcataaccaccatgatgattggcatgctcatgcccatcttctggattgccaaaggtgtaataatatgaaaatttcttcttagctaggtgaacatgatcatgtccatgtgcgaggttgccatagattgaacgtgaaaatttgttcttagctagcttcagcttaggctttttgtcaatcccattcacttcgctgtgttggtataaatctgaagttttcttctttagcttcatggcttcatagttgagtaccatgtatttgtcattgtgaccatcatagtaaacatgacggctaactgctgggttgtcataaatgtaacgtggaaatttcttcgtaactaggcaaacatgatgatgtccatctgctaggttgccatagatgtagcgtgaaagtttcttcttagccatgttcagcttagattctttgtcaatcccatttgcttcactgtgttggtacaaatctgagtttttcttttttagcttcttggctttgtggttgagtaccatgtatttgtcattgcgaccatcatagtgaacaaggtggtcatttgctgggttgccatagacgtaacgtgaagatttcttcttcactagattaagctcaggcttttggtcaatccccttcactgcactgaactggtacaaatatgagaattctttctttagcttcatggattcagtattgaataccatgtgattatcattgtggccatcatagtcaacacgaacatgcctgtctgctgggttgctatagatgtaacgcaacaatttcatcttatctagtagaatatgatcatgaccatgtgatgggttgttattgttgtgacgcgaaagtttcttgttggctaggtctagctcaggtttcttgttaatctgatttgttccactgtaccagtacatatccaagtttttcatctttatcttcagagcttcatactcgaataacatgtgcttatcactatcgccatcatagtaaacacgatcatacccgtctgctgggttattatagttgtatggtgaaaatttcttcttagcttggttgtctagcttgggattcaatttgagtattgagctcttctcatcagcccccttggctccactacctgatgtaagaaggagattcttcttctggttgcctgtagatacatgcacacgatgtcacagttcttgcattcgttgatcattataaactgaactaggagttggttattttcaccactgattttaactgtaaatgaaatctttattcttatgcgacatataatcttccccaaaggttgctcattcatgtactgttcttgtcaaaacatatctgacatttgtcagaatttacatgggaatcttccttattctaattctactacctccaccccaaaatataggggtagtgtggtgtaatcagcctcacatttgttacaaatttataaatagtgccattttacagttcgcaaattaatatacaaagtgcagtaccatggcacctttcaattaaatactatcacaaataaatgatgttttgggaaacaatatgatcatgcaccaaggtattagtttgattatgaataaattaataactagtataaaacgtataaaaatgaaccaaagtattttgaaattttttgaagataaaactagccataccattttcaagttgaattgaaatattcaaagagatattgatggtcaaagtatattgattgcatgcattacaaacattacccaactagtaggtatttaaattctatctttttttctagggacgcaatttgaagatcggatatataatttaaaatgcatatgcaggcagaggcctggattttattttcaattattaaaacaacagtttcaaatgttatgctacatttgcacaatcaactataaggcagtaaatttatctgcatcttcatatactgttgatgaaattggcaaaattcaacacttgcaacccctgtacatacgtacttgaaacattagtattttgtacgggattatatatagacacttaattttagtggacattttggactgtcaatgtccaaggcatatgttttggttacaggagagattacttactaaaacctcatcaactttgtttgatttgagttatcaccttataaaaaatttaataaaacttgagcaagtgaacggtattattatattgatcaagtataactatatattgttaactttccatgtttatagcattaacttcaaataaaatatgcatttggtcatgctggttttgagtgtgattttggctgtgttgtaccaccttgtaattaaatttgtactccctctgttccaaaaagaatctaatcctagagtgaacatgtgtctagattcattattaggattgttttttttaacaaagctaggggcccagcttttcaattacactagaaaatggcgcaccagttggcgcgcttattaattataacctgtatataatacttataacttatttagaatatatatttgttagtttttgagtttttctacaattttcaattttatcaattttatctgtttttaaaactcatggaaaatagactgtatatattttctggtttatttagaacacaataatttcgcacaattgtcagaacggctagttcaatgctcgtaaaatttatttaggatagagagtttagttttctactaacttatcgaaggttaaaatatttccaaatatcataaggaaatttgatgtattttggtaaagaaaatcacaaatctgaatatttttttctatctctaggggggtatgtgtaaacatcataatttacccaatagagtttcatatgcacacaccatagcaaaatttagtttgatatatgcacatgaattacatagcaaaattacttgtccaacttataaaaaaaatagcctacttgataataagttttatcttagggccatttataaacactccaaaccgagggcctatttgtaaatttaaattttttagaggaaaaagttcagaaaattgttttggtagaaccggacatgttttttttatcctctgcataatttttacctggggtgtgtaaaaatcataatttgcccattagaggtgcgtatgcatatcatttagcacaattttagtttgatatatgcacatgaattatatagaaaattttaatttgatgcccattgcctcatgccagagcaaaatttaaacttgataaaattagttgcgagctacctatcaagcaaaaggcacccctcttgctattttattttctatccacatttcattttatttctcgtttcaacgggtgaaaacaatctatctattatattataaagatagcttgaaaatgatacggtatttgctttgatcgcatagaaattgttacattaattaatataaaaagataatagttgtatatacataatataatgattgtatttatattaaatgtcacaaaactacaattatttggttaaatctaatcatgtttttaaaatatgttacaaaatatattgaacaaaagctaagaattgcaaatttaattctataattaaaatatgttgcacaaaacaataattgcaaaaatgaagtacatgtaatcctagtgatatttgcgtgggactttcgtcgagtttgggtagaatcatagtcggtgatattcggtgcaccgtactaccgtactatgtaggttatttgctcagtgaatcatagtcgaaaatactcattatttctcatagttcttgttctatgagtggtagggtgcaccataatattcaaaaaatgctatccacttagtatactcattcgtcagagtagcttggacgtaccgtcaagagatagaagtgcttgctcaatcacattgagttagtgaaaagaccacttggtttgatggtatgattgatcttctacgtccattataattaccacattgaatgtatatgtcagatatacttatagattcaacaaacttctagttcacgataagtcatctttagttaaaattcgcacaaataattccaatatattttatgcaattctatatattttaccgcaatattaattaaaaataataaaagcattacaaataatcaataatcataaatgccataaataaattttataatcatgaatatatgaaatataatttcagtgtattttgcaaatttacaatgccattcaaacaaatattccaaatacagagggccatttatgtattttctagaaatttcagggtttaaaacgcaaagtttccaatgcagaggaatatgcgattaatttttggaaaccacaagggcctttttgcaaaatctatggagattttttccttcttctctactttctttcctccttccttatctttccttccttcttctatttacttttctttccccttcctccactgatggcgccagcgggtgcagaggctggacggacggcaacggcgcggtgggtgcagaggccggtgaggcgctgcggccggccgttggcgtcgtggccgggtgacggagaggaggaggccgtgtggcggctccgtgcgatttggaggccgggacggcgtggtggggctggctgcggcctcggatggaggaggcggtggcgacagctgcggccgctcgcgcgcgcggatcatgcagcggcggcttaggcgcgtggatccggtggcggcggctgctcgggcgcgcggatccgggtattcccccacacggatcctgagtcggcggcggcagcgtagtctcacctccccacggtggcggcgtgccctctcactccctctccttcccgtccctttcccctctcttctctatcgccggcaactcccacaggccggatccggcgtaggcgtcggtggcccggttgcggtgccttcccctccaccagatccggcggcgagaggggaggcggtggctgcccggtggcgggatgattatttagatgttcttgtgtgatgttttagtgaaaaatttctgtgatgtttttcaatgtttcctatgatgttttttggtttgggattgggattgattgatgcggggtggataaggtcgatgcatcagctcgattaggagaggggaatctgttgttcttgaggatttttattcaatgtgatttctttatctactactgagtcctgactgttctagatgaggtccattggatatttttttttcaccgttgatatgacatcagacggccacgggaggggtgcgcatacgtggccgcttctccagccgagaatcccgctggggctcgaagcgtggtgccacgtggcccaatcactgggcagggttagaaccgtgcaatcgtatatagagatatgtaggggcagacctaggtccaaggcaacatgggtcatggcctggcgcgggttcataatccaatgggtctagctagggacagaatagtatgggccagcttgggccttaattagcctatgccttgtccgcccctataactatgatgagatcatatggcggtataataattgtgtgtgaaataatggtatatatatagagggagtgaaacttggaacacatacatcattacaatcaacaggtgacgatgtcgttgctgtaaaatttactctacaaattatgtgaagtaattgttatataaattgaccaacatcggtcgaggagcagagtgatctaatatactccatgcatttatttttgtaaggtttattttgattctataagaaatcaaattttgtagattttgaccaatgtaaagttaggaaactcaaaagtatatttaattaatgcataaaattaaactaaaccatacgctttattcatacaattaatattggctttatgagaaattgatggctaaagtttgatcatgaagacattttataattactatatgtacatttaaagtagtaagtactacttcaacaaagcataggagttaaacaaacatttataatatgagtgaggattgagtaaagtaaagtaaagtatttcttgtattgtacaccatccccgcaatccaaactacaaattgctataagttgtatagtaccacctacacattcgatgattaattatgcatctcctctactatttttataaaaatagtagaattttcttacgccacatgtgtccgatttggccaacattgtctccactcgaagcaatgagagtctgcgtccgattcctgcgtacatcgtgcaacgccgcacgtttgttaccaatttgcgttgccggcatccgattggcattgatgtcttctctgcgtagcccactatatttccttccatatctcgcatgatctacgttgccgagggaggcgacttgacatgagacgggctgggccttcctgcatcgaccgtgccatgcatatagatcgaatccgtttcagtccgaagcaagagactacgatggaatatattgacgtgcaatcctttcgcgcattggcaaataaaaagggacgatgatgggataataaacaacaagacttaactgtctatctgtataggttttgcatggatgcaaaaatcatagcaagggctcctattttcatcaagcaaataatggccaactcgtcgaccgacctcgagcttcctttctagagtaggatatactgcatatacttaatatgtgatattaacattgcttcaacccattacaacgcatgagtattttctctagttactatataattgtatcccactaattagcttaaatattttatatgtctttccacaggcttcgtaatgatcactaaatcatacccgtacaattagattcattagtaaaatcatagctgtttgattagatctatatgtcaatctctatctatatactattataaaattggagatgtttctgttggaattttggtacgttatccttgtttgagttggttgtatgtcgtccgtatccaattcgatgcgaatctagaataactattatacacccatatcccatcccaacccaaccctaccggccaactctatcccgcgtgcctccaatcggcgccacacacgaccctcccttgatcggcatctttttttctctcccttttatttttatttttctcattttttctcccgataatcctaatactctccttctccttctaatctcgtctcatttatctttttctcttccaaatttccctcctcataaatagtttccttttgaatttatcattgtttaaggtgtgcatacgacaagtttgttactctgcaaatgctttccaactatagtaaaaaaattattaattgaataatcaaaatttcagtctttgatcgatgagtatagcaaaatgcacatgcgtcaacttatggaatggccacccgattgatttgtgaagctatggaaagacgtacataagtgattcttcgtgtgatgacacatgaagcacgcacaacccggttgaatgctatatatggtttctgactttgttttgctattgatttgtttgtttaatttcggtttgttgtttaaattgatcgagttttattaatcgtgaaaattattttcacctgttgcaatgcacatgtatttttgctagttatttaaatgccagaccagcccggaccaacttctacaaacaaatgagtccatccagaccaacaaagtaaaatcagctattggcatgtggcacaatatactagtatgcagggacttagaccatgtgcactttttccatatgaagatgctagggggatgtgtttggttgaaaggaaatccctacatggatatgaccatccaacttaactatgtttggttgataggaaggacgaatcatgaatgagaccgttataagagagaatatttcatgcagatgctggatgagctatttcggaaatattggccggatgagaccatccaccttttctaatcttgacaataatgataattaatatattttgttgttaaatagtaattaattgtcaaggtttgtgttgattagagataatgagtcattttgttgttaatttgtgtataatatggagaagttaatgataactaccgctaatatagaatatattatgttattaataaaaactttcatatttccagttattcatccacatcaatctaaccaagtaagaaactaaatcattcccatccacctaacaaattaaacaaaaaactggatcatatccctaaaaaattagatcatcatagctactcaaacttgacaatcaaccattaatctggatcataattcctggtcatggcttatcccttttgaaaattttgttaatagctagtccctagttacttctgttaagattgttctcagatacgttacaatgagcattcacatcgatctactcaaacaagtaccaccataatacctggggttgattgtcttataccaaaaactcttatggttttgtgcaacttgaaccataataccctgtattttatataatttaatatgtttttttatgcaggtgttaagtaattggtgctaaaatctagcactctattttggaagaaaagaaatgagaggaatgcatataaccagtaggaatcactatgaggtgctatagcctataggctgcagtattttttaattacttagctatcttaagcatggcctatggttccatcttggtgtttatatctagctactactatgcaaatatattacccttttatagagagagaattaccagatggttgtgtcaagaggttgagtatggctgatggtattggagaattgggatgaactgtcttccagtatgccatcacgtcagccgtgcggtctggcaccatcatcgtcatcttctttgcgctcaacaacttcctcccctcgccaactccgaccaccatcacctgtcaaccaaccaaccaaccatcatacatcactactgatgtagccaagatgtgttatttcaacaaaagctttcatagatgattttttcaatttatacacttaaaaaaaaaactaaaacacaactaaaccacccactacaatatcacttgtaggctacacgggccaatttcacaccacactgcaggttgcaaacaggcatgggtattacgaatctcccccaaagattctaccataggataacccaattcccgccacctaccagcttggcaaggaacaatcaaggcatcgttcaacacacatgtgaactatgaaagtatatatagcctgtgataatttgtgacatatacacaaacatcatatcgtgtagagtgtgattcaaaaaagtaaattattccttgcaaaaaggaaaagaagaaaaaatatatcgtgagtgggtgaaaaagcatggatgtaagagctcaacttaatggagacaacacttacaagaataaatgagaggagtgacaaaagagtactcattgcttagtctcagataattttagcattggctgcttatagttcttgctcaatttggtcaggactagcacaagaggtatttataggctagcatcgctatcacgatcacgtacaatcatctgctaaaaaacaaagaaattgagaaatggtggcaggatctaaaaattaattctgaattaattttccatgctggggcgcacatgctttttttacactgtatatgtattaaattcaaataaaggaataccctgtgaaaacagtgtaaatccactgcaaactttaaaaggtattaccaaagtaacttttcataacgtctatgtatcttattatataaaattttacaatggcgaaagatataaaatcatcaatttaaagtagtatggctagaaaactacatgaaatttagtaaatttacactgtataaatgtaatacatacattgtaaaaaagatggaaatccaaaaatgatcaatcaattgaacatctaatctataccttctataaaactacaatccactaatcacataaagctcaaaatgcaagcataacagttattagttaacatacaagtagatcacacatcaacccactaagcactaaaagatcaacatgcatagtaaatactaaaacttaaatgtaactacatacattacctataaattattattttttaaagctcaacatataaaaatgttaattcattattactcatatcatttccacaatatttatatctaaattcattcatcatttcaacatcatttaatacatattcattcatatatcctgtagcaaagcgcggggtgtcacctagtaactgctatacaacaatcactagtattctcgattgacaacctcctcaatccaagcttccatctcgtggtgcttggtcacgcagttcatacgagtgaacgaaagtgagttttactatgaacttaaggatactgtgaacgatctcctttcagaaatcactcctgttgagaggccctcctcctcccttttttctcaatatggaagagaggcagaagagaaatccagagatagctcaactttttcatggaaaagttggggatcgaatgcaagattgagtccctgctggatggaatggaaacactagaaagatcataagaaaccgagctcaaagtgaatcgcaagagaaccccccatcccttagaaggatttgaagctgtttagacactcatagacaagtaaaatccaactcaggttcctcgagaagtgaagtgaacgagcaaggtaaaacacaatcaagttaggaaaagagtctttcatgccaaggtgaacatagataggtagagttagtttattttccttaattaccagagagaagacttacatgcctgtttgactccgcatatatacccccattaaaaagagctctgcatatagatattcgatgacatgtaaatcaaccattttttcctttttgataatcctacggtctgctcttttccctggggtgctggatatgttcttcattgcttccgacagcaatatttcaacctgagcggcttttcctttatatatgtaggtattgcaatgaaacatttgttcctagtaaaatccctaatctaatcttgctagttagatctagagacaatgatgaaattcgtaccacttaatgtgttgctatgaagaccagaggagctgttaagttactctagttaatttggccacagcctaatttgccattagtgtcacattcacaaactgctgatcacaactgtactaaattttggcgactgtctgggcatataacatacagacaagtggtgtaataaaatgtttggcttgattcagttgtaaaattgaaccaaacagttcctgaataaattgtgcagctaaccaacaaacaagcccctcaagcttcaacatcattttgttaggtagcagttatgtttcgtttggatggtctcttgtgtgttctgtttggaggagtttttggcagctgtagttttcttgaagtcaaaagcttgtctaaacaatatagcttttcatccagattcttagaagatgtagttatagaatccagaaaataaactagattctcaccagctgaatttctactaatagcttcatagaatctaaagctacctaaacatgcccttagatgatgccaccagtgggagctattctattatcctttttagctagatgtgccatgactatgggtttgtttagccaatcttaaggttttagctagacgatgaaatctgtttgttgaataattttctatgtagtatgtttgtttcttattttgaaagaaatgtatggcatggttcctataactttaaatttttaatgtataatgtcattgacttttggagatatgtttgactattcatcttatattaaaaaataactaattagcaagtgtgaagaaaatataagttgtgcttaaagtagctttagtaataaacaaaccacagtaaattaaatgatagctacgcaatccttttagtaagaagaatttgatcaaatgttttctcaagtatagcagcatcatatattaaaaacgtacaggaggaattatagcacccgagggagaaaaagagggagcgaagggcttccagcagttcaatgggattgtaaatacttttggttttttcctcctttcaattaaattcccgcagttcttctgccgtcgtttctgcttaaaaaaaaaagggcttccagctgagtttcatgacagcgccattaattgattgttagcccgatagaggctccacgacaactcccaactaatatcatgaacatttatgcatacatgatctgacgatcggtatgtgctactgacttggaaggtatagaaggtttggtatggatcgaccattaataacacgttggccatattattaattagttgatgacctcaacggtatctaaaatttaaagtgtgactttcaaatacaggaagttagctagatggcatgtatgccattaaaattctgtttgtcactcccctttaaaagaaattgtttgtcacaaatagacagttcctatttcgaactaacacacaaatatgcaactgggtgacaaatgtgcccctactttcgtctgttcaaatgatctgggtttgaacaatgatttttgtttgtgtacttaaccaggaaaacatcctctcaaaataagaaaaatattgttgggaggaaggtgtagtatagtctattcatgatattttactagaattaattttacgatccatctattttactagaaattaatttactcacattgtttaattgaaaagacattatccaatataatgttttggaatagcttaaaatttatccaagcaaatatatatggacaaaagggtccagtttgagttttagcaaatgtattttgaagcgtattttgacttgtgtttagggtaggacacatgcctcgggagatttgtcatccaatggacaatgacacattctccctgggtttggaataataagcatgacatacttgtgccaagtgaatttttagaggcttatttaggatcgagagatgttcctttgaaatctttttttttcttataacctgaggagatccaaggtgacaagtcggccaccgaatactgtcgccacttccggagcatggatgatgcgatggccgacctcggcgaacctatcaccgagtgcacgctagtcctcgcactttcacgaggtttgaataaaaagtacaataatctgcaaactgtattgcccttatagcgtcgcttccccaccttcctcgaggcatgctctcagctgcttcttgcggaaatcaacaagggacaacagaccaccagaaccgccattgccttcgtcgcctccaccaacaacggttccggtggagctgggtctgtcgtcactgctgcatccagcaccaccaactccacctccgggaacggtggcaacaactgcaatcactgccatgggtgtggcaatggagatagcggcaacggtggcactgctcaggcctccgaacaaggtggcggcggcatccaagccacccactcaggccaacaggctgcgggagagtggcaactagtcccaacaccaagtcacgccgtagcacaccccttacaatccctgtgccgataccattcaaatatcaggccatgctctcagcatgctgggccaggtgttggcggtccttaaataccaaatgaaacactggacgtagtggtagggtttgttactaaccaattccacaagtgttggtaaatatttgtatgtagttgattatggatgaaagtacacctgctgtgtaacgaaattgtcctccaaacgtcagaacatcgtctcctactccagcactaaagccgagtatagagcatttgcaatgttgttgttggaacatgctggcttcaccaacttttgcacgagctgcattcacatcccactcgaaccactttggtctattgtgacaacatcactgcagttcagcaccagcacatcaagcacgtcgagattgatctccattttgtccatggttgtgtgactactcgcactattcaagttctacatgtgtgaactacatcccagtatgctgatatattcacaaaagggttgccgactgatgtcttctttgagtttcggtctagtctcaatgtccagcctgttgacgttgcgattgccgggggtgttagcatatctcatgtatatcgcatgttttctttcttttggccagtcctcccaatatccctcccaggcatgtttctataaactggttgagtaggatactaggataaggatgattatgtgcctatatgtactcggcgttgtgatcaatcgatattgtgttgagtccatcaatctaagagtctgttgggccactcctctcaggctctcacgatgcctgcgcctgcacacgctcttgcacttgacgtggccgatctcacatcagtcatggaacaccaatctatggagcttgcatgattgtgacgacacctgatctctatctgcaactctgtgtctccattttctcatcctggatccaatgggtggcggtgagaacattggggatattatggaataagttcaccggaggtccctcaatttaacaccaagattttttgagatcccttaaccacaaaacaagaaatgtgcacccctaaacttatataaaccgtgcacataaggtcctatggcagtatatgtgggtggtttcgctgacgtggcatcctagtaagcaaaaataaataaataaagtacgtggggcccacatgtaagagagaaaacgatatgggcccacatcccttgtttcttcccctttcttctcttctctcgtcttcttcgatgggccgagacgcgcggggcgacggctggcgagagcggccgcggcggcggcggcggcaggcgaagaagtcaggcgcggtggtggcaggcgaacgcggtggcggtgggcgagagcggcggcagcggcgggctaagcaggcaggggcggccggcgaagcaggcaagggcggcagggttgagcgccggcggccgcgcgtgcccaccgtggtcctccgtgtccgcctcgtcgtcctctgtggttgcgccgccggccgcgtcgttgaggcggctgctcgtcgcggtggtcttgttcacgtggccgagcagagcggacggcgggcggaggagggggccgcaacggcggaggtggccgaaggaggagcgtggcggcggtgggcgagctccgcgggcctacaccgccagccgagccgtcatcgtcctcgtcgtcggccgagccatcctcatccgcgccgagcgccgcgcaccgctggttccccctgccaactacaccctctccgcgtccccgtccgcatcctcgcgctctccgtctccgaccccgacgtcccgctcagccccgccgtcgacgagtcctacacgctctccgtcgacaagtcctacacgctctccccgccgtgctcgtccgctcgcccaccgtcgtgctcgttcgctctgcccgccgccgtgctcgtccgctcgctcgcaggccgcgctcgcctgctgccgctcggctgccgcgcggacccgccgccgcgctcgctcgctgcccgcccatcgctgctccgccctctccgccgccagcgtctacgcggccgcttcttgccgctgccggcggcaacggcactcccggagtccatggagctcggcgacgacgcgttgagcgagctgcaggcggccgagctcgcgtctttgctgctgctgctgcaggtgcaactattgctctcctgggttagcacttgctcttgctccatctgtgtgacgagctagcgcgcgacgaccaccaagattgcttgctagtggaccgccggcctcactcagtgaagaagaagagaaagaggagagataaaagagaagagaaggagaagaaaagcaaagaaaaaaaaagtactattgatatgtgggccccacgtacttttttaattttttttttactagaatgccacgtcagcgaaaccacccacatatactgccatgggacttcctttgaacggtttgtgtgagtttatgggtacacatttctggttttgtggttaagggacttcagaaaatctcgctgttaagttgagggacctccggtgaacttattccggatattattgacaggagcagtgtggagccaaatccgccgctgttgctgattgctactccatcaagggctcgagctgtgtggatcaggccgcttccgccgcttggcccactccactagcttgcctacaccctaacacagcaaggggtgggcacatggctacggtgtaggtgcccccacctaggtgaaccctcactttacagtgtagattgcaacaacaacatgtaaattacaacaacgattcttctgttaactatttcgacgaacctgcagtttaatctgaaaatttaggcaaaatgtgaccattgcagtctttttcttctttctcaaacacactattccagtcttttggaatgaccctaaagctgatcagttaattgtgaaggaaccctctacttcgcagaagcagaaatgatatttggcatatactttgcagaaacagaaacacaacttggcggtggctggtttatttagaaatctctgcttggttttgatggcaagcatggtaatttcagaattctccaattcttgttgacaaaaaaattctgctggttgaacatggtgtgatagtgatttgagacattaatcaatgatggattatctgcttgcctgttctttctgttacatgagttgtggggtgtttttctgttaaattaatctaggttgctctcttgatctgatctagacagatcctgagcaaaggttgcaattaggaaaacaaaaagaaaaggtgagagagggtgctagttgaagttattgaatggcttagtatacctgttgactgtagatcagtcaattttagttcaaatgtttattgattttgtcatgtatactgtactatggtttgtgaagaacaagaagaatttgtatttggtctacttaattgatctaaattatgtagaacttcatgattttcttcagtgcaaaacatttctaaaaaactgccaattgtagctttttttcatttttctttgtatccccataaagaactaccataacttttttttttaccttgtgcgaaatgacatatgcaattttttaacaaagaagcagtcttatatcatgcgtgtgaggccatatatcaacattttcttcagtgcaacagtcttttctattctaatctgctactagaaaatcatgtgcctcacattttacaggatctttgatgatatgaatgcttaaggatgctattttgaattgctggttttctcagcaagcaaaagttgcatggttttgtctgatcattttttattacttcacaatgatgatagataggatattgcattgtgttgtctgatttggacattcttgaactgcagccctttaaacttatatttttcatattgtccttacaaataatgagatcttctcatcaaatgtttctagacaaacactgcttactacaggggaatctctgtgctctttatccaatctgcagagatgagggtaccagggagttgtacaaggttcttggtgccacttacatattgttatatgttatactatttaatgaatgtctaaaacacaaggaataggtcccccatcatagcaataagcttctgctttatgttaaaaaaaaaacgattctatgtgtgaagctttgtgatctcataggcaactagagaggtaaaagcacatggtaaacctaggttccactggtggagaaatgctctttactcccggtttagaaccctttgtagtcccaatttttcaaccgggactacgaatccgggactaaagatcgctatctttagttccggttcaaataaccaggactaaagatcaatctttagtctcggttaataacaccaaccgggagtaaagaggggaatctttagtcccggggatagcggcagtccctcgaggtcccttttctttcttttttttttcattgttaatttgctaatggctagagttaatccctgtattttctcccaaatcgagtgggatacacatccccaaatcaacatcctaaatattaagttacttatacacacagaacaaatacatcacaaatcctatacacagatcaaatacatcacaaatcctaaaaaactacacacaaattaaatacatcacatattatacaagattatacatctcagatccatgcgatgtaatgaatcacaaattctaaaaaaaaaaatacatccagtgaaacacaaattataaaaaaaaagcaaatgagccggccgccgctcgcctgcccgcgcgcggccgtgccgccgcccgccgccccacgcctggccgcgctaccgccgcccaccgcccgcctccccaccgccgccggccggctgatgggagggagtagaagggaggaggaggaagggccgactgatgggagggagtagaggggaggaggagggaggggaggaggaggg

SEQ ID NO: 24057 - DNA, 3532 bp, Oryza sativa
atttttagtcctggttggtagtaccaaccgggagtaaagatctaaatgatctttagtcccggttggtagccccctgacaatacctgtgacggggctgaaccaggactaaaatcatctttagtcctggttggagatcacaatttttttaaccggaactaaaaatcgtttttagtcccggtttttaatgaaaccgggactattgtggaatttggtcgaccgaccaaagatggtttctccaccagtgttcttatacattttcttaacattgatttttattttaactgcattttaagttgatcttaaaatcggaccatatgatttacttactctgaatagcttattttctggatgttcttcaggaatttggatgcaactgcactaggaattcatctggatttttttggttggttgtgataactgcagcaaaacatctcaagaggataaaccttcactgtcattgaaataaaaaatacacttattaattgaataacgtatttttaatccattctgaacagtgcagaactttctgaattatctatcggtgtttagcggttgattgttgttttattgaggggtattattaaatatcaaagtagatagatgcagataaagaatcaagttttatgacttggttttagttatacatatttttcttcaaagtgcaaaaataaaaattgtactccctccgtcccatgatataagggattttgagtttttgcttgcactgtttgaccactcgtcttatttaaaaaaattgtgatggtgactcatacatatattgtcattactaaatatcaccatagcattagcacgggcacaataatgttttatagtcaattaatgacttgtttctttttagtatcgctaagcagctcacctaaaaaagttagaacaaaaccatacacaggggccaaaaaaagcagggtgagtggcggccaaggatcaaagtgtcaagggggcatttgcccccgctcactgcaaaattgagtggtgttgatgaaaaacacgaggcctgggagatctgcttaactccagtgcaggtccaaaactcgccttcgggtatgctagcgtaccataccaaatttggtcgttaacaggtgggggcaaaggtccccacttgtaatactctagatctgcacatgaccatacatccctagctccctgccaaatctatgctccctgtagttggtcggcttgtagtagacttgtgacgtacaagtgtaaagaaaaatctatgcactccatcgttataaaaggaaacgctctctcactcccttctcatcacttcgctcactcactctcactcatttcctcccattagtcttcccactcacgtctcactcctctcactcacttctcactcgaatgagtcagcagccaccctgttgtgggcacgcatcctaaggggctgccaaggcaaccagggcgggaagggtagtcggggtcagctaggatgaaaaggagaaccaggtggcgacggtggcttgagcgtacacggtggcgcaagcggcgacggtggtggtctaggttaccatggcgctagaggaggatgaggacaagatagcagaaatggtggccgcgggtcaacggcagtgggcgcataaggtctagggcgaggtggtaagccatgatgcggttatgatcgttaggttggtttagtcattctttttacaacttgcctcgatccttactgcaaatggcaaattcatgcaagaaagagtgtagctaataggtggaggataactagtgcaggtgaagacaaacatgctcagtgcggaattatctggcaagtacttgcagctaacttcaaggtttattggcaacaggttacagacatttgtccaagctgagccaatcttgtgtcctgtaggtattgtcgaggcagttgagcaaatatgtcactatcgacatacgtacaacaaagcttggcgtgtttagcaagttgctatgaaggttgtttggggagattgggacgaggcatatgaatgccatgaaagaaaaaaaaaacccgaacatgcattttcgtgttgaggctcaccatgagaagtcaagaattgtggaaggagtgcatagttgtgtatttggccgtgcgtcatgatattcgggcagttagtggaggcattcaagcacttgaggtcggtgttagcaattgatgggaccttcttgaccggtaaatttaggggtgtattgctcacaaaaatagggacattgtctgatcagccataatagagaagtgtgtataatatctgataagcacccaggcatattgaactccatcaacaacgagatactagggcatcaacccattcaccatagatggtgcacgaggcacctatgcactaacttctatatcactagagctacccaggatcagatgaatgacctcgagcgcatatgtcaaataaacaagaaagttgtgttcctatgtgcggtgaagtgccccatgggtttggttggaaagtgatcaaagaagtggctagaggacaatatgccacttaaggttaaatgggccagatcatttgataccgatggacgtctatacaacttcatggctagcaatatggtcgagagtttctacaatgtcttgagaggcattcaaaaattctttttatgtcaaaaggagaatgtgtaataacttttttataccaagagcacgatatgagaggagagatgagttgcacaagaaacgggggcgggtggggtaggaaagaaaattcttgacattgaaaatagaggaggagcgagggaggggggaatgagtgaagagtctagtggagacaacaaatgttgataaatgtgggtgtaattctttttacatcaagatgaggggctgtgaggcgcactattaagtagcgcactgtttagcgcatattagtttgttttttttactttacgcatgcatgacctatttagttttatatttacatcagattttctttcatatgaccgatgaaaggtctgagagttttataaaaaattaacagcaccatacatttaaaagcaagaagtaattttttttattagataaggatattttttacctggcctatacatccaaccgtgtgtatatatatatatatatatgtgtatatacatatgtatatgtatatatatatatatgtatatgtatatacatatatatgtatatgtatatatatgcagctatttaaattgggaacttagccatacgaacaaccaaatctaaaattcactcctatggagatatatttgaaggatcttatggtgctaggaataattaaatgtgcaaccactatatcttccattcactcaagtacattcttgtcacatcacatcttattctcacgttaagctcgcgctcttagtatgatttcacgtgtttctcgcaggcgtggttatttgtcacatcaagttccagatctcattcaaatgcatttcgctactaggtaattaagttaataattacatttgttagaagtgtatatcacaataataaaatgcaaacgcatttccaatattgctgattaaataacacttattctaaaagaaagta

SEQ ID NO: 24058 - DNA, 4839 bp, Oryza sativa
cccttatattgtgggacagagggagtaaaaatgaagggagctaggagagcgatggatatatgccttcctagctagttcccacacccctcttagctacggaactaaaaataacaacaacaacataataacagaacacataaaaaaatggattagtatgattttttaaagtaattttcctatagacttttttagaaaaaaaatattgtttaatagtttgtgaagcgtgtgcgtgaaaaacaagttagaaaaggttgggacattcacataaaaactcagcctaattaagctggtgtttatgtcacttttaggtccgtatgttttgatacaccatgaacagtagtgctccccctctcacatcgtaaaaagcagtgctccctcgtaataattcagtgaaatgcaaatcagtactatgttgtgttcttaaataatgtagaataaaaataaaaatatactaccgttgttccaaaatataccattataagatggatacatgtattaagaaaatgaaagtgattaaaaacatgttgtgattgattgagaagaaaaaaagaaaaaattaaagggaacatagttgtaatttgttgaaaaaatatattaaaaaattagctttattttggtacaagttaagtacatatctgggttagaagcagtgagaaagaagtgagaggattcattcgatcattcgtcgccagctacgaaaaatctacaaggacaggaacaaacagatggatgtttcgtcgccatcgcatgcggagcgcgcggtgagccctgcctgccgaatccacgagatatcatatcaaccctgcagcactagctgccactccgtttggtgcagcgtccataaccaaatctagaaataattgccatttccaattaaataattgcacgtgcactgcatgtctggttaataattaaataatcttcgaaagttttgacaaacttgacccggtccattgtcgagataagctctttaaattaagggtcaatttttcaaattttcgcggaagtaatccctagctaactagctagctgaccaattaccattgtttctttaatatatgacttatttggtttttcaaatttatttgactattcgctgaaatattcatgcaaagaaatcacaaacacggtagacatgcttaaagtacttttgattattagtattttttaaatttacttaacaaagtaactaataaataggaaaaaattctatatgtcccaaaaacattggatagaagttcattgaacaccctaaactttaaaattaaacatccaaccaccgaacattgtcataccattcatatattacagacattggttttttatattttaaagtttaaacgaggggttttgacaaaaataatataacatatgcttacataaaatccatcatccgttattagtttgtacagtaatgttatattaagttcgcactcatcccttctttctataaagctaatgcccactaaacacctagagctcaacatgtaagtgttgtatttattagtactcctaaaacctagatgcaagcatgccacatcaacccattaagcacacaaatctcaatatgcaagcatatagtaattatatctacaatttatttcattctaaaactaaacatacacatgctaaaccatcattctcaaattattttcatattatttcaatccaaattatttcattaattctccaatatctaatatatatcccgtggcaaagcgtgggatatcttttagtttatataggagtacaagtgaaagaaataagggggtaaagaagagaatcaagtgaagatttaacatatacatccaagacatatgtcacatattcaaactcatccattgtatatacaaattatatagtaatcatttttttaaaccatcatatgggctgcatagatggtattataaactacataggattaaacgtctggttttaaagtttagggtgttagatggactatcatctaaagtttacggggtatatggaatttcttccccaataaatattattcaaagtttaaggaaaaaaatctacatcatatattagaaatggagaggtatatacgtgggtttagactgatggtgtgatattatctttcacgttatattttaataaacacggatgacctataacatgtttattttttttcctccgaggaatggccctcgtaaccatgttgtctattcagatctgcacaatatttttataattaatgatttctaatatagtatacatgacaggctatcatcttactataatagagcgtatggccccatcatttggcttattacggaataagccaaacgacatatttgcaaatgaaaaataatttgtaaataaaacttttttatatgtgtttttagtgatctaaaagcaaaggctaaaaagaaaacttcggtgaaaatccctaaaatcatgataagtataagcataagcgaaaaatgaggcttgtttctcccttgttttctcatgatttcacatcatcatagcatactccctcatactataaaattgttcatgcgcaagctactccctcacctagtcgattaattatattggccgcgtggtcactagcatgcatcatttcgttaattaattaattgctcttacgtacccttccattttcggtgtataaataggcaacctccagtggacatggcctcttcagagatacatataccatcaactcacgtaatggatgtcctcgtactactcatctcactgatcctcctggtgagtgtgaatttgctgttaatttagtttagaaattaacctctgaagatacattctgcgtgacagttaattgattatatatatgtttatatgcggcaatcaatcgtatctctcctgtcagtaatttttaccaacgtaacttaatttatcaaggtatatataccttacaaagtgtaaaccctgcttactactcttacttattagtatctctgctatcacttaatttttttttcatttactcggaattgattgctttacattgtttgtcaattatgttaggctttgttcggcaacaatatacagtgttttcttattaaaaaatattactgtgtttctaaatgaagagttagctagctagttttggaatatgtaataacatgggaagaataactgtaaactagcatgcactacccagtacctacatagagtgcttatattatggtatatatacacattatttagttttcatttgatttattgtctagattagttttttctgtacttcatatgttggtgagtatacatgtcagttgtaacttaggtgatgtcacaaattatattataagttgcaacaattttggaatgcacgataatcataaatataaggcaaaatttgctacacgacacgtaaaaattgtgtaattagctgagggacaccgcaaaaacgtgacactgccccaacacactacaaaaactgtgaaatttgctgtaggacaccgtgcacattattttatcattttctagctgaaagtggtgagaatatttttgaaatgcccagattgcccccgcacgtcaccacacacagacaaaaaaaacaattctccattaggatggccgaaggggcgcagctagctgcggccggaggggcggcgcgagcggcggggcacggcctggtggcggcagcgccggtgcgacgggggcgcagccgagcggaggaagagttcgaccctggcgttggcactgggcacggcagaccgaggatggcacgacgatgccagcggctgggcggaggtagcgcggcgttcacggcgtggacccgaaggcgacgacatcgacattgagggcatggtgctgctacagcctgcttctggggcgcgcggtggctgccgtcggaggaggaggaggaggccagctggcgcgacgagccgctgatggtcgcgccggacaggctggacgcgctcgggccgtacatgacgggcggcaccgctggcaacgacgccccgcggatcgaccctcccgccaaggacgtgtcgttgcttccacgctgcagtgcgctggttgccgtcgccgagaaggaagtactgagtgaacgcggccgctagtactgagtgaacgcggcgcccttggttgaacaaaaagcaacgagaaagagagagaatgggagagagagaaaagataaggaagaataaagaaaaaagaaaaaaaatgaaggatagaatcgtacttacacaggtgtttctctctccaattcctccggatataataaaattatccgacgggtgtccaacagcaaattaccggttttttgtggtgttctttagcaaatttacgttcttgcgatgtccacaggctaattatacatttttttggatgtcctgtagtaaattttgcctaaatataatgcagatcggaggaagcagcggtgcaaacatggcggttgctgtgaccaaaccgtccccaacagcgatggagtattggcagaaaaaattccctgagacacccatgcccccagccatactagacctgctgacaccactgcctacaggtctctatctttctgctgatagttattaaaccaagaaatatttaaatttatatggttaaaatttaagtacttgttgagacaaatatattgctagatataatttactgtacattaaatacaaacatttaagaagatattaatacacagttttgaaagtgtaatataacaccactttttcaaaaagactagcctttttttcccaagcctcctattacactgctagtaaaaatcgattttcgcaggtgatctaaataaagaggggacgagtgtgttgtcaaaaatggtttttttaactactatgagatcatatagttctttttcctgataacatggaaaaa

SEQ ID NO: 24059 - DNA, 711 bp, Oryza sativa
atttggtttttatattccaatttcctaatctatgatgatctcgttgagttttgcttgtttgaaaaaacacagtgctttaagaactttttagatcaccatgtccgactcttttttgacattagattttagtaagatttataagctgtataatacttatcttttttgaagcgtgggatgtgccttttgcacaatacataaccatattgactaatcttaccgttgcctgatgctattcttctctgtatctgactatctgccgatgatttcttcttgtgttatttcacaatattgagattcataataactcaaggatgtgcatatcaggtacatgatactagcaacatccacagtatcgacattcgtgaaatatatattctatgtcagtgacatgctaatggaaggtcaatgggagaaaaaggcagtgtatacattttacttggagctcatcagtgaccttgtacacttgtctttgtatatgctcttcttcatagctatcttcctgtaagttctcttaagatgatatttctgctttatgtgttgtactgtcaacctgggtaattgatcttctatattgatatatcaggaactatggtgtcccactgcacttgatacgtgagctgtatgagacatttcgcaacttcagaatccgtatcgcggattatgtacgctacagaaagataacttccaacatgaatgaaagattttcagatg

SEQ ID NO: 24060 - DNA, 2972 bp, Oryza sativa
atctgggaaatgctttggtacgggtataatgtttgcttatgcaattacactatgtcatgacgatgatattagagtagtatttggtagtttaacgtggtgtctagattacgggatatcattatttggggttatatgctgcggatgagaggtgggccgctgatggtgacagctcagtacgggtattcctccgtgcctgtatatagtcctaagttaattccctagggagggtattcctccgtatttagccccggttgtatggtcatgactggctgtcgtaaggaacttagcagtcagaggtggcttctcgaagtaccacgagggcatcggatagagggtattagctagtgtatcagttaactagaatgtatttatattatgtatactagaagtataggaatagattatctttctcttttctttccacttagcttagataatatattatgagaatgagtagctaatgcttgtgtgtcactctacccttggattatctgaaccccttcttagaatatgattatcacaagtaatatataaattattagtcaagttctctctacatgatcttctcatgggataaaataaatacgatacctttggaatactctcaggtgaaatgccacaatggtatatccgtgcgttagcggataaactctataaccgtaatataccaggagtatttctacgccattgctgggaattatatttctagtaatgtcattaagaaataccaacagtggatacacaatataatctaacagtaaaaaccagccgattgtgaattagatcgtgaaactaataaatattataaagtatatatgataactcgaagaattacgtaaacaagattagagtgtcataaagatggaagcgctaatcccgataacgcaaaccaccataacaagttttacctctagttgaagatcggaatcgatgcagctcaacccaaaagcaagaactcgtcgaaataaaacgaaagtaaaaaaggttggcgatgcgccgagagtgttattgaactgttgttgtttgattacatgggttcgggtcatatttatacccaaaatacataagatgtccttgccggacacaactcttatctctaacaaactctaagatacataagtctttatagcagacttttgcccaaacatatctctaagaaaattacacaaaatgtactaattaatagatacagttgcctatccgagagcttatctccattgtggcaatccttgtgaagcacgctgatcgattctagaagcagttccataactgatctcgctataatcggctatatcggtagtatcagttatatcggctgccctctgtccgatccatctcagccgatacagactacagctgatgccttcgcagccaatttagactctgttcttcgaatctaattctttgccgaatccacattgactccaatgctggacctggtttgtatcttaccaaatttggtcgtcaacaagaagacgacgacctcatgagtgtcaggagttgggaaagccttgccgcacgccggacgccatccgatgatctcctttgccggaaaaactccttgcaccaccatctccttgagattttcctccgtaacgtcggagggcgcccattgactctcgaagctttctctctcttccgccatggatgcaaaaggaatgaagagatctggagcgagggctgcgacgattggtggggagattgatgtggtggttgcgcggaggaatttcgcggaaggaaaatggttcggaggaggcggattgagatgtgattgcaaaccctagttttcaccggcgtgggtctgttacatcagcgtgaaatggggaaagaagcagcagttgtggcgaggaagacgaaggggtttccttcgatgtgatttttatcgctgggtatcggaaagcgctgatgggcctgggcctaaacagtgttttcagcccaaatatatttccggtgtggctaattgtggtcttttaggacttaggcatatttttgcttaggctaaattgcccacaataatagagcccaataccgttaaattcctttctatgcagttcgataattctttgaaatttctacgatgcatatatggaggtgcccaacagtaaaaacgtcatgttatttttgttgacctttttataaggccacaaaactgttagggtttaatcaggacaaccagtttccaaagctgttattcctttgcgcatttatatgcttaatttctctgaatacaggcttaagttacagcttaggctggataaacttaatagtcggtattaattaagcggttgataaatcctttaagagttttactcggattatttatcacgaaagctattttaagctccaaaatagatcatagatcgtttttccattctgatctttatatatctttatggtgagcttattaggttaaagcagtcggctgaatctttggataaaaatcgcatatgttttgctatttgattacttcggtaatattatctataaaaccactcggctggttattgaactataccttgactatatatttagttttgtttaactaatcacatagttaggggctacacctaattaggtgcatctagtcgatgcacctgattttttattttttagccctccatagccttcagttcaagcactcggaataacaagacagagatagtcgaagtactcagattttcgttcaatggtttcagaggagattatttcatcgactgtgaaggtctctgggactactgtgtagattatggataccccatacccacacggtatgtatatccgactaggtataggggtaccatatacagatagaatgtcttaagtaaaggactcggttgttttattaacttgtgtctcaagcaaacgcccgaggatcctagtctgttaagattgtaatttatctttacttgcatattccgttaggaatatgggctgtatcttgtaacaccgactcctccccttatataaggagg

SEQ ID NO: 24061 - DNA, 609 bp, Oryza sativa
tacggcggcataaaggccagccgtgcaagcggaaacaccagtcggcggcggcgaaggcaagccggtcggtgaagacgtagacgcccaactacggcggcataaaggccagccgtgcaagcggaaacaccagtcggcggcggcgaaggcaagccggtcggtgaagacgtagacgcccaacaacggcggcataaaggccagccgtgcaggcggaaacaccagtcggcggcggcgaaggcaagccggtcggtgaagacgtagacgcccaacaacggcggcataaaggccagccgtgcaggcggaaacaccagtcggcggcggcgaaggcaagccggtcggtgaagacgtagacgcccaacaacggcggcataataggccagccgtgcaggcggggacaccagtcggcggcgacgaaggcaagccggtcggtgaagacgtagacgcccaacaacggcggcataaaggccagccgtgcaggcgaggacatcggtcggcggcgacgaaggcaagccggtcggtgaagacgtagacgcccaacaacggcggcataaaggccagccgtgcagcgaggacatcggtcggcggcgacgaaggcaagctcggtgcggtgaa

SEQ ID NO: 24062 - DNA, 12007 bp, Oryza sativa
tttaaagccttaccaaatcaaatatttgagagtagaaacttatggaattatcaaaatgtgatagagtagcaattgcaaataacatgtttgatttcttgtcatcctaaaagttgctaatactaaaattcgatagagttaaaaatggtaacagtttatattaaccacgtataaatatgaatacattattgaagcatgatgtatataaggtatattaaaaataaccatataatttataattaagaacaagaaaatacgataatttaaaattcatgaatggtcaaaactgagataacaccgatcaaaagcgataaataaaatagtactccctccgtttcacaatataagactttctagcattgcccacaatataagacacatatatatatatgtctagattcattaacatgtaaataaatatgggcaaatgctagaaagtctttcacattttggtccttttaaaaaacttatttcgcaaatagacccctagaaaaacttatcccaaaaatggtcctttttggggcgccagagtggacgacggcgctagccactctggcgccgtccccctgccgacgtggcggggcgatgctgaggtggctagggagtgcgccagagtggctggcgccccccccccaaaattttttatttttgttttatttgtttgatatttttttcacgcttagggacacacaagaaccaaccatagaaaaattgaactcaaatggacgtaatatgtgacctgtagaatttttcctctcctctcctctctccgaactagtgcaaaggagagatgtgcaacttttttatttttattttattttttgatatttttttcacacttaggaactcacaggaatcaactatgtaaaaaataaactcaaacggacgaaatatgtggcatgtggaattttccaaagttttaccgaaaaacttctctcctcgaaaacacaatcttgcaagcggaatttggagtttttaatatcgccgaacccggcaaagcgggggagaatcagatgtaacattttctgtagatgtccgtgcatatattatttgcctgattccgagtccgtatgagaaagttacgcctattttaatagatgacatattttgtccgtttcggtagagttttggaaaattctacaagtcacatattttatccgtttgagtttattttttatacggttggttcctatgttctcctaagtgtgaaaaaatatcaaaaaaatgaaataaaaataaaaaaattgcatttctatgtactgtttaacttatatatgtcatttcatgtggttatattttgaattagattaagtaatttcatatagtggtagagtgcattatgtttaacatgctgatcaaagggttttactaaaggaattatggtctaattttagtgaaggtgcaaagtagactaagtggtatgctagctattttcagacttagctaagtggtagttcgagtttaaatttttttgtggttggttgtatcgtgatcctaagtgtgaaaaaacatccgaaaaaataaaataaaaatgacaccgttgcaactccatacagaaaaacaggaatggaggcggcggcgccagcatggctggcgccctcctcctgccacgtcggttcgcgtgcgctacggtggcaagaggacggcgccagcctctctggcgccgtcctgttggatgacggcggcagccactctggcgcccaaaaaaggatcatttctgggataagttttttcaggggtctatttacgaaataagttttttaaaaggaccaaaatgtgaaaaatccaggaagtaaggagtatatataagaaaaaactgtgtaacttttcatgggcagagaggagaggaagtaacgataatttatttatttactaaaggatcccttgcaaggtcgtcccctgactctgaaaaagtcacgccgggctaatcgccattccccaagggcaatcccgtactttcctccaccctacccccgccaggccgccaccaccagcccaaagcatggctcctgtacctctacggcgatacgtcaccaatccccttcacaaaaaaaataataataccagaaaaataaataaataaaaataataaaccaggaaaaataccaccaagaatcaacgggagacgagacgaggagatagagtgcgataagagagagagagagagccgagtcgccgtaggaggagggctagagagagaaaggtggtagtagagtagtagtagatttgaggaggtgagagagagagagagagtcatctctcttctttgtatcccccgtcgccaacttctcctaccaacttctctctctctttttttctcctcctcctcttcttcttggtggccgctcgccgccgccgacgccgacgccgccggcgggtctcgtcgtcggtacgtgttactacgggggccggtctgtggcccctaccctccgtcgccgtcgtcttttcttgttcgcgtgtgcgtttatttctcggccagaggttggcggcttccggcggttcttggattccggcaggattgatcggcgtggtgtttcttggcccccccgcgaattccggcggcattctgatggcgtgcttcttctctcttctttttttctcttgctggttgttttgttgagttcgtgtggggtggtaggattggaaggtggcggtggttggggggtctttgggtggtgagggaagggggtgaattctctgtgttcttgggggttgttgttgttatcatctgagcctcttaggattggttgggtggcggaaggttggttgttgccacctgccctgttcgtgtttgcgattgatttgtactacacagtgggtgcttctcctatgtgcaaatcagataattccgcggtaacaaagtcagcgtaggattatgttggtgatgatgatgactagtgtgcctgaaaattccatctttgcagtagtccttggcttgataatacagatagattctttgcagagttcgtgcacttcactgtcacaacaaagaaatcttttttcctcaagagttaaattctagtaggattcgttggattctgtaggccctggagtgtgcttgctaggtctgtgctaactgttagtggtgactggtgacaagtacatcaccttgatttcttcttttttttttcactcactatttttagggcgtttatttggttactcctttcgccgagtttcagttaaagctgacctgtgcctccacgtgacgttagtggggcttttgtcagatgatacagctctgttgaggatcgtgctggacattgctgcactgtcagcatccttgttcctttgctgtctatttgagccctcaatttccagtgcctgtagtactcttcactgtctccatggaagttgtaggcctgttgaatgttgatgtcttattgtcaacagttttgttcccagagattgataactcacatgagtttatcagtttttgtagtacgattggctcctttagattccattttattgattagtaacttaatgctaataagtaaaaagatatgagtgtgatcttccacatttgtttgttagtgcattaacccgccactaggtttgccagtcgcatctatgtgctactatcacaaaacattttttttttgtctattgatgtgaagaacaaatagtcaatattattctgtatatatttggcaatatggttaagattaccattcatagggaagaaatagatatggccaataagagaagtgtaacgtaattccagttcgagaaatggtggcagtaccaaatgccgaattagcggctgtaccaaatgatcaatgcctctggggtttcccttctcttcagctctccccggtttcaccaatgtgttgggcactgaacactgttgttgtttccagcaggctagtattgtctaatgtaatcaaaagctcttgcattaattgcgacacacttatttctctcacgatgtctccatatttgaacctaaaacctttttttatacaaccttatagtactcgcttttataattggtttagaaaatcttatatttctaactatattgcaggtggcattgaaatatggttagcttgaggaggcgccggcttttggggctttgttctggtatgagactcactgcaatgtcatgatttgtttcctgatatgtttacgtaatttttcagaggaactctgttgtgaaaatgtgctactttaattacttacaagttatatacaaagtcatcatagcatgtctttcttggttatgcttatcaattctattatgatctgactcttcaatggaacatgctatacctactctttcagattaaaaaaagcagtactgtgcacccaatttacaaatatcttgtacatgaaatttcttgattttgtttctctattggtataccatctgtagtcagcttccgttgatacaactttgcaactccttgtatacgtgttttatgttgctccccatggtgtataagttagtgggattgggaaattatgtggagaccataggaggaatttgaatagtcaatggaccttacaagaacatgatttggctgcgaactaattgcttccagcaccagaattatctgtgcaaagaatttagacgggagttgccgtagccctgatggtaccatgattagatggagcacgtataatctgttccatattgcatggtgtggaatgaagtactttaaacatttttctgctgactggttagcttactatgagcagtctttgcaaaatttattatggaaatcaataagggaaggctttctatatatgtcgtgcttcctctaccgttcttgtaatttttattcaaagatgtatatcagtgccctttgtgggttaaaaatcaattttgtttaaagagtaagttgcattgcccaccatctgattgtaaacacagcagcttgcactatttgtaagttaacacaccacttccaccttctaagttcacagaaattgggctctctgaaccaggttcagtggttcatgaacattatgtgaggtgggatgcacccaaatgctggtgtagcaatggccagaggccattcattgtcctgttaggatgctgtgccatactgaaggtgatttctttgggggcatgtctgagctggcttattcacccacacaggaggtgaaagtgaattccttgttttgcaatggcataacagaacggtcaagccgattctcaccctccatttggttagctcctgacatcacaggtcatgttggacacacctgggtctttgttcacatggatatatgagccatttcgtggatgtgcccacagaggtctcaatgcaccatttccatctcattgtcggaatgaggcaaacctgtaacaataaacatgcttttacatggtggaagagtgctcaatttgtccaaattacatggtggaagatgatattttaatgtgttaaatgtcacaagctgcggttttacatgaacagatggtgcaaaattgcatattacttatgtttaaataaatttagagggctatcgcaaatgtcagcgtcaagtgttctggtattcttttctgaagctacacgtaactctagaagtatttcagcaagaagggtgtaagttcatactattgtgtaggcacacagaaatgaaacaagggcagatgtagccagattcgtgcaactatacaaatcctaatatagtaagacatcgtaactacaaatatgctgtgtgaatcactgttagaagcacatggcttctggtgaactgttgatttgaccaacaatcgagattacggacaaaatactattggcaaaataagattatttttaagtatgactatatcgttttctcatcgcacttcttcccatgaacccaagcaaggggatcatttatgcaacacatacctccctagacagctagccaatgaatgtattatgcgtacactttgaacgctcatataatttccctttgtgtcaaggaaaaaattggtatcggttgatttttcaaagcctaatgtccaatgaaaattctgtggaagttgcacaccttaacataaagccattcattgtgcacccgttgcccttgttagttttaccccttcatggcaggtccactttgctgcaaaaatgttttgctagttgccaccttgtgttgtgtttgattattggtgagaaccatgctatcacagtttctatttatagttaatggatattacaagttatggtatattcaagcatatcaccaaagtttctgtgacagaactctgacaatcattttcgcaagttaatttaccattgttggtttaatctttactttgatttttaccattttaattgtattttagaatagtgtgaataaaataactgtattttcgcaaggctgtcattgaccataaaattatactaccaaattagcaccttcaaaaagctaatggtatgatttaaggagttcaaatttatacccactacattgataaatccttgtcaacttttactaaaatggagttaccttggcaataatttgtttatgcccattttgacttctccattaataactggattatgggtccactgcgtttttggcgggcaagtaaatgaggaaaattaatgaggccaaatgagtgaatattaattggaaagcactcatgggctcgtggcacatatttgtgaacaaataaagtagtaaaaagccatagtaaaaagttacaagtatttgtgaaggatatcaaaatcgaatgggattctgattttggttttgaacttcgaatatgtcagaaatatattcagttgctctttctctgacaataaatggtacaacctgtggcttttcagaaataacacgtcaggcactgacaagctatttcttaacatagcgctgtaagatagattgtgcttgactgctccttgtgtcaatggactactttgatggtgttctctttttatcatatctactttaccttctagtacttttatctacatggtgggaaaataagtaaaaccaatggattgaataacaagattgctgctcttgtttgttttgttgcagtgccacttttcaacagtagcttcatgtgttatactaattccttttttttcttctgtttcatatggtttgctttatagtgactccttagaaactacattattttctgatgcttctgaacacatgctatttgcactggcaacgatggttttgtttgataaaatgtacctttttgttgcagactaaaaattctgatgtacttctggaatcttcaaatgggtctgattctttaaaggaagagaaaaaccattactatccaggttcatattatttcatagtactctttgtatttccttaaagtatatagtccaggtaaattttatatggcaaatggttgttttataattcggtatcagaaatcttatctaggtacaactctataatagtcccatcaaattaggctgactttgaacttcttgaatcatgatgaaactgaatccattcttggcccaactttctcattgaagcattgaacacaacaggatatattatgttttagcaaccaatagaaaggacgcttctgatccatgaacagacttgcacatgaattgagattaccccgaacgtgatgtcgaggatgaaactgctctcaccaaaaccagatagagttgaattacataactaggtgacctgacctgggatgtttcactagagccttttctttctctaaaagattctaccttttcttttccatgaattccctttttttattcatgtacagaaactcttttgttattttatttcagatttgcattggttaccttcatccttaatgaggtatccaaaggcataagctgaacgtgtcatttttattttgacaaaaatataatttgcttccttttatatttataggcaaggaaatcaagcgcagaaaacgacatagaagaaagcagtatgtggaccaagaaccatgcataatgagaggggtctacttcaaaaacatgaaatggcaagctgctataaaagttgacaagaaacaaatccacttaggtactgtcgggacacaggaggaagcagcccgactatatgataggtattagctggacttttatgcacgattatgatatttctatctttgcatataatatcatgttctgctttgttagtaatatgctgatacttgtatacaatactataaatctaatttactttaatatcatgaagaagtgatatattgatatatgctagaaaatattacaaaggaactagctagtctgcaaagttatcggagtaatagccaaaaatttttagaagcaccttcaccaaaacagtacaatgttgctttatcaaatctgtttgttgtctcaataaactaaggtttttttattatataatgattaaagactgttaacatcctaaaagatcaatattgttccatgcttaaggtggactactcatcattgttggcatacaaccctcaagcctgtatacatacagtataggttgcatcatatgcatattacttcaaacgccacttgcatatctgccgtggccaactgatcataatttattgtgtaggagaagctgatattttgtttgaactgactagatttgacatatcaacacagggctgcttttatgtgtggaagggagccaaactttgaactttctgaggaagagaagaaagaactacagaattacacctggaaggacttcttggatatgactcgagacaccataaccagcaaaagtaagacgagaattttaaaatttcttgtggttgtcacttaatttttccctgctagtagtcaagtacatcaatatatatatcattagtagtagactataacatactttttgttcatctgtttgtcttcagaacaaaggaaagttggattaataaggcgcaataagacggactcgctggtaggacagagtgatggtgatactgagatgatcaatggtggcggctcatcgcactcggaagatggagatgctgagacctcagcatcttaattaagactgccaccagagttcatggacagccagattgggtctttcaacagattcgtttcaatgaagacataatttccatttaggtttttgttctctcaataattaatttcatgtgcataagggccctgatggtctgataaaggttaggctagagaaatcatgccatcccatataaagttggagatggtccattataggaacacatttctctgagcaaatgagcaatcatgtatagaaacaccaattcctgaactgtgtatatctttaccccaaatttctctacatgtaactagattacacatttaataaagaatttatttttcctttcaattactgtatctttcattctttcaaggaagcatgatccgttacatttatccattaaacattatatgccagtttctagatgacattaaaccttttgtttgttcccctcctcgctctctaaaaattgtattgagtacgagaaagcaaaattagcaccatgatttggccattgtcttgttttttacccccaaattatcgtttacaccacaatttcgtaccagcgtccatccctctgttcatacagacgtgtaagtctgaggccaaccacaatttcgtaccagcgtccatccctctgttcatacagacgtgtaagtctgaggccaaccgaataatttatctgtatctctactacttaaaaaaagtatgtagtggtgacggtgaagccaatcctaacggacacatgtcctatgaaaccattggattgggacagcagaccccatcgcacgcgactcgctttcctccgccgcgtggctcacgctcgcgatccaacggaaaatgctacttttgtacgatttttatacgcgatcgttacgcggacggcgcttggcatcttaacgttacgtggtgcatgcgtatgttgcagcccaagcccatacgcatatactcattattttgttttgcctttttttctctgtatccaaataaatataaaccatgccaaacattggctcatacatgaacatttgctgcatcttatcgacttatcctgatttgtgccattggaaatttagaatacttccagctaggggtgatactaccagggtccgaggtgcaaggatcatatatactccctccgttttataatataagacattttgactttttgcttgcactgtttgaccattcgtcttatttaaaaaaaattagaattattatttattctaaagtactttaaacacaacttttagttttttatatttgcacaaattttttgaataaaacgagtgatcaaacattgtaagaaaaagtcaaaatccattatattataggacggatggagtatttgtaaaactaggttcatgtcaaaataatttacttaacttaagctaggttacatgataagtgttgagcgacagtacgagtatataagattgattaggaaaaataaattactctggttagctgtgccaggaggctttaattataagatgtcaggacgatgatgtgatgagcttggggttttggatatgggccggctcagcgttagaagaggtccagtgtgggaccagaacttgcaacgttaatcagcgttatgagcctagaagagaaacgtttcatcgtacaaccgtcgtaacaaattagtcgtacgtatagcagcgccgcgatccaactggcgacgccgcgcctcccactttttcaccgcgccccgctacacctccaccgccggcgccccttggcccaaatagcagcccgtcagcccatcaggaagaggagaagtggaatgcctcgatcttttctcggctcatcccgtacgccgctactcttccacgtctctttggtttccatacgccgtgtctcccgagaacatctcgccgtcgccttccccctcgcttggagaacggcagtgggtcacggctagggacgccgcactcactggctgccggccaacccgtcgctgatcgtccagtccaggggcaacagccagcatccggccaaactttcacaatatcagccacgaataagtccatcaaggtaacaaataatgcttcatctatttatttttcaatcaacttcactggttatagacaaaactaattggatgttatttttcatattgtaggattaggagtccagtaggtttcaatttgggttcttgagaattggagtaaaactgtaaattggaggcaaattgtaagtcatgtaaactgtgattttacttgaatgaatgataaaaaaaatatacaatttcaatttctggaacgcaatgatagagcatgatacttgatttttttttctgtttcttgttaagagaaaacaaggatggtggatatttagcatttgttaagaagaaattgtttaaggctgaaattgttaattgacatagatggactctgctgagaccgggaaagaaccaactgagattttagccaatacagagataccagagcaggtcaatgactcaaacatcacttatcaaagaattgagtagataaaaaacatctgtgcatcagaacacaaaaaaaccaaagaaggaacatgtaatccaaattatgcggcaaggtacttctattttctttagaaattatgatgtattttcttttgttcaaatatgatttatttttgaaatcttccgctatagattatatttgcagcgaagaagatagttagctcataggttatgtgagacaattaccagagagacaaatggtcgtcgacatcagtggtgcctttctttacatatatgacatggcctgtcttttttatgacagtacttatgttaatggcgatgtaactacaattatgtttagtatgcataccacaacatggctaaaaataatctaattgtttttttgcataggttataaatgcttatattcattgtatatgggaagaaaaacaccttactaatagagatggtggaaaggtatttttggataacactattatttctagcattcttaaaagtgacggtgcctcaaacttaggtcacaaaaattataaggatgatactatttgcggttctatgtcattgaatattgctgtagcattagctaaaaaaattgatgggagataaaaatga

SEQ ID NO: 24063 - DNA, 23366 bp, Oryza sativa
ctacagcaatattcaatgacataaatcaaagaaccacaaatagtatcatccttataatttttgtgacctaagtttgaggcaccattatttttaagaatgctagaaataatagtgttctccaaaaatacctttccaccatctctattagtaaggtgcttctcttcccttatacaatgaatataagcatttataaactataaaaaaaaaacaattagattgtttttggccatgttgtggtatgcatactaaacataattgtacgtacatcgccattaacatagctactattataaaaaagaaagacaggccatgtcatatctgtaaacaaaggcagcactgatgtcgacgaccatttgtctctcaagtaattgtctcacataacctacctatgatctgattatcttctgcgctgcaaatataatctatagcggaagatttcaaaaataaatcatatttgaacaaaagaaaatacatcataatttctaaagaaaatagaagtaccttgcagcataatttggattacatgttccttctttggtttttttgtgttatgatgcacagatgttttttatctactcaattctttgataagtgatgtttgagtcattgacctgctctggtatctctgtattggctaaaatctcagttggttctttcccggtctcagcagagtccatctgtgtcaattaacaatttcagccttaaacaatttcttcttaacaaatgctaaatatcaaccatccttgttttctcttaacaagaaacagaaaaagaaatcaagtttcatgctctatcattgcgttccaaaaatggaaattgtgtattttttttatcattcattcaagtaaaatcacagtttacatgacttacaatttgcctccaatttacagttttactccaattctcaagaacccaaattgaaacatactggactcctaaccctacaatatgaaaaataacatccaattggttttgtctataaccagtgaagttgattgaaaaataaatagatgaagcattatttgttaccttgatggacttattcgtggctgatattgtgaaagtttggccggatgctggctgtgcccctggactggacgattagcgatgggttggccggcagccagcgagtgcggcgtccctagccgtgacccactgccgttctccaagcgagggggaaggcgacggtgacatgttctcgggagtcacggcgtggaaaccagagagacgtggaagaggggcggcgtacgggatgagccgagaaaagatcgaggtcttccacttctcctcttcctgatgggctgacgggctgctatctgggctgaggggcgccggcggtggaggtgtagcagtgctcggcgaacaagtgggaggcgcggcgtcggcagttggatcgcgagcgtgagcgacgcggcggaggaaagcgagaaaagcgaatcgcgtgcgacggggtctgatgtcccaatccaatggttcataggacgcgtgtctgtcagggttggcttcaccgccaccactacatactttttaagtagtagagatatttttatggcccatatttatggaaagattttgatgtctggagatatttatcttggtaatgatttatgtcttggtttgcataatgaattcaattcttggaatggtgtcaaactgtcaactcagtatcactctcgaatggtgttaaactatcaactcagtatcactcatcgatattcatcaggttctttcaggtgtgcacctaaatatgtttttttttgaaacctaaaagaaagtgtaaatgttggtcctaaagtgtggaaatgtttcttgggctactttgatgtagctaatgagctatgaagagtatgtcagaatatgatccttttaatgaacctcttttccggatgttttactaagcattttttttaactctctcgattcatctctgaaaaattttataggttactggccctaagtttggctcaattataaattggtttttccaatattcggtgcgacttccatagttgaggaaccacatatcaaattatatgtttttctaaaggaacatgcaatccaaattgattaggtcgactttttaaccatttagggatgcgatctttaccactttgtgtcttgcatttgcatatggaacatgtcttcatttcggattttttctaatcatagaagatgggacgtagtgttgctcgatcagggccctatcgttattgcgaagcaaattaaacagctgcagtattctgttctacatgtagtatatgaaaatttcccataacggaaggggtattagtcacagattggactaaaacctacataaattttgtcaaaagcgaaatgatgttatagtttcccttaaaacgtgatttcgttctgatctaagccactagaacgggatcggttatctttaatgggctaaaagcctcatctctttcaggtataatccccgtcactaagcaaaggtcactgatgtgagaacatatctcaatcgggcacaaggccatcacggatgaaagtcatctcaatcgggccaaaaacagtgtccgtcacagataagtttgaccaagcaaaccgagtcaaaccaggctaggaaggagcccgtcacggatgactaatctcaatcgagcacactactaagcccgtcacggatgactaatcatctcaatcgggccttaagataaaggccgtcaccgctaggtttaaccaacgtgttgagtcaaaaataatcatgggccggacgaattatctctatcgggcttatagttatagcccgtcagggatgactatatccctatcggtctaaaggttgagaccatcacagatggctctatctctttcgggcctacttgaaatgcctgccagtgatgagtatatccaaaaaaaaattgttttttggctagtctcaggcctttgctagccatgcctgcagcaaaaataatagaagcaatatacatagtcccattcccagcaacccacaattcccagcatccattcacatattctgtcatagcattcattcatccatcacagcattcatccatcacatatttatgtcattcacatcctatttgctcttcaaaccgcctacatgcatcaaaacctgcaaaactgagttataaatttaaacaagtttatatgtaattagaaatgcaaatatttacataacattgtggaaaattgtgttacaaagaatatttacataaatccaatgtttgtcgcaaacattgcaaatgttcaaccattcagagacgagctagctggaccttgactctaaacattccttgttttgacaacatatcatctagtatgaattctgctatcttatctctaatgatatcgaagttgttttccgggatccttgaaagtttttcatgtatgtgaggcgccaagttagtctacatacttggcaagttttcgtcctatgtctataataatcaatggaagcacacacctcaaggtcgagcaatgtcaccttttttgcgaagctcctcatgttatgccagacatggaacccacactggtcgccaacttgttgatgcattgggaagtcttttttgtgaccgagtgtgggatgcccttccttatgccacccgccttttgccacatattggtcccaggcgttgttcaaagcagcttcaatcgccgaccaatcgcatatgtcttttttgatattggagttaaggtagtataccaaattccacttccgcactatgaccaaaagaatccaatgacgcctgtgacattaataaattgctagttaagttttaaaaacttaagttatatgcgtcgcgcatttgattctaagtagggtacacgcttactgttgattgtaggcgcacataatgaattccttgtcttgatggtaccataagcagtccttgatatattctaccatgttggctcgatcgctgtttataattgtctcgttgatgacagctagatcgagtaaggcaacatggggtgcatgacgacagacatgcttccaagttaacctagaaacaagacaagaatccgggtaagcgatagtatatggatagtgaataccatagctcgtatgcaactatacttataaggagtagcacttaaagaggatggtgtcgatcgaccgcaccctgtagaggtcccatagatctttgaagtctatggcgatgaaggcttcaggcccgaggaatggctgtctatcatagtagcccgtcatggaggtctctctattcttcctccttgcgttggacctctccatgcagtagccgtgcaactccttgcatgcagggcccatcttcactaacacgtcatctctgaccaatggcatgtctaatgtgaattctgtcggaggcttaggatgagctgatggcgtcttgccaagatctagcttcttcggagccagaagagtcccttgcacctttcctattgcttttccctttccagcagcttttttgagtgtgtcaaggtggggtggagaagatttcaccctcttgctccttttggcaggaggagggttttaagcctctgcattaagctcttagcatgtcctaattttggtgcagatttttcatgcttgcatcatattttaagaattgcaaaaaccccataccgcgtagattctagagcatgtagcagtcactcttcatatttttgcatagaccagtatccagtagctaaaattttgccaatttaccagtagctacccaacttaattaagaaaccctcacatttttcctagaatttttgcatgcctggagaatgggttaaaaattcgaacagcacagatcaacctgtagtttcagaactgcatcatctagtttagaaattcattacagataaatatatgtgtctaaaaattgtaaatcttataccataatgcggggtgtaaccagggcatccttaggcatgtatttaaccaagaaatttatgcattcacatgttgaattaaggttaacctattgcataatagtatgctggacagaacatgataaaataaccataacaccatttccgagttcctaatgagtttcaattgaaattctaattggtctatgcttccaaaggttgtagatgtctactgtgtggcaaccactaggctattccggaggttatgaggaaggatcattgcctcacatcttgtggctcatgctgcaacatcttggccataaccacccaccggagtatcatttcttttctcttgaacggagttcatctctccgagcttatatggctgagctgtgtatacaaggattttggacccatgaatcacccctttactttcaagcttatggttgggatgcaccctcagcaatgcatgaggccgcatttcaagcgattgtgtattaccgacaccacaggccagggatggatgggttctttcactattttccaactcgtacaaatcaagcaactgccaattactatccaggtcttgagggaaacatgagagagattgacactccacagcttttcttagctggcctagtttgtgctatggatagatatctcgcgaatactatggctgagttgcgtagattgcaagctagagtggtcatgcttgatagacgaatagaacaacttgggcatcaagggcactttgataatgccattatttatgtgaatcatgaacttcagcctcttactgagaccttgcctcctcccgtgggcgtttattaaaacataaacactagagcccacatgagagttggtttccaccgcaatcgtcgaaccatgccagaccctgcacttgttggatatccggtgttgctgggaccattctacgcatttgagcggaatgggagacaataccatttgaccatggccactccgtcaaccacggtgcctcaatctcctatcgaattctcccaagttccatagaatggtgtactaaaggaaaaatgtatggggtgtaactttcatttctttttccaaaagatgcatgagacgacaccctattatgtaatccttctaatggtaaaaaatttgtaacaccgaggcatgaacttggtttcttatgaccattatccaattctatgtatctatgatcacttagatcctttgaaactgatgtactggaatgagacttatgctccttttggaatgaattgcttgctgtccagaaatttgttttatgcaaatatgaaatggaagacttgtaaattcagctataagaaatcattcctgtgttctacatatttagggtgatgtatatgtcaagtctttgcacaaacagctcatatacttgtgtaccttgagtgcaggatgacaaatactcgctctggagctcactctgcagaccgtgccgggggtagtcgacgtactgccaccactgagcagcatgacgatgaaccgtcccttgtgcaactcttagccaatcagaaccggctctttgaaagaatggtggcaaagtctgagaacatgggggctgctatggcacagcaggctaaccaagcaccttccaagttggcagatgttcagcgaactcatccgccacatttctcctttgtggtgctccctgtgtatgcggtccagattttccagtcttcgggtaaggacagttaggagaataatgccccttcttgccgcaattataacatgcgacattatcattacgagatgcatctcccgcagcttgaactgtgcgaggaacttgacggactatctgagtttgtggacgtggaggcacatacatctgccgtggtggctgaggcgccatgggacgaaccacaggagatggagcaagacgaggccgagtggagctgctgccacttgcaaatttctttgcagcccacttgcgcttacgatcttcaacgacttccttctcacttgattcgacacgaagggctttttcaaccagtgacttcatgctagtgatttcatgagcagtaatagcatggttgagttcaggtgcaagacgatctctgcatagctcaaccttctttgcttcagtgttcatgtcagcagcgacatatctacccagatagttgaagcgttccatgaactccatgaaggtcatgtttccttgcttcaagttaagaaactctttctttttgatctccatgagaccaggagggatgtgagcagatatgaatccttcccagaaaacagtccaattgttaggctcatcagaggaatgagagtcttgtatgtctcccaccaagcagctgatgctccttgcaggtagtatgcagcgaatgtagccttctctacaggatcacactggcaaagatttagcttgattttaatatcacgaagccaatcatctgctgcgagtggatcagctgcagaggagaaatgtggcggatgagttcgctgaacatctgccaacttggaaggagcttggttagcctgctatgccatagcagcccccatgttctcagagttcgccaccattatttcgaagagccggttctgattggctaagagttgagcgagggacggttcatcgtcatgctgctcagtggtggcggtacgtcgactaccccaggcacggtctacagagtgatcaccggagcgagtattttccattctgcactcaaggtacacaagtacatgagctgtttgtgcaaagacttgacatatacatcactgtaacgccccgattttcggtcgggattaaaaatcaattaataatgcattttctagaaattcaataaaagttaaagtaacttaatcaagtgaaataatgggagaattaaaattttcccttaaaaaaatcattggccgaaaatattttataatattctttgggtcctaaatattctctgaaattttcccgtgaagtttcggagctcaagaagtaattttaaagtcacaaagttcattaaactcatttaaataaaaagaaaaaccaaattaaatccctttcctccctttttgggctcggcccaactccctccctcctctttcccggctaggccggcctccctttcccctccctcggcctccctcctatcctccctcgcaaaaagtcttttttgcgtcccttcctctctcccttcgctgacaggtggggccggccccttcctccggctccaaccgccgccatggccgcctgagcctccccacgacgctgccgtttccgccctccttctccaccccgcgcacgagtccgccggccgtgggaccccgccgccccacgtcctcctcatcccccacctctcccttccaaaaccgccacccacaccccacgatgccgcccacgccgccggcggttgccgccccgactccgcctctcccgggctcggtccgacctcccctcccctataaaaacattccccgcacctccctctccattttcccctctctcccgagccctcctgtgcacgaaaaccacgccgccaccgtgcacctctcgccggtgatcctccagccggccgccaccgctgctcctgccgccgccgctccgcgcgaccgccatcagcggcttcgccgcgtcgtgccataccccggcatcccctccgcttccccattgtgtcgccgaaaccacctccccacggcgctccctctccccaccactcatcggcgtgctccagccgccgcctcccgccgctcctagccacctcaagtcgtgccgtcgccgccgctcgcttcgcagcaccgaggagcacctcggccgccgcttttcacgaccagaatcctgctgaaacacggttcccctcgcgccggtgagcatccgccgctctttctcacctccggctggcgattcccgccgctgggagcccctatcccattcctaacctttcccttgtcctccccaggtccttccggccgccgtccgccggttcccgctcgcggaacgccggcggccgccattccgccttcgtcccgaggagcgtcaacgccgagcttccccgtctttccccgcccctcgtcgccgtgtcctcggtgagctcctcctctccctcctagcgccgtgcgccatcacttccgtgcgtgcgtcgccgccttgcgcagccgccgctcgccgccggtggcctttgggcccggcgcgtcgccgcggcgctgtcgtgtgctcggccggctagcttgccgccgtcccgctcgcccgtgccgctcgaccccctggtcgcgccgctccctcgcgtgagccgccgccgccgctcgcgtgcgccgcctttccccacgctgttgctggccgtcgccgccgtgccttggctctgccgggccggctttgtgccgcacccgtgcccctggccgccgctcccctcggccgctcgatcggctcgggccgatttgggccgtccacgtggtggacgcgcacccgaggccatgtgcggacttggtccaccgtgcgccgcccctttgtgccgctgacgtgcggggcccgcgtgtcggcgccggcctccccttgatgacgtcagcgcgtccctattcctctgagaaattaatcattaattgtgttataaattgtatttaattctagaaattcatttaaatggctcaaaacttctaaaattcaaatctaattcatatgaactccgaattgagccgttcaacttgcaaaattcatctaaaattgagctctacatgttttttttactttttatgtactgttcccttagtgtttattagagtttttccttgttttgtgtgccagcgtatagaatccgtcgtttcggaagtctacggtctcgaggaaaagagttcagaagataaaagtgaagaagcaaggcaagtcacacatcccccttgagcatgttgatccaaatttataaatgttttattgtttgcaaataaatatgcatcgttttactaattacatgggtatagggtttacctatctgcttgcttgtaccatgttatttgatatgtgtcctttgtcaaccttgggtgataaatcgactagcttatgttactttgatgacctagctagaactatatgcttagcgatgcttaattaccactagctcagtagatgggataattgcagtattagacatgttagtattatgatgagctacgtgctcgagacatctggccatgtttcatggtcataattatccaactaaaatacgactgaatagcgggttgtgggtgcatggttttgctggtcgcacccatggcaattaaggaccggttcgcgggatgcactagaagacatacaacgcttgccacaagcgggaatgggtaactgcctgccttgaagtgtagcttttctctggttgacgcatccaggcaagggtgggcgtgatggagcagggcgggccctgcgacggcctctgtcgcttccggattcacctagccacgagaggggactgtccgctacctgctgggggcgggggtgaagcctgaggtgtggtgtgcttggtcagagcgggttatatgaagggtcttgtcacaatcactcgacatggtgacgtgtctggccgggcacggtgacatgccagtggattgtgtcttgtgggtacagttgtgcacctttggccagagtaaaactattcgaatagccgtgcccgtggttatgggcgatcgaccagaatcaccgtgattagtctcacacttaataaatcgacccaatgcactgtagttcaggtgggtttgttgggcctgttcaacgtggtgtagcgttgaccagtggagatttaatattaccttaattactcaactgttttactgtttgctaaataaagtgttttacaaccgcctttatgcaaatagccaccaaccgtccttgtatccccttgcacgtctgcatcattggtgtggcttgctgagtacggtggttgtactcagccttgctattattttcccccttttaagaagtgtagtgcttctgagctaaagacaaagttagaggaccaaggctcagaccccagttgagtttttgcctgtggagtggagctgaagccccgctaggattgcctttttcagctgctgctgctttcgtttcggtgtgaggactaagtgcctcttctgtaagtattttacgctttatttacgtttggatctgtatatttacttgtcgttttgtgtaccccggctggtcctggacagggatttaatacacaaaatagtctggaaatttgggctaaatttatgggcgtgacaatcaccctaaatatatagaacataggaatgatttcttatagctgaatttacaagtcattcgtgtcatatttgtataaaacaaatttctggacaacaagcaatttattccaaaaggagtataagtctcattccagtacattagttccaaaggatctaagtgatcatagatacatagaattggataatggtcataagaaaccaagttcatgcctcggtgttacaaattttgaccattagaaggattacataatagggtgtcatctcattcatcttttggaaaaagaaatgtaagttacgccccatacatttttcctttagtacatcattctatggaacttgggagaatccgataggaggttgaggcaccgtggttgacggagtggccatggtcaaatggtattgtctcccattccgctcaaacacgtagaatggtcccagcaacactggatctccaacaagtgcagggtctggcatggttggacgattgcagtggaaaccaactcttatgcgggctctagtgtttatgtttttataaacgccattgaggaggcaaagtctcagtaagaggttgaagttcattgattcccataaataatggcattatcaaagtgcccttgatgcccaagttgttctatttttctatcaagcataacgactctggcttgcaatctacacaactcagctatagtattcgcgagatatctatccatagcacgaactaggccagctaagaaaagctgtgaatttcaatctctctcatgtttccctcaagacctggatagtaattggtagttgcttgatttgtgcgagttggaaaatagtgaaagaacacatccatccctggcctgtgatgtcgataatacacaatcgcttgaaatgcggcctcatgcattgctgagggtgcatcccaaccataagcttgaaagtaaatgggtgattcatgggtccaaaatccttgtatacacagctcagccatataagctcggagagatgaactctgttcaagagaaaagaaatgatactccggtgggtggttatggccaagatgttgcagcatgagccacaagatgtgaggcaatgatccttcctcataatctccggaatagcctagtggttgccacacagtagacatctacaagcgttggaagtatagaccaattagaatttcaattgaaactcattaggaactcggaaatggtgttatggttattttatcatgttctgtccaacatactattatgcaataggttaaccttaattcaacatgtgaatgcataaatttcttggttaaatacatgcctaaggatgccctggttataccccacattatggtataaggtttacaatttttagacacatatatttatctgtaataaatttctaaactagatgatgcagttctgaaactacaggttgatctgtgctgttcgaatttttaacccattctccaggcatgcaaaaattctaggaaaaatgtgagggtttcttaattaagtttggtagctattggtaaatcggaaaaattttagctactagacactggtctatgcaaaaatatgaagagtgactgctacatgctctagaatctgcgcagcatagggtttttgcaatttttaaaatatgatgcaagcatgaaaaatccgcactaaaattaggacatgctaagagcttaacgtagaggcttcacaaaaatctggtggcctttatatgacaagcaatctgtggttaaaaacaaatcaattccatcctgccccatactaccattttctaggccatcaatgaaaaattaaaattttgaatttaactttggaaaggagtaattagccatttatttactgaaaagttttaaaatatttcaagtactaacttgaatagaatttgtttcattcatttcctagtcttttctatgagttattacttttttatttatgcatcatccaatcctatagaataagatgtggtttttaaaatcaaaacaagattcaaaggaaagaaatttatccaaagagggctaagaagtaataatatattagattttgcaaaaatattcttagtgaggatattatcctcaaaatattttcttttgaagccttgctaccattcaatcttagaagggttcctgcgtcggtcttgctctgataccaatactgtcggaagcactccaaacctcttattatatttgaaggatgaatagaataactcaattcttccatcaaacataataagacattcaacgctccgagagaaagatacatgagaccttgctgggcctttagcctgccagtcaacttcagcccagatgtgcctgtcaagccactcgatggcagcgaccagatgtgttccacattcaggatacttgacacaaaatagctaaagatctacatgatctcaaatatctttaactcatactcatgtttaatatgctcctaacaaaaagaacactctaaacactttcatccaagcacatgatatctctaacataaggagttctaaattctaagtgttagttagaatcatacaacatagtacttagatacatatggccgaccagccaaatagctaggttcgcggaagcataatctacccaaaagatctttcatacaaccgactagggtagaccctagtaagaaccatcctagaagaacgaaacatcccctgcgaaatcctcctcctcaggagtgatctcacctacaaccaattctaagcatacaacaaaacaacaattcatgcgaaatcatcctcctcaggagtgatctcacctgcaaccaattctaagcatacaacaaaacaacaattcaagcaagagtcagtacaaataaattgtaccagcaagcaccaagcaaggctaatacactacatgcatggcatattcaaaataaagcttacattggatattttcagcataaagcatattttgtttgcaaagaccattttcaaattcagatttctttttaattaaatttcagcaagcatacacttagcaaatgggcatcaaagtagatgttaatcacatataacatagctccttattgccttccatggcagcaaggacataatccacaaatcacaccacattttgaagtttaaattcagcttatggaagaatagaacacaagtctatactcatgacatattcacacgccgctcataaccgcaagcacggctaatcgattagttttaactctgcagagtacgtacactttacccacatgatgcgatataataattatgcaaagcatggcatgcgatacataagtatccgatttattactcacaacaaagcccttccaaaattcatgatttagccttacaccagtacgatacgtgtttctccatcctaagccatattcgatatatgacctagaaccgttaagtggcgggcccacgccttaaacttaacgccgtggtggcggacacgacgggaacccaccacgtggcataataccgttgtattggacatgcttagtcacctaaactaccacatcagggtaaataggaagctcctctgaattattcgaactcatacacaccggcctaccagaatataaggctaaaccataaataatttactaagcttgggctatcccatactagcacatgtggttgtactatatacgaaatgaactatacgaagcgaactgacattgagtgaagtccccctatccgcacacaactaatcaccatatgtgtaccacataaggcccaaacctaaaatccacattttctaacattttatttaacaaatatcacattttattatttctatccagaccataaagtagatcattttatatacatagttgagccctggctaagcattttcatagacttgtgaccgcaaacatcataattaatgtgacaaaatgaattgttcctaaggctaggaataatggctaaggtcttttgtggagtttaggtggtaatgcaagttaaggagttgatctaataaatttttacaaagttttagtgaactagtgtataatcaacatgcacattttgcaatccttttcaaataacctccaaatcataggttcaatgtgatcaaagaggggaggtagcttgccttgctcttcccctccttgctcagctacgaagtgggtctcctcgtgattcgactgcgaatcgtctaaacatacatatgcaaaatcaaaattataaacatacataaaaatccaacatgctctaaaatgaatgtttttcatagattaattgtgttatgtgttacattgatttttagtgaaataattttcattttaacagttttcatttaaaagtttcaaatttttaaagtgtcttcatattaaatatagacctacatgcatttcggatttttgagacataaatcttcatgattttgtttagtcgaacatttttatgatgcagagcataaaaatatgattccaaaaaaatttagtttgtaaatttcagagttagaatgaattttctacaaatttctaaaattttaccatttttcagttgataagaaactagttttgcattttctctatttttctcaaatcattatctctctcgggtccaccggtcagtgactatatttttgcgcataagtccctgggttctcaagaaataggtcccgcagcctctaagcacgtgctccaggattttattcaaaaaggtgcttaagttttaagttattaccaaatgagtaaatggtcccacatgtaaagcgtctgtttacccctggagatttttaaatttcactaagccatgcccttgctcttgacagagcagaggagcagctctcccgcgagcttcccgacatcgccggcggtgaacagcggcgattcagttcaagctcccaaaacaaaaggtgtagaggacaaccgtacgaacctataggtagcttttttgcaagttttggtggtctatagcggcagttaggatgttagaagcggcggcaaagcacagcttgcacatgcatgccatgatagagactcgatctgtttgtgcatgtgtttgctgaaggtcctagggactaccagaaagctcaccaagcagcgaacacggctcagcacggtcttggcgatggagagctggtctggcagcggcgcagcggctacggttgtcgttggcggtacacctccggtcttgatctattcaaagagaaggcatgcatcgatttgagatggcacaagacagatttaggcgaaaaagcttgcgccgaagctcaccagagaaggaagaagagaggaatggcgtgggcggccggagttggggaagaagatggagatctcccaccatggttcaccacgtgcctattccttcgggattcttggtcaatgggtgctggtgaagatgatggcgagatggcttgaccaatggtggactgtggaagccgggcgacgagcaaaggcgaagcggcggtgtccagaacgcgacggcgttccgagttgacgtggtcgcgttcccggagattggctgcaccaaatgaggcgttcttggtggcgttagagagggtagtgagactggattagagaatggaaatggagctcaccggttagcaatggcgtcgaggacttctctcgccggtgccgagaatggcgcctctaaaacgtaggctctcttgaaatatccgatgcgatgccttgagagaagaatattggagacattgcttgacttttagcctgccagccaacttcagtatgagatgtgcccgtcaaaccactcgaaggcggcgaccagatgtattacacatttaggagactgacaaatggctaaagatctacaacatctcaaatatttttaactcatactcatgtgaatctaaattctcaggatgtgcactagattcacactttcatcttaagcatggacgtacatagcaaagacatttaagacgaaagggacttagagacttacatcaatttaatagttaagtaggccgaccggccaaataggcatattaaagaacaacggaagcttgactacccaatcctcaagcacaccgactaggggttcactccattaagttcacatcctagaagaagcaatcgaaacccgcattcacgatacgtgttaattcaatagcacgaaacctttacactacttaatttctagccttgcaccagcacgatacgtgttcctccatcctaggcatactggaaataatacctagaacagttaagtggcgggctcacgccttaaacttaacgctgtggtggcggacacgacgagaacctagcacgtggcacaatactgttgtattggatagacttagtcacctaaaataccatgtcgggataaataggaaattcctctgagttatccgaactcatacacaccggcctaccagaatgcaaggctagatatgctaagtagataaatcagcttaggccatcccatactaacacatatggatgtacgaataactttaagttggtgacacaagtttggtccttacggacttgggcaaacactccccctatcggtatgcaactaacaccatatgcacaccacttgccgcccaagtctaaaatcacattttacacattttagttcgcaaatactcatcatattgattttattccagcaaaggttcacatatcaaagtcacattttaattatagatggaatgagcatttgcatatttctaagcatggctaagcaagtagttgcatatacattatatataaacccatttgagcacaaggaatatactctaaccatttctaggggtacaaactgcaaggatcacaattattcaaggtagggaatgcagaaaaaaggtcatataccataacaaaaatttaaatatcgatatagtctaggtttgcatgcaattttgcaaacaaatattttcattcctcaaaccataggattcaatgtgttcaaaggatgggaggagaacttgcctgttcctcagaaatgttagcacctaagtaacctcttcactgtttaggcaattatctatataaagtatacgttatgcaattaaacactgaaataggcaaaaatccaaaatgctctaaaatgcatgatttgtgtactgtgggtaggtactgatctaacatgaatttaggtgaaagaatttttattttatctctttttatttgggagttattaattttagaaattactcggtatagggtaatatttactaggttacgtagtgaaatgtttttgtaaagtgacttttattatgtttgacttctctggagtgtagagatatattttattatgtttgacttccctttggtttcacaatttttggagttatcatgaattttctatgtactctacaagttataacacgttctaggcatatagtttctatgtgtatgtggctttggaggtttaggttcagaacttgttccatcttgctagtgatgtataaaatgaatgatttagtcaatcaattaaattttagttcacaaattttagagttgatattactctactacacattttgtaacttagggaatattctatgttaatgacttaacatatcaacctagagtttgttacacgagctatgttcatctaggttttagtgaatgaggatgaatctatagcttgtctagtctaacaaattttagttaggtttaattagagctagagtgcgtctatatatatatacatacctatgttttgcttaatcaacactatatgattagcacttgttttatcaaattaaggttcagagctataatttgtacaaaaagtgccacattatactttactaaattaaatttcactccttgctgactccatagaaacttggttcactctatatggactaaggatgaattttctacaaattgtataagttaaaggctaccttacgttggttattccttacataaatttttttagaggctttcattatacagtatgcatataattttattgtataacatggaagtataggttttggtgattctacagaacctgaacttactcaaaaaggagttaaaatgaattttatataaacttctaaagttcaccttacacaaaactaattattttgaagatattagttttagacgtatttggcttaaagtaagtatataattttatttctcctatctagagtgtgcatgttggtgaatctgtagaacttaagtttgttcaaaaataagttgagatgaattttggttgcattttataatttgggtatgctttatgtatgatttatcttggataaattttagagacaaaccttgtacagtgtgtcaatttttatgtttctaaaataaatttcataactttgtgaatctatagcaactggaatcatctcaaaatgagctacatttgattttatatggattttacaagtttgagcatttttctgcagaaaatgtaaagctttagtgattttcccttatattttcagattttaagttcatggggtccacatgccatcctctgctaatatacaaaaaggcccctatggttccgaggaatagaacccgcagtccaacatgtgtctatgccacagtttataaagagtccccatttttctcttgtattttcgctttagtcctttacctacatgtcagtgagtgaaatgtctcacactttagtccttacactttatcgaattcgtgaaagagatccctggcttattcctgtacaggaagcaatacagggcagcggcttggccgagctcgccggcggcgattgactgcgatttacgcgtgttagagtttgtgtcgaatatgtgtaggtagtcggttatagtttagaacttgaagttgtactaggtgtaggactagagtaagagtcggactctatcctaagatctctcataaatagaggggtgtgcctgttgtaaccgcatggcgacttaacatagcgagagggagcggctgccggcagcgaccggccgtgagtcgttgtaactctgatacgctgtatatgctggattggggaggagcgcccgtaatcagtgccccggagatgtaggcaactccgttatcaaatatcgtgcctcggtgtcgttatcatgtttggatctcctatggcgtatgtaggcctcggctgaactccgttatcaaatatcatgcctcggtgtcgttatcgtgtttggatctcctatggcgttttcttccgtgtttcgtttggcctacacaacccaaaagactagtctgataggtgagaaccgcccccaccttttaagtcgtgctcccccatcatcaattaccgatgtgggacccgtcacatcaacccatgtgaccccgaagacttgttacctggcctctccaccatgtgacccatggaaattgtatcttttaagtcgacccgtcacatcaacccatgtgaccccgaagatttgttacctggcctctccaccatgtgacccatggaaattgtttagaatgatgtgggacctgtcacatcaacccatatgaccccgaagacttgttatctggcagatttgttacctgcctctccaccatgtgaccccatggaaattgtttagaatgatgtgggacctgtcacatcaacccatatgaccccgaagacttgttatctggcctctccgccatgtgacccatggaaaatgtgaccccatggaaattgtttagaatgatgtgggacctgtcacatcaacccatatgaccccgaagacttgttatctggcctctccgccatgtgacccatggaaattgttccgggttctaaaccttgggctctgataccatttgttagagtgtgcagcctggcccaccaaccgtgggccacccaggtcacattggttctgctctaccacaagcccaattggagccacaactttaggtcctgggcctacacaaccaaaagactagtttgatgggtgaggatcgcccccactttttaagtcgtgctcccccatcatcaattaccgatgtgggactaaacccaacaacgcagcggtgcgaccagaagcaaaaagatgcagcaggtcattgcgaagctaatggtggtaatcttgctagctacggtggtcgtaattgacgacggcgttggtgcgagcgaaggtggttctcggcatgctaaggcatgtcgagctccggctcgtttctatgcgaatgggtgcatgcatgtgtgtctactgggttcttgggtactcattgaagctagacccgcagcttggattggtctgaacatcggtgacagtggagaagacgacctggcagcaacggaaatcggcatggcgacggcgtcgacgttccttcggtcttcgagctgccaaggacagggggggaacggcttagagggaacctatagatgctctacgagtgaggaatcgcgccgaagctcacccgagagcgaggaatggacgacgatggccggcggctggacttaaggtaggcgacgccgatctcccttacgttgcggcattggctgggattcttgagggatttccaagaggaggtcgtggtgatgatgatggccacgggttcgcccggatttggtcccggaggccggcgcgacgatggtgatgcagcggtggcactcggtgcgcgctccagagcgtcggagtgcgcggtcgcgttcctgtttaaccgctgcatggaatgggacgaaattagatggaacggagacggcatcaagagtagattgaggaacgcaaaagaagaggaaacgagcgcggctccatggcgttggcgacctttgtcttctcggtggccggcgatggagatgagggcgacggagccctcagtttggtcggctctggagtgaggagtggagatggacgacgcggctggaagagtggagtggagaaggcgagctccgcgttggacacgtcgaggccacgcgtcgagcacgaccagagctcggtcggctctgattcccttcgctctctctctctgtctctgttttcttgtcggctgagggaggttaacaagtgtaaggacaagccagtgagattgtcatgagggatgggtaggttcttgactgaaaatcgattttcagttatttacaggattatttcttttcccatcttcgttagttcttatattaatttatggtgtagataaatccatgtggattttactggaggtaggtgaatatacctagtttttattttttttgggttgcactaaaaaattatgtgtagtttgctctcagaaaattagagaaaataggcttggtgtaaactagtttataaatttttaggaggtctaaacagatgaaataaattctggaaaaattatatttattcatgataaatggcctttcactcatgcacttatatgcagtttaatgcgtattttggtgagggtatgttttagccgattaaggattataattagcctactatttgactggtttgactgatttatttgaggtataaaatttagttattaaattgtacgaaaattagagtgagttgtatgtgttaagtagagcctacatgaattttcccatgattttatcttactcaaattattttagataattagcaagacttatctttatatatgggttttcctcctcataaatgcatctagctatttataaaaaaatatatttggaatctcttgacctaaggtgaaatcatttaacatcattttcatgtctttataattatttgctcaagagtggtgtcgaggagagatcctctctagtgggtggtcgtgagaccccctttgtgagtttggccgggggagatggcgcgatgatcaagagcgtgcttccgcttgcagtctagccgctagattgctacctagcctctgtgaaagacaatggattatataggttcgggccgctatcgagagcgtaataccctactcctgtgtgtgggattatggttaacttttacaagagattttgagctctaagggaaacccagctgttcttcctcatgagctcaagttgtctgagagtcatccctttttccggtgggcgaggtcctccttttatagttcaaggggataccacatgtgccgcctatacctacccgtccgtgaaagggggacccaccttgcctgggtcagacggccgtacgtgccttcaaccagaagcaaggtggtcatgcgtccttgggtggggtccaacgccgtcccccgcctgacacgggggagatccctgttattcaccattaaacgcatggagactttgaaggctcaccatgcgcggagggcgctcctaggaacatgctgatgggacagggcatatctgcccccactccgcctgacacagagcggaacgtgggggcactgccacccgtcccatcgtccgcgaccagtcaccgaccggtcgtgctcgattgacaggggtcaatcgagcggcgccacacgcccaccaacaccgcattaaatgtggcgcgggacggttggggcaccgtgcattgaaggcacggagcagtgtctcctgctctgcctgctctc

SEQ ID NO: 24064 - DNA, 5588 bp, Oryza sativa
gccacgtggccagacgggaaggcggcttccctctactgtgcgtacccccgggcccatatcaccgacaagtggttataggtttgattagtgaaattttatcttttatttatgctcatgaaacctaatatgcaatgccaaccaaaaatccaaatgcacaagaaagactcaaatcaaaacatgtcttatgcaagtatgcatgcttacacttgtgtttgcatctatgttataggttaaagatgaaaaggttttaattttttcttaaattttacttcagtaaaagttgggttgaccacacctaagttaaaaatggaaatttctggctctcaaaaaatggaaaagttagcttcctactatttttgacaagaattccttaaccctagaatttgggtatgttaaggggggaggtgcggcctgctgtcgacctccgtaccgtcggcaccaaaatctgtaccgtattgcaattgcagatcttcatctccttcctcaacgacaggaggggcagatacaagagttggagggggatgccgcagcggtggacgagaacttggtgctagcctaggagttatgttgatctgaatgctatgcttgggccattgaataaaggtcccacgtgcagctccaagggtcataatctcgtcatttggtgggtgcgagagagtgaagctaacccaatcgagcttcactaagtccacttgaattttgccatgcccagctagcagctgcgccccatgcattcgggtctctggcgttggcttgaacgcttgaccctctgcggcaggaattgcaaatgcatgtgtcaccctaacaactagggtgcatgatgtgagttcctgagatacattgatacgtatccttagaatatgttagaacgtattgtggtgctaagacaacaaatgcatttatttcttggttttaccgttatgtggtccaccgcggtgggcccttctggttgttctcccgctgcctcagttgatgcgcagctgctacgcctctgcgtggggctcgctttcccttaagcatgtctccacccgagccttcacttgcaacaacttctcatcgaactattctctgagctcttctctaagctccgcacgaagttgttccttaaggcgtgcatatttctgtgcctttgaaagcttgtgcttcttgtactgccacgcgtattggggaaacccaagcttccagggaacactggatccaattccccttgtccgtccacggtgttcttcggttcccaacgctttcgtgaggacgtcatcctcgcgactttgtgaggagacctcttgggaggactgtttctcaacagtcagttcgacctgtggtacagttaggatgaattagatgaagaatacgatataacctaatgaaacttattctatgtgttgaacttacgattttctggtacaccgcttgatcttagggatttaggaacgaaagtgttccatcactattcttcttcacccttgcccttgcccagtttcttgcccactgcaccgggatatcaccaagcacttgcggggtgttagattccgcagtagcttcatcctccttatcccattccgcctgtttccccgtgtagtctctagtgcgaagccggtgcgggtgaaggttctttgcctgcagctccctataggcctcacttcttgctcaagacttaggggttgatttggcagcatggaactcttcccacacgacccgggtgatgaacgggtatttaacaaatggttctgactgggcagggttgaggacgtagtccgtgaccagtgcggttttgaaatttttctacaagttccccatcttgcggatagcctgccgcttgagtcttgcctaggcctctgcagggtactcgaagctttccttgaactgcttccaagcctcttctttttctgcctgtgggaccagaccgatgtggtcctctagaatggtgaagttccgcctccctaggactccgcatatcgctgggaattttttgacagctttcggaggagccgtcggaaatccaagctcgtccacctctgttatggtgtacacttacttaggaatcctattttgggtcctaggagcccagctcgaagttgtcccactagtagtcactgacattggttcgccttgctgcgacattgcctatgtaactgttgtacgggaagaaagttttaaaaaaagtactaagcacgtatatcttcataaactaggaactacatgtgtattctacacaaattcacattgtattccctgatggtttgatagacctctatgtcgtacctgcgttcgcctcatcgacagaacacaagcatggactctctacaaggttggagcagaggagaactcggcctcgacatcagtgtcccgctcgaacttgctagcgacattgatagcaagttcgagcgggatactgatgtcgaggtcgagaccccctctgctccgggcttgagaaacattgatgctacccgtgtgtgcaaggggtgcgaaggggtcactggtcaccaccctgcccctttctcatttctcccccaaaacgaaaatgctagggtttgttgctgctgcattgctcatcgccgggctcgacctcggccaaattcaggaggaaggagatgggcgggaggaaggagaagacccagagaggattttacatcaggaagctcaccgtcgcccttgcctcgccatcgccgatgtcgcccccatccattcctcggtgtccgcgctgccgccacataatccctttcgcgaccgacacctccagcgcttcccatcggatctggccgccacgacggtgacgggggcgaccagcagcaaccagcagcaacaaccatcgccaccatgacgacggtggcgagcagcagcagcaaccatcgccaccacgatgaccacagggagcggcgtgccggtgcggctagagagtggtggagcaaaaggagtggcgagcggtgggagcgatggatgcggtgattacgatgacagcgaccagtcgggctcggcagagcaggctgccagcggcaagggccgtgctcggcggcgaggagtgagagggtcactcttttttttttctaccgttctcattctctatgccgtaattagtcactaatataagatatactgtgtaatagtactacgaactccactacatgagctcaaataatgaattgttttacccagaaaaaaagatcctcatacatacggttcatacaaccaaccaaacaaactctcctctaaaccgtatctcttgtgcagacaaccaaacaacatctcatactagccaagctagactaatgcaaacaaccaaacgactgcatgtgtatcccattaattaggataagctcaacctggataagggagatgagccaggctagacagatacgagcaaccaaacacacccttaagtactgcaaatggttaatcaccttgacatttctcttgcataatgccatagcaacggctcgagccaccttgtcaagatttcctgcaagaataacttggtctgtccttgaggctacactattggaaaccaccgcagctgctaggctgctgccctgccatccacaattctagtcctcaaactttggctgctgctgatgaagataatgttctccgtttccattgagattacgtgcctgttttcattgatttataaactcatattcttgtcattttcgtggccttctcaggccaaatgtatatatgcatgattattcttttttctcacctggtttaggagtccaaggctgaaaactttagcacctcttctgtcagcttcatgtattgcctttccaatcaagtcgttgatagctttattctccctttttaagtggtactacacaaacaaattagatgcacgttcttaggatatactactctttgtccctgcattctaattagcataatcatcattattatgaatgatcagatattaattcttacatggaaactgtatcttggtatggcccatgtctgcatgttgaggtttttatctaggacacttctgtcgacagcaaatggagaagaactgaacgcccaggtacacatggcgatgagccatgataggggtgacaagatggttatcatggaccagttactttgattgtatcctctagcagcaaacatggagaatccgggcctcagatgataaatggattggaggtcggtgagatgcgtgaggtgaaccacatccagggatttctccttactgatcttgagcatgctctcgtatagggtgctagatgatttatccatggtattgtagatataatcgtagaatggcatgtaaagggagtaatttgtgcggaactgcgtgtggtgaagagaatgaaacctagcagcggaagaccaaagttcaaattaagtagaaacgattttgtaatgtgcatgtaatgtaagtataaacaacagtttggaatatcgatagagatcaagaaggaacatgaggtacttacgaaggggtgtacataaggtacttgaggggagggaaacatttgaagagataattgggaaccaactcaaaattgcagtggcccaagttgttcatgaagtctatgtagaatatgtaaattgcatatgcaaggatggagatggttccagtcaacaagcatgtgaccactgggattgcaaaagtacatcataggccactaactctgcaaatggatggacgacagctgaataggaataacggaatgatcatattagtcattgataagctcaggttgagtaaccaaaccccaaagaattaaattgaagtgataggctcgtgtctaagagagcatgagagttttttttttctcgaatacgtatgagagttgcatatcattgcattaaagaagaagaagagaggtgtccaagacgcaaatacaaagaaccaaaaagcaaaacacaaaaagagagcaaaagaagaacaaagcacctcaacaaggttgtcccaacaacctaatttaacaagtcttgttaactaggatcaataatcaacgaaaacccttggctcgtctatgttagagtgtgagttgtgaagtagtttgtgtttggtttgtgacatttgtcaacaaagcaattacatcagcaaaagtgcatgtcacctcgtggttgcagtgacctaagtagcatcccaagaacttgagttcaaatcttcatagaagcgaatttcggattgggttgtttgaggggctaagttcctaattttaaacagccccactccggtgctttctactcggagtagaaagaaatctgggccattgatcgtatttaattgtagggctgagatctagttctactcccaccagtattagtggaagtagaaatgtgaaagggtgtttttgttaagggaaaaaaatcgcgtaggggtattatcgtattttttcagtctcttactcaccctatccctatccgattcctctcgcatcatcaccatttcaccacttcccgtcgccattcccctccatccctgcctccgtcgccgtccatctccctcgccgcctccgtcgcctgtcctggtgtctgctccccctccagcgccatcgccttctccgctccctcactgccctcgccgccttctcccccgccagcgcccctccatcgacgtccgcctccccgcctcccccgctatc

SEQ ID NO: 24065 - DNA, 7164 bp, Oryza sativa
cgccgtcgcggttcacccctcctcatcaaccgccgcccccttctccaccatgccggtaccgctggtgtccacctgcatccgccgctcacgtcgttttcctccgcgccactagcaatcccgcgttgatctcctccaagtctccctctagcaacctcctccttggctagtggtaagtaaacgagtcaaaatttcttactgttatgattttgcagataaaggttgtctgttcttcaatccattgcattgtattttgattatttgattgaatggttgggagcagggtcagtttgcaagatggtggcatgcgcgaaggggatccgcatgccggcgaaggggttatcggtgttcaggtgcgacgttgaagtagatgcacgtcggtgacgtcgacagcttactgcattgagtcaccccgaagcgtaaggtttcatataccgctccttctcaaatggattcaaatatgaactataaatattatctcaaaaaggcatcaatgtttgggatccgtcaaatactcaagtagtatctaaatgatttaataaggggaagagagcatagtaaggtaattgtggtaaatgttcgacagataatccatttatgtcgtggttggtagtagtggacgatctttaatcttgctcagttcggagttgatcaaaattccggctaagtcctgtcgaaatgttttcacatccttctgcataatgtaaagggagtgcattttaaatcgtttttcgaaatgggaagcactggtgcaaaatatgaatagaggtcgttgtagttgcctgtatttgaattcctgggagataagattcgctccaatgctccatgaacttaagggtgtacaggccacacgagacgctacaagaatttagtcgttaggctaacacgtttccgtaattgaataatgtgaatatcatgtggaagagtttgagtcacccacccatctccttgctttggcaatttttggactttgttgtattcccattcggtaatattgaaaccaggccaatcatgttttaactgtgggtgttgattctctgtcccgtgtaatcccctctcgatagctagcagctgggaagttttgtgcaacgttggtacggtaaaaacatagcaaaaccgatttgaattatacaagtggaagtgtatcgcttaccacacgccttagatcgggtcgatctttactgattggctttgcgagcgaatatagtatttgcacctcacgtcgcttggcgttaagaacggctaggtaccagtgtgtatctttaatattaattaggaggaaaatctgcagatgttcaacagtaagatagagtcataaattgaattagccattacatagatagcttaaataagtattaccatgtcaaatgctagatagtcgcgtgccatatctctaatccatcgtttatctcgaggtttgcttgcttcgacatgcgctccctctacatttagtagacctgttttaatggccatctctaggaaggccttgccatctcccctgattcctttctcattatagcggaggcattggatgtatgcattcatgacctgaatttgaggttagttgagttacataacaaatataattataaaagaatagtaggcttgttaaataggcgaacttacatcatcatttaagaattctggttgtgttagtacattcattcttatccgtttaacctccacttcttcaatatgcaccatcactttgttatcctccgtattattaatgtaggtaatgaaagggtcttttttttagtcaactctacgaaggtaggacaaattagtaatagatctgtagaaatgttaaatggttaggcattaccttctgaattttttaatggtgtctggccattcatttttttcttcttttgacctcgtaaggcgttctttggtgggcctttgtctatgattttttggtaagatcttccttctcgatgtacactagaaaagggtaagtcaaatcagtaacacacaaacatagaatataagtaaaaaattatggatgatgtagagagttcatacattcagatatttcattcggtgtttggttgttttgtttcctcttcttttcaccccgtaattcgtctgtgtctggcatgttagcttctttatccgtttgcgcttgaaaaggaggaaagttagtaccattgacatgagcatatgtaactattaaatagcataatacctattgttttctttgtctgtgcttgggttctgattatgtccttctttttaccccttgtttcgtagatgaagtcagtccgattagtcagtttgtatgttcttcctgtaggacctgtaagcctcttcctgctttgattgctctggttactgttgtcctgttaggtaacaaagtgcacgttagtattatgataagttgtagaaacgttagcgagagaattaaaattcagtttaccttcgtttcacaagtcatgtttacattttggtttatataggactcttcgttatgatttgatacatgctacctgggatcaatttgttcttgttcaacatcctacaatagcgtcaacctttttttagcggtgttacgtaagtaataatgattaatagtctagcttatcatctttacctcaaacacatgcgtagtatcttttcgttctaggcattttgaatcattttccatgcaatctagtatcaatgatcgcatacgtggccaaaaatcctttgtgaaatcgttgaaattatcttgtaaagtttggatactttcttgtaaagtgatatcggctgattgttcagtggatgttgtagagtgtacttgaatagcacaagtgagaaaaggatgtcaaacatattttgttaaatagagttcgtattaaaaccccataatatatacctcttcaaaagtgcatagaaaatcttcattggtacgtgcttcgagtatatcgctccaatatttccgtttttccgttttttatagatatattcttgcacggttcaaaatgacagtagagtatatcgttccgctatttttccatttttccgttttttgtttacagataaaaggatggacaggtaccgatctcatttacattcttcataatctcctttctccccaatctcatcttcctccgtgtgcatctcttacttcgtcaacctcatcttcctccgtgattgcaatatgtctggttcctcggtatatcccgaagcagattccgccgttcaggtatatcccgaagcagaggtgagtgcatgttcatgtatacacttgtgagttctgagacgtataatagacttattaatcttcgattactagttgccagcaatggtctatgagtacttcggttactgcacatcttatgctgcctagatgttatcctttttcttttccctatgaatagatctactctctttgcattgcgtgtactgtatcttagattcattggttgggtccaacgcactttccctggcctttatttagctcggatcctgtttacattgttttcaagcaatcaatcaccaaattaaaacagatctgtaaaccctgattacatatgcgatcgacttttggtcctagtcatctggctgtcacttaattgtttacgatttggggataattttcttttctaattcattagcgatgagagcgccgtacattgttgagagactatcattaccatttgttgcactggcaatttgctcaagtatatcgacatattatgttatttcttatttaacctagtgcttaatttgttactgtattttttgctgtcttctgttttttctcttaagtatcaactgactcaaaaacttgcatgaataacctaaactttgaccacaattttcttaaccattagtccacacaaaatgtttgttgtgaaactaatttgccatttgtccacgtttgacttttgtaacaaaattttggagtattttaagtttttattttattttttcttttaggaataagctagattatagtatgttgtttcgtattagtaaaacttattattaagtcgcagaattcaacagccaccgaaacaacatcatcactacgacatataatccgtcaaaatcggtcgatgtcatgtgttactagtcaagtttgttaattggcacaatggtttatatgatgatgaactaagccgttgattttttttccttcttaaatgcagcttgatgatttaacatgtggcgatgaaaatatgttagccatgtctaatgttctaaagaacaaaaaatctgcaaggctcaaaaaccttgtgttggctagaaattcattttccataactgtatacaacataaatactttgtcaaatcttgtttatgttggaagggtacaaataactgtggatggtgatggccgtcatattgtatgtaagtgtgtcattacttgttttctatttctgttgctacaaatctgtgtactctataccttaacttgatgctattatatttgttggtatagacccaaggaatgcaccaacggcagaagacatagctagtggaaaggtaaaaaacatccattttataatgaggacggattttagggactggcaggtatgtagtcatttttatataatattgttaatggtctcctcttcgatttggttgtccatattttaattcaatatgttttaatcttgtttcacatttgtgggtagatgatgaaagatgtggttgtggatggcgaagagctaatgcacaaccctcagctcaccacacatggcaccaatgccagcaatacgtcacaggatgaggaggcggcggccaccaccacgtgtgagaaaatggagatgcgggaggctcaccacaagttgaaccgtagtctcttccaagacgatgacaaataattacattcactttttttttacgagaaacagcatgagaggctcctactgtgatatattaagaaatataaggagtttatatacatcaagggaaaaataaaaaaagtaaaaattaaaataaaaataattacaaaggaactaataacaagagtctagccatgattgaaatgggggtctgtcttcttccttcactctttgcataagaagagtggaattttccttaaaggcaaatttccaacattgagagatattgcaatattgtcaaaaatgtgagcatttcgtgatgaccatatctgccagcacaccgtgcctattacctcaacaaagaatggccggttcaatgcatgataggctgactgaatcatttgcagaaattccaaatcctcatcccagttgatacctaggagattccagcatgacttggcaaaaggacaagagaaaaacaagtgtaccatatcttccacaacccctgaagtgcacatcctacatgaggggccatcttggacatgcaattgcctcctttgcagcatatctcgagtgtttaatcgatccataaaaaggagccagagaaatgctttaactttcattgtacacttacttttccatatcgaggtgattgctggatgaggggagaggtgggcaaaaaacaaatcatagaccttcgttgtcttgaaagttgcccctcaggagtaagaccaaatgtctagatgatcagtgagattgatattttccaaaaggcgtgaaagttcagtgaattgctgtaacgcttgagaggatagtggcaaattgaaattttgtcacatcattctgaacataattttgtactgtgatatcctcattgatagcaaaggagaataatgttgggaaagcattttgatgtaggtcttctgtccatgggtctttccaaaagagaaccgaatctcctgtgtttatctgaattttactaacccctctgaagattggtattaaacgaaagatatccttccaccaaaatgatcctctttcctgcagggcatgcggtggcaccgagttgttactatagtatgtattccaaatgagcttcacccagggcagatccctcttattgtagaatttatccagatgtttcattagtaatgcacagttttggaactccagatttatgatacccattccccctcttttttttggtttacaaactttgtcccaggctgctagggacagagatctagcatcaacttcactggacttcctccaaagacaatgccttcttgctctgtcaatgtgctcaattacttttttttgggattttgagagtgcacatgtagtaagttggaagggaggaaagtacagagtttaccaaagttagcctctgcccttggttcagaaacattgttatcgctgggagcctcctttccactctgtctataaggggcgcaaagtctgcaattttaggcttagttgttccaacaggcagtcccagataagtgaagggtaagtttccaatttggcatccaaaagtttcagccaggatctttgaattttcttcagatacgttgatcggaatcatacatgatttgtgataatttatttttagtccagttgatgaagcaaaagactgaaggatgccctttaagcagaaaatctccttttgactggctttcatgataataagagtgtcatctgcatattgaattattgggaacttagtatcaggttggggaataggcagggagaggatgcctatttcgggagctttgtttatcattgattgcaacaggtcagcaaccaaaacaaagagaaggggagagattgggtctccttgtttgacacctcgaaggcatttgaaagtctttcctggcactccattgagaaggacagaagttgtggaagtggttaggatatctttaacccaatttatccaagtgttagtgaaacccttggctttcagtactgtaagaatggctgagtgttctacagagtcaaaagctttctcaaaatcaatcttaaggataagagtttctctttcgctttgataacattgatggatatattcaaaggcccatgccagacagccttggattgttctttgcttgataaagccatattggttttcatggatgagatcgaggatgactgcttgtagcctttctgccataattttggttagaaatttcgtgctagagctctggagtgagattggtctgtaatcatctacagattcaggtgatggttctttggaacaaggcagataaatgagctattcaggttctggatagaaattttctgtccaaagaaatcatgggcaagtttacagtaatcttcagagatgatagaccagccttttttcatgaataagccattgaacccatctagc

SEQ ID NO: 24066 - DNA, 26072 bp, Oryza sativa
tctgttggcattgttcttatcactttgtcaatttcttcttttgaaggcattgttgacaggtctgataagtgattagaaggatgatagaggtcttgcagattgattatcatttgataaccatttgaggttcccattctggcttgaaaacagcttagaatgccagggccttctcctggtgagaggtgacaatgttaccatcatttagtgttaaatgagaaaacttgttctgtctgaacctttgcgttgccgcagcatggaaaaatttggtgttgtcatctccaaatttaacgcacagaattgtgcaccttttcttccaaaagatatttctgaagtgcagaagtttgagcacatgttttttagcaatagtcctgaaattccattcttggatgaacagtggcctgacctcttcaattttatccaacatatcaattgcttcattggagttttggattaattgatttaaatttgacaaccttttactccaacgtttgaggcctcttcggacatttttcaatttcccattaataactatcccttgattagttgctctgactgggatatcccaaaaaatcttgacaacctccatgaaaccagtcatatcaacccaatagttctcgaatctgaagatgattgactttggtatagaggtttcaattgaaataacacatggtgcatggtcagagacacatttgttcagagcagtgaccattgtgttgggataatgagttgtccaggagggcgaagtgaagaaccaatcaagctgttgaaggagaggctgactttgcatattactccatgtgtaggttctgcccttgagaggtaattcttgcagtccaatgttactgatggcctcattaaaaatcatgatatcattcatatcgccaccaggcaagtttctattttgcattgatcgaatgaagttgaaatctcccatgagcagccagttttcatcaggttggataactatgccatttagccagtcaacaaaatcatctcgtaaatctcctgaacacggcccgtaaatatttgaggaaccaaatttcattgcttgatgctgtggcagtgaaatgcatagtgattgcatatgggaggctgctaattaaagtgccagtaaataggtgactgttccaaattacaatgagccctcccgaagctcctagagaaggatggtagcaaaatttatcaaaccttttaggggcaaacttccttatatacgagtgatcaaaatgctcccttttttttcttgtaaacagataattgcacaaccactttcttcaatcttttgatgaatagccagccatttctgatctgagtttatcccccgaacattccaacacaggatattgcaatttctatttcgtgaggttgtattcatttgggcaaacaaatttatttaggaagcagggaagtaacacatgtacttcataagaaactaaccataaagatatgatgtttttcatggagctgccagtcatcactcagaaccataaagagaatctaccctgtgacaaagaaatagtcttggcccaataaaacacaaaagacccataaagttgaggataacaaccctgataaggaccagggcaagaaggctaagcatagccaaaacagaatttaaactaatcattcttgcgctggaggagcttgtcttcagccacttcctcaggaagcatgccacatttctccacgcctattttttgcagctgggccactgggatggctggtggaagatggttggacctgtcctccttgctgggcttgaaagctggcaccatcggcttcaccttggacttctttttagggacatcacaagttagatcaagtttctcccccttgtttgcaaaccttgggcttcttctcagaccctcaacagagagctgggcctgtttcttctgcttcctcactctcacaggcagggaaattatttctgtcgaggcagagctgtagggaagagctcttgcgacatttttttccagcaatagagattctttgacgcttagcaggactttgaatgcaccaagggagcacatagggaatgacaacccagttgatcttgacggtgttccatggaatcgtttgggtgatgcattggaacatagtggggttcacagccaacagaaggagtctgaatactccaaatgcaactgcataacagaacttttcagggaacctgaaaaaaggcagttcagggattggcaagctgtatgggactatctgaccagatggctgcttgatgatctgaacagaggatgaagattcaatcattgagtaatcattgaaagagagggacagctgtggttcaacttcatccagttgattctgattatcctgatccatgtcatcaattccaccattttcaccatcaccttcagggttggcttgttggagttgtaggtccagttgtaactgttgtatctggtcttgttggtcttggataacttcccaaatggctggggcatcttcatctccaggcagcatatcaacaaaattgcctgtaaacacatacgggtagaaagtccaggattcccctacacctccaagctctgcagtgtgccccatcacaattttttcaggcacttcatgagggacagtatatctaactttgacaagaaccctacccaagatcctgtccgtggaatgccagcgcataagctttccaaacttattcacaatttgctcaataatggaataggttcttagcctcaaaggaatacccaaaatgatgacccatccttctctattgtatggtctgtttcttctgttagcaagttgatcatgtgggataaaattggcttgcgcgaggttttgttgcatgatcggaccctcatcaaccatagcatctctgtgaaagacagactgaaattgaactatacaaagggccagggggtagcgttgcgccctaatgaccgaatgtgacagaaatgagtgacaaagtgaatgatctcattgatagtctggttcactaagtgctcaggaggttggggctcaatcagaacaacagcaaactcttctccaaggttctgagggatggactgaacagtgaaatctgaccttggtattctggcaatccatggggcttccacattggcgccaggaggaagaaagagctccggccgaagctcagcatcagtatggttcgccatgttctccgcccaggcaatgggagagaccaacaatggggtggtgggttttgggggaggaggattactgggaggaagcatgatggaagggcgaaaagacgggggagacgaggggtcctttccgagcaaagcaagattagtttccttgtcagagccctctcccagacgcaaatcacgaagcttctctcgccaatgggctttccgctttacttttttggcccaacaaaaccgactaaggtgcccatagttgtaacaggcccaacatcttatttgatttttacaagccgagactaaatgatcaggaaagagacagcgggagcagatacccggatttgttccctgcaatcactgcaatcctgcataagccgtctccgaagaaatctaagatgtgagcttcacattgggaggatattttttcaaaaagttacgagatgttcatttgtcaatgagatgttttatttttaatattctaagttagtttgctcggatgttcatttggaataagctagttgataaatatttattaaatgatactctatttggatatttattaaatggaactctatttggttattcacgtgtgagatgcctttggttcagtgcacaaatattgcacctttggttcagtgcgattcttctttcagtccagcagggttgcattcattcccgaacctgaaatatgaagatttccgttcaaaaattggctccaacagagtccctagcgaagtatgtggtgatgtatttcctatagggtatacaatatatataatttttatccagaaaatatataaacgtgttcaagtaaaacaactggaataggatcctaatttcatcatccaggaccaaatttcagaaaccaagcagcaagcagtcaagttaggacacaggaggtagttcaattgtgtaattttctgaaaatggattaaatcgatctcttctgtatttctgtaatgtttctgaaaaagacatcttttatagttctaaagcatttcagcttatttgcctctgtacacatctaaaataaattaagtgcctcagtttcagagtgtaatgcatatgcagagatggccatattcaggaagacaggtttgatctgctataaaagagtatccatctcacatattcataatcaagctataaaagattatccatctcacagattcataatcctcaaaaagggttacttatgcactgattcagggttttatgctcttccatacagtgtgacagtgtgtgtacgtataatttggaaaaacaaagtgcaggtttcaggatgaatgcccaaatactgaagaccaaacatgtggttttgcaggattcagtttcccttaagtgaaatgtgtctcactaattaaccaggtgcttaacattcatacgtgcctcctgaataccagatcaaactcaagatagtaccctctgttatttgcatataaagatggaccgaggaggaagagaaggatatgctttctcctgcatggagggagaaggacgtaaatgtcatgcatagtttcatgtgtaaatgaagccacaataaatggagccgaaaatcacctttcagcctttggcactgttcaagacaaatcccacatgtgggcatcatggatatcaaaaaatgcctgcatgaacaaacaattttatcagtaaggttatttcgattttttgtcattaacgtgacaaactgagaccctgtttagatgggactaaaacttttaagtccctatcacatcggatatttggacactaattataaatattaaatgtagactattaataaaacccatccataatcttggactaattcgtgagacgaatctattgagcctaattaatccatgattagcctatgtgatgctacagtaaacattctctaattatggattaattaggcttaaaaaaattgtctcgtgaattagctttcatttatgtaattagttttgtaagtagtctatatttaatactctaaattagtgtctaaatacagggactaaagttaagtccctggatccaaacaccacctgaagagatgctgcaatatgtacatgtactatgaatgttacacacggtatgaaagacacaaatacatccaccatgaaaaaatagcgtaataactctgaacaaaactcagcaccaaaataaacttccattttatcaagtgggagtactctctcgacttccagggatttctatgagaagacaaaattgcaacctctgaaccaggaacagtaatatatgattcaacacaaattgtataagaaagtttagtagacaactttcctaatccaaacgcatgcaccagggaaaatacttaatatgcgcatcttgagaaaagattaaattaatccaataaaaaacaatgccattaatacaaaagatacaaagtttgtgaggcacaataaccttattggttttttgtgtgcaatgtctcacggaatggccttcgtctctttgatggagctccttttgccctaatctcatcaggatcacagaccctcttctctaatggctagttactagatgaaaagtgagttggcataggagcaaaatctccagccacgatgttctcatgggatgacgatcctttatccaaaatcccatttaagaaatccatcgctttttctgtctgctcagggttcctagcatcactacccagatttcggaggctacgaaaacgaaccatgtgttcagaccacacattaggatcggtattcctgtctgacctaaatgccgccattgctcccattgtccacctatccacgacacaacaacgagggatggtgtcaaaaccaaggaacttgagtacaacaaatatgtgtgagcaagggatgtcttcgcactccatcttccggcagtgacattccacaccttccaacgcctggcctttaaaagtaaccctcacttcatcccacacctcattatcgtccttcaaaccaacaacatacagtgacgaaccatcttgattagtcccacttatgacttcgagtccagcaattagccatatctgtgcacggactttcttgaacacgattgttgtgaatatacgggcagtgtctttctccaatgggtcggcgtctattctacaaaaagggatcgaattggtacacttagcgtccaactgagcctccttcttacgcagacgttgtatgcacaacttaacatgtttgactaagcacattagtgacatatttctcttcagaagggtgtgaagctgtgagttcagtgactcactatgttggttgctgcgcatacccaacaagtatttcacatctgtataggtagcagcccacttctccctaagtcggtacatcagagcgatccattgtccatttcccgtgcctccattctccttaaaatcagcccaacgtctctcgaactcctcctcatccatactctcataaattaattttcttagctcatcgagttttggcttacgaaggtgacgactcatattctcctctatatgccaagtacacaatctatggtaagcacccggcattaccttactgatagcctttgccattgctaggtcgccatcggtaattaatgattttggatgcacttgacgtattgcctccaaaaaagtctcaaggagctaacagtaagagttgacagactcattggatagaattccgcacccaaaaattgttgtacttatatggtggttaactcctatgaaaggaatggaaggaagattgtacttgtttacccggtaagtgctatcgaaaataacaacaccaccaaaagcagcatagtctaaacgagattcaacatctgcccaaaacacattcctaagacgcccttcctcatctgtggtgtatttgaagaaaaattctggatcttcttcttgcttccttgttagatatttcaacacatcttcagcatcacgacccttgatattcttcatctcgtaccgagtaaagaaattataaaggtccttcatcacaaaactaacctcttccgactcatcgtggttattctccataacctccatgattgaaagggcgtaaggccactcatgcgaagctcgatcgcttgggctttcttagaatcagtcatcacacgatgaactcctaaaaaagcatcatggtcaggatttgcaagttcgagcgtatgttggttatcaaactccttaacaaaccacatccccttctgctcgttccgctcaatctcaagcttagctaagcaaccacagcgggtcagtgcccgtggctcccttttccactctgtcctctcaaagtgcttcaactccctgtactctttacatgagcatacgaattgcctccatataatctcaccgtccttccgcttcaagttgtttttcctcacactgaaacccttaccctttgcatagtctaaatagaatttgtaactttcctcctcgctttaaaaaaccacagtacccatcattttatactcttcctgatcctctaggctcacatagctcgaagtcattatgtcagacctcacctacggaaaagtaaaaaaaacaaacagaacaagcacccaaatataaccttacgtcctttatacctcataagaataaaaaaaaagaacaaccgtcgcctgcataaatacattgccaatccaaagaaaacacgggaaattcacattaggcaattcagttactgtaggactgcatataatatctgaggttcataacagggcagagtaaggatgctgattctataaataatctaaatgattacaagcttacttgcatccagcgcttggcactcaacatctaagtctccaaggtaaaatgggtccacctagtactgtaatacaatccttttaagtctgcacttttggggaaaaacatttgtttgggaaaagacaaatcatgattgtttaatttatttttcactattgttttgtgggagtgggtgggtagttcacaatttcatctatccagttcaatcagtgcaccttcacattcagaattcaaatgggtttgagaaagttctacaaatatgtcttaataaattcacagataaaagaaaacatcttttacaaaaactgcaagaaataatttcatcgcaagtgtacttctgaaatacatgaatttctcaagtgatttaaagtgcattgtgttgccaaaaaaatatattagctaaaacaaaattaaaccaagacatgacacattaattgtcaccttgttttcttgtgcagaacaaaaaccaaattccacttttgttgggacctaactacacaaactgttggtacatagaaagcttgcccaaaattaaagattgaccagtggaagtaatagatgaagaagagtacctcactaaacacaggatgacaggaacgtgtgacttcttcccagcatcgtcaagcagcacctgtagtgatcaacccctgcaaggcatggagcaaaattgaatcacacctgtagtgatcaacacatgcactaataaattaatacaatgcactactactagtactgatgaactagctggaaatgctggatgcattaaccagttgacaaggcaagcatttgggagaaaagatcaaagatcaattgcacaagatatgatttaacttgccacctttgctgaggtttaatgctagacttatcagtaacacatcaattgctgcaaactgttttgagtggaatttgaagtgacaggtgtatttcatttgcagctcgagaccaaaattattgttcagttttctttcaaaaaaatattgttgttcagtttcatcgtttatgcttacaactcaacatacaaaatcgattaaatatatctcctattcaatttaacatcagctagtgtagattctctagtatagttatccatttacaagcaagttgatgcatttatagaggaaaaattcagacaagttcaccactgagtagaggaaggggaacagaaagtcaggatgggggtgggatgggaggagtggatacctgatgatttcgccgcgcccagctgctggcagcgccgccgcctgcgtcggacagatgcgacgcgccgcgccaccggccgcgacgccgcctgccgggaggaatacccgccgggcgcacagccgcctgccggtgcctgcctccgaccagatgtgaaccgaagggggagggtggagagggcggggccgacggacggcgacggagggggcgagggagatgtaaggcgatggagggagcggagacggcggcgagggtgggcagggcgggggaggcggacggcgacggaggggagcggagaaggcgacgcaggcggaggagacggccggcaactaaggaggcggacaaggcggcgacggcgagcgataaggacggcgacgaaggcaaggcggcgaggccaggggaggaatagcgcgacagagtccacacctgcaatgcgaaccgatgcgaacatcccataccaaaattacccataaaggatattaggagattacttaactaccctttaaaataaactatacagattaattctactcggagtagaatacttcaagtatattgcaccggagcatcgctgaattttaaaaggctgcatatatccgattggatgtagagtccgggtaaaaaaacccttctctaaaaaaaaatacagctgatttattaaccttgcaattttcatttggagagctataaatcgaaaccttaaaagagttgaacaacctcctagtagccaagtaattcatgcaagaaagcaaagagatgtatcttacaactgattggctcagtgacgatggaagcatggtggtgtgagtggtagcgagagtacagggcatgatggtgcagtgcacgatggaaccagtaggatagaaactcaaccgggccagcgtgcatcaggaccattacaagggcgccgtctcttctccttagtggcattccttgcccgagtggcatcaacaggaggactaggtattccaagtggctgttaagatgaaggtatcatccctgcaaaacaaaattaattttcttggtttagatttttactgaccatttgtctgaactcaaaagaattaaagcatacacgaacttggcatgtccatataaaaaatcatatatagagatagaactagaggagattttgcaggtgagatacatatataccagttgttctcacgatccactttgctcgaattcaataccacgttctacaatccggcgccgattgccacgggcatccatgagccgggagatggttagccagacctggctatggagaatccttagcaacatgaaaggaagcacactgaggtaggccacatctttctctcccaacttcttggcagtggccattttgtggcatccgtgaagcacccatggagccaggggcggagctagagcgaaacaacaggtggtgccccttgcttaatttactctattttagattgagtttaagctaatacggctgtctaagtttgtattgaggggtgcatacatggtgaaaatagatgaggtagagctaaaaaattttcttgaccggattcctgggcaccctgcattagcacatgcatagacagcatccacgcatgtttatttcgtttatgctcatcttagcatagaatcattttttctctctctacgtaaattcatgtactggttgctaatgaatttgaaaaatcactagcagatcatttgaaatggaaaattatgtgcagaccatatgtactcccgagaacattgttacctttaggtttccaagcttttgccatggcgattcagtacaaaaggccaggatttgtagccatttttctctattgcctttgaaggcttgcggcttaagtgttctcgatctactagtactactgaaggggctgctgctacagcgcatgattgctcaaagcagtaagccggcaagctctatatataacatttcgtttatatagcaccagataggtaggaggatctacgattctttacccatggaccttattaacaaatcaggtatgaagaacgaagtacaaaccagccccaataatttagatacacaaactaacaaattcaatgcactagtattgaaacaatttctccagacatccaaaagagatttccgcgtgcgggcctccggcccgtctgctcggaagtgtccgcaaaaatcacaatttttccatgcgggtggcgcacccacatgcaaaaataaaatccattggtgcttatgtcgtccgaacgcaataacaaaaaacagaaaaaaaaaagaaatcgcaaaaaataaaaatgcgcgcccacacggacccgtgggctgctggatccgggcgggaccgtccacccgccgcacgccctccaccggagggctcctcctaccaccgccgtcgggctcctcccgccgctgccgccatgctcctctcgccaccgccgccagatccacgcaggggacagctatgcacccctcgccgtcttcgactctcttcggtcaacgttggctctgtggccgcttctctaccaccatgcgccaccggccgactaccaccggctgctgcgcgcccaccggctgttgccacttgcccgccgtctcttaatgctaaaatttggtaagccccaaagtcatcatcggcctagagccagtatcagcttcacagtcctgaaatcgaccgatggatattatgaaatgctactagttggattcttgatggattcggtcaaagaagtttatctagaagagatcgtgttcaaggaggacgtgtcttggcagtttatctattaattaggcagatttagttagttttcttttatttttagaaaagtgtattcagcattcgatcaggacttgtgtttttcctttcatcttaaggaaaatttgaattgtgtccaatatagactagcatctacctatggctataaatatatactcatgaggtccttgtaatttatctctcgatcaacaagttgggttgcatcggcttcgatctccgatgagggttaaggcttgttatggctgtttgtatcgacgaggctagggccacgacactctaacattgttgatgtaaacacctatcttagttaatctaagtcgatgtctcaatttattttgttggtgatagttaaattgcttcatcgatctagattagctaaagtattcaccactctaaaaatcagtcaaaagcttgattatttagactttatgcttcttttcatacttagtgttgcatcaattgagtttgacctattaagttgtgcttagaataaaaaaatactaacatgtgtttgattggcaatacgggtttatcgggatttcagccgatgagttatctggatgttgcatcggcttacaagtattacatacaagttggttttaaccgattgcatcaaaggtttcactgattatctaatcttttggatttaatgtcatcggaagaccaaccgatgtatgcttaaccttcggatcaaacaattattctattgtatcattattgaccgattggtttctattggattatagtattatttattatattattaccagccgattgtctttatatcattatttacttaagtgtcagaatcttcattggacatatatcccattgttcaaaaccctattgacatcggcgggtatcggcatcggctagcattgctatatcggcttattggctaattggctttttgttcttcaacttatacatcttgtcagttgcaggatcaaactgactggcacgttcgcatctcataaatattttggacctgtattggaactaagcagatctctcaggccgttgtattcgttgacttagtttgtgtcaacatagatctggcaccatcgaccgagcgtggatttttcatcaacactgccgcgtgcccgccggccagccgctgcctcccgagaggggaatcgagtgacagagaggagagaaagttctctcctaggagagagagaggggggaatttgagagagaggagtatgaggagaggaggtgagaaaaagaggagaggagataaggatgacttgaaaaagaattgtagcgctaagagggaaagagaaggtaattcagacttttgggcggaccttcaagaggtcttcacgcgaaaataccttttcctgtgtggccgtttaagatgctagtgtgaaaaatagccaaattttcacatacggctcattaagaggtctttctgcgttaatatatttttgcatacggaccttttaaggagccgtatgtgaaaatgtgggttaatttttgcagatgcgaaaacttatggtcggttctacaatatatcaaggtgcttgttaagaaaatcatttgtgtggagtagtgacggtggcagtgggggaagattaatttgcatcgttttcacgcaatcgatgatctttaatttagtcaatgcatcattaataatctatggatagggttgacgcagagggagatatatcattggcaggtatcaaatcgtagcaatcagtttaaaacagtaagagcaatctagaggagaaagggaagttcagccgctttagatagctgctgctacctaattaatgatggggggcatggccggccgcattgccgacgaagcgccccatgccacaggaagccggtgtcactagaaaagatacttctacatgtgacggcttctaatatgtctagaaatagcagcccatcacatgaaagtcatctcaatcggatcaaaaagtacccgattgagttatggtcgcacatacatattagatgggcataaaacttaagcctgtcatggataacacctatcagtgacgagccgtagtttagacccgattgtgataacattccatatctcaaacgggcctaaagttacggtccgtcacagatgaccatcatctgtgacgggtaccaactttagacccgattgagataacattccatatctcaaacgggcctcaagtgacagatgaccattatccgtgacgtgcaccaacttgagacctgtttgagataacaactaggcccgtcacagatgactcgtcagtgacgggctatatactaatgcccgattgagatgacttaatctctatcgggcattaactaaagcccatcaccgatgagtatttttttatttttcatgtgaaatgtttatatttgtaagttgaactatagcaaaataattaagtgcagtataataattcattttatgagtaaaagtaattttacgggtagtaaatgatttgaaatggaaaaaatgtcaacaacaaagttgtataacttatcaagatttacaatttttagtttgttcatttttctatataacattttttgaataatttgaatttgaatttaaatttgaaaatttgacaacttcaaacaatattttcaaatactaaaatgatttcaattgaaaatgtcatcaacaacaaagttgaataactcatcaagatctaaaacttttatttttgttatttcttcattcaacaaaatgttagtaacattattcccaaattttacatatgtgttataatttataaaccagataagagatatgtcatgtttgtgaacaatgttactatgcactttgtcgtatgtagaaatgaccaaaataaaagttttagatcttgatgagttattcaactttgttctcgatgactttttcagttgatatcatttagtatttgaaaatgttgtttgaagttgtcatatttttaaattcaaattcaaactgttcaaaaaatgttatatagaaaaatgaccaagttgttgatgactttttcaattgaagtcgttcactgatctaaaattctatttgaatttctcaaactttgaattttgaatttcaaattgtttaaatagagtcagatggagaaatgacccagataaaaattttgcacctcgatgagttctacaactttggttttggtgacttttccaattgaaatcattttataaccccaatttttgtttgaagttgtcaaattttgaaaattcaaaatttgaattgttcaaatgaatttatttgtacaaaggaccaatacaatagttgtagatatcaatgagttatacaatgggggatgtgaatgaatgtatatgaatggggaatgttggggtgtgacattctcgcctagggcttgataggattaatagaataatcataccaacatgttacagctatattttcggaagccgatcttcaaataactttgatgttaagcgttctaggcctggagcagttgagtttcgcgatgggtgaccgatcgggatgttcttcttgggtgcacacgagtgaggacaaaaaagagtttcgggatgggtgaccgatcgggatgttcttcctgggtgcacacgagtgaggacaaaaaagagtttcgggatgggtgaccgatcgggatgttcttcttgggtgcacacgaatgaggacaaaaaagacccgcctgggagaggcgggacggcatggcatggctaggcaaaaaataaaatttagtttttttgattatactcatctggcatggcatggctagccaaaaaataaaatttatttcttttcgattatactcatatgtgacgggcattaacttatgcccgattaagatgaggatcatatgtgacgggctatagttaatgcccgtcacatatgactaatttgtgacgggctatagttaatgctcatcacagataagggtcatctgtgactgacgggcgctagttgtggcccaattaagatagatcatctatgacgggctatagtttgactggttatctgggtcaaagctatctgtgacgggctttaattaggggttgattgagatagattcatccgtgacggtcgtttgcccgattgagataaatcttcacatctgtgacttctagcctgtgacggacgccatgcccgattgagatggggcttaccgccctattgagttgatggtatccgttctagtgtgtctccacctctgtgatcgccggcctgcggtgagccagtgaccatgcatggacaacgacggagaaagcggctggaatagcttaggtgcggtagccccaactacaactcccaaacagagccgatgaagccgctctccggggccccaactcccaaattaagtagattgtaggcaaaaaaaaaatggaattaactcaactaactggatggccctggcgccgatccaaaattatattttacttaaaatttattaaatagctatctctggttgtaaagacttagaaagaccaaactttatcatccctatgtttttaattttatagtttttaaaagttacaacagttgatacctcttacttctatcctctttctttatttgcttgttcaatctaccactatttttatttattctccatggaacctttaaaaattggaccttatattttttagaatttatctcgttgggttttatttttataatttttagaagtccgtcaaacgctacaactatactcctctacggctcgttcactacgtcctctctttattgtgattgggattttaaaaatcgaccataattatcgtttgggtttatttttttttactttctataagtcctgtcaaaccatcaacggctttatcactgtactcctctatggcttgttcgttgcctccctttttttattgtcattgagattttaaaatcgaacatgattatcattgggtttgttttttttattcttttagaaatccaggaacctttaaaaattggacattgtagtttctggagtttattgtctcgttaggtttatttatataatttctacaagtctcgtcaaacgctgccactatactcttctacaacccgtttgctgcctcatttctttattgtcaatgggattttcaaattgaacataattattgtttgggatcatttttctactttttagaagccctgccaaacaattagcggcttcactactgtactcctctacggctcacccgttgcctcccctctttactgtcattcggactttaaactcaagcgtgattattattagggtctatttttttttttactttttagaagtcccacacacaaccatgaccgtgttgcttaacggcttatctgtcgtcactccttttaatcatcattgggattctatttagggttttgttaatagtttttagatgtcccatcagccatcaccactctactcctttatagacccgttgcttctcccatctttattgtcatatgtcatctgtgttctagataaaatatttttttttgaaaattccatatttttcatccaatatttttaatatgtaaattatattcctacttgaactcttataattatttttctatttttgaaatttattttattttttatttgtaattttaatttatctcgtcatctgttctagatagtctcttcttttactagtctttattttctattacaaattttagttatttataaattgtattcctcattgaaatcctattttttattctattttgtattttatttttattttattttgaattttaattaatcttgtattgtgttatatatggactattcttttaatatttattgtatttatttcgaatttcagttgttttaaaattgtattcctaattgaactctcttttttatttttcttagtttcgattttattttatttttatttataattttaattaatctcgtattatgttcttatgtggactcttctatcaaattactaattttaaattccaaatttcagttatttttaaattgtattcgtacttaaactcttattttcttcttataatttctaattttattatttctttattttttattctaaattttaattaatcttgaatatggggttattatttggactctttttgcaatattgcttatttttaattccgaatttaagttatttttaagttttattttttacttaactcttctttttgatttttcccttctagttttgggttttattttattttttcttccgaattttaagattcttatacgtactcttcctccaatattgcctattgttaatcccgaatttttgttatttctaaactgtgtttctatatagactctctttttctttttcttcaattaatgttggaatttctagcatcctcaaatttgcctattgttatattgttaagatgttttaataatataatgaattcgtagagttacaagtctttgcacaattcgcctctgctatcaatactataaacctctctcgagcaccttcttgggaagcttttttttttctgagtaaacgtttgataaaccacttacaaaaattttaagactaccattcaaaatagtattatgggtaaacactccaaatcatttgttcatttattatgtactgtctatatccgtaataactacaccctagcactttggaaggtaaattattggagaataaaaatgactttaataccctttcaataaatgatgtggctaggaataagatggaataagctagactgatctactatgaaggtttttttattttttttgacgagaaacagtaggagaggctcctactgtgaaggtttggtaaacaacttattaaaattttaagattatcctgtgaaacaatattatgggcaaacaggattatttcttagagtattatctaacatatatttgtctagtaatacttgaaaaataatctccagcccatagctcattttgatttaaatatatgttgcctcatttattctattaggaacctctttgaagcattataaaaaaacgattagcagttcaggaaacgtccgtgttgaaaatgaagaagtagaagatgggaaagagaagtatacaacacaaccttaggttttccagacattaagttgttgtttttggaatatagtgtttgatcattcatgctattcaaaccctatttaagtttatttattttgttgtggtaggtttcatcactaagatactttaatcaagcttaggtttcttgcatagtcgcacttatttttttaataatatgaattttaaacatcatgtaaaaaaatgaacagctagcatcacatatttaaaaatagggagtagatgatttggtggagaggcatgcggtgggatgaaaaatagggggtgcatacaggaggaaagatatatgttgcttaggctcctttattatttaggcttatgcttttatgatgagttttttttatgattttatggtttataagctggtagctgctttgaatcatcaaatggaagggttgagttctaactttaatttacactagatgatactccgcgtgttgcggcggacaattcgtgcgtgcattgcagttataaaatttcaatgtataggaatgagaaatattatggacctgtaaaagcatctcacatatatatgaaaaatgaaatacttccttgtagtggtttcttatagcatactatattaagtggtcaatgaatgttgagttatgtcataatcaatgagaaatgataactgtcgatatttaatgtctatttaatgaagcttggaaatgatccaataactcttatttagcgggtgatgtggctcaatgcatgtttagtttttggtgccaactatatactccttccggttctataattattgacattttagacaaggttgaggtcaaacttttataactttaaccatcaataacataaaaaatatttagtttaaagaaactagaacaatatatatagatttgtctttcaaaacactataataaaagtaaacatgcatttatttattgtgtatattataatagaaaaataaggtcaaaagtatattttgtaggccgtgtcattgtccaaaatatcaattaaaatgaaaccggagtcccaattgatggtggttgtttcctctaatttaattgctcatgacaaagcgcacgtataccacagtcccacttctgatcgcacgttggcactgagcactgggaagccgttggggtactgaggaacgaagccgtgtgaaatcccaatccacgcgcgacatatatatcctgtatgtcgatcgtgcatcgattggagagatgtgcgggagtgaagatgagtctagctaggctggtccatcaatttgggccttctttctcgtagattaaagaagtttcaaaggtgtatatttgatgtcgacattgatcaaatagctaatataatgttgatgacgtggtgaattgagtagtgagtaccaactatatatgagaaaaatagctaataaaacctaatttcataattagacttcattagatgtgtggtggcttggggggtaagatgagaacatacaaatggaggaatgcacgctatgcacacaaacttactgtgcatactccatacacaccaactagcaatgtcacagaaatttgtataaaaaattagacacatactttcaataatattacacctatgtttgaaatattatcttcaaattcattatatattagtcgcaaaaaagataaaattctgatagatttttactctaacagatttttcattttttgtgacggctaaaatataatgaatttgaatatgagactttgcacatatgtgtaataatattatgattacatgtccatttcttctagaattattttgtaatatttgttagttagtgtgcatcggaagtttttgtacataggatatgttcccatataaatgatagtttgtccatagaaaacagtataataaataatttagaatcatattttgtgcttcgaataaccatcatgtggccatggatctcatttatttaggttcaatatagacaaaaagttttccagacttttctaagtaaaatataaatgtaaaaaatataaagtaaaatttcagctatgttttatgcatttgaattttaaaattcattactgggtaatattattttaaaaaatattagttatagattggacaaattataacctacataaatttggtctaaagtgaaataatgttagagtttctcttaaaatataattttattctattttaagcattgtttttgtatgcagttataattatcttgcttctataaaatatttagaaaaaattgctacaggacatcattttttaatatttgccctagaatgccataaaaccttggtttcggctttgcatactaagcttttgtggtaattcgctaaaatatattctagcggtctaaccattacttttagctatctggctcaacatgagatgtaaaattgtggaaaggtttttctcggttgtagacaagaatgttgccaatatgtgttcctatggaccaactgggagctttacgcatttcgagttatagttgcattaaatccgactggctggtttgtggccaccggcgaggctaatggcacgaatttctactcaatcggcgccaactgggaagagcggaggaggccagtggcacatgaggaggaggtcggtagcgactttgactgaccttgtacatgatattttatttgcgagtacatgtgagacgcatgtaagcactcaaacgcacatatcacattatattcatgttcatatacacccttatgagtgtgtgctaacacatctaaaagaattggaggtctagaaacacgtaacatgggtacacgttttaccactgagcacacctatgtgtgcatgaactttgcaatattacatcactgggaactatgagtactcaggccatgtataggattttaacctagacgagcaggttccaccacaaagaccctaaccaaccttttgttgcacaaaatttgcttagatgagcccgatacccataggtggagcgagaaacaattaaaactagttgatatcccgcgtgtttgtgacatctcggcccagggcttaataggattaagagaatactcataccaacaagttgtaattttttttccggaagcccatctccaaagaactctaagattaagcgtgcttggcatggagcaattttgagatgggtgaccgatcgggaaattcttcccgagtgcgcccgagtgaggataaagtgtgcaacacacgtatcgacgaggatgtcaatctctcttaagggggagaatactcataccaacaagtctagtctgtgagggcagtctatgacctggtcacacagcacggacgtggccaaggagtggtcacacagcatggcacatgcgctggcattggacgcatggacgtggccaaggagtggtcacacagcatggcacatgcgctggcactggacacacggacgtggccaagagggaatgtttgtgtccaagagggaacgttcctgagttggggttgatcgacgaggacgtcgatctatcttaaggccttaattggatgaagagaatactcataccaacaagttgcaacttcttttccggaagccgatctccaaagaactctgaggttaagcgtgcttggcctagagcaattttgagataggtgactgatcgggaaattcttcctgagtgcgtagctgccggatataagtgggcctgtcttgggagaggcgggacgttgcagcgttgcagcgggcacactataaaatgttcttagtgcataaaattgatgcaaattggtcactgaatcagcattcaaagaaaaggagatttacactgttgtgatagaaatgcgcataaatgttcgtttgaacatatacaattgaatcaggaaagcaaccccaattaatggtacatggtattctagcgtgctgagctggtcgatttgctgaattgctgtgaagatatggtaggtgtaaaaatcaggattagcctcttggcaatatgatgaactgagtaagttcaaaactttataaaacataaatggtatctcaccttcagcagacttgaacctttaagcaaagctactagaactgcaactcaatcctaggaagtagcaacatggctgccttcatctcatcctcttgataaagctaggctacatgtaggccatatttatagcatctctaacctgtattctaagaaatatatatattttgaaaccaaattcatactgaaatttgtggtttgagcttgttaggtgtacaccacatttgagaaacgtggtgtactttgcccaacatccattgggtaagccctttgttttttatttcaatcaacagagctactggttaaatattttcaaattattaaaactttgcagaatatacattttaaaattattggaactttgcaagtgtaggatgcacgcatgagctatatttgaagcatgaaatgccaatgataggatatcgaaagaaaaggacgggtgcacgcagcatgaccaacaaaggataaggtaaaaaaaaaaacgcatgccagtaaagtttatctgctttgatgagagtcctttttgcttggaagactggtatgacaatcctcgcatttttccccatgtgctggaacatatattccttctatctattaaatccatagcacaatttgcataggtcacaagcagtataatcttcttttaagaaactaaaaaatagtcaatacataagtgtaggactaacaatagttgttccttctttaagttagcaaaaacaattcatcaaaaactttcagctcgatcctgcaagaggaaaatcgtaggcaatgctcaataagtaaacagaagcaattcacatatacataattgttatacaaattggaatacaattggaggatacataaacagatttgaaaactttagttacatgtagtatactaacctttcatgctatgattctcttcatctgctcaattcaattgggggatatgataggacatggttgactcgaaggatgagttgtgaggatggtgaaaggtatttgttgtatgttatgttgcagaagggattgaaagagggtaatgaagggtaataatgtggatcctggtgatctaatagattgtgacagtttctgctgtaattgctgaaaaataatagtaataggggacggaaggaggaggcgaatggacaggaccaaggcgattatggtattgatagtttggggaataatgaatgaataagagaagggcatgaacgattctcacttggattgccgatgcggctagttgagccgaggggaaactgacggatccatggtggctgaaccggttgccctcccgaagcgtgcacggtgctggcgaatacgccgcatcccaaaccgccgcgtatgccaaaagggcggaagcatgtgcagggtgggttgggccaacagaaaaaaattgatgggaagctggcccaagatatcaacctcgttcatctggaaacacgcagaccaatccaacggctgaaaataaacaataatgtggcgtaacatggtgcaagttttatagcaataactcctctagtgggtaccaactatataggaagaagggatagtatggtagtgggtggcaatagtattagtttgagtaaatttgacaaaacaatagatctaaggacgtaaaccatagaactatagatttagcgcaaaatttatcataaaactttagatttaaggtgttgtgtcatcaaaccgcagattcagtgatgaggttatcatataactacataatttcaaatttagatcaacaaaaatattcttaaaaaagttaaaaaattgtagttatgtgatacaattgatgttaaatttgtagttagaaaaattccaaataccccctgaactttgggtcgaagtccgtctagcaccctaaacattaaaactggacatccaaccctttcaacttttcaataacgttcatattatctcctaaggtggttttggatgatagttttgcatgttttggaagttcaaacaaaataacttttaaataactaatataacatatttgcatatcatcaattgtaagtcatcaatttatacttatatagtgataccataatattaataaagtttagggggttgaatgtccggttttaaagttcagggcactaaactgacttccatccaaagtttagggggtgtttgaactttttttttcctttgtagttttgtgatgcaacgccataaagttgtaacttcatgaaaaattctctctttttttcatttctaaccagtagtgtagttatacacattcttaaatatgtagttttatgatgagaggtggagagtttttccttagttgtacacaagaatgttgctattatgtgttgacatggatcaaatgggtggtgcataactgatcaaaagttacgtatttcaagggataattgtgtcgaatccagttggcttgtatgtggcctctagtgaggctattggcatgactttctacttgatcggtgccagcttggaggagcagaggaggccagtggcacacgaggaagttggcagcaccatgcgcaactcagtgacagtgtgaaggagatcagcagtgccttgactggctctgtacaggatatttcaattgctttatgtacatgatgtttcatttgcaagtacatgtccgacacacataagcactcaaacgaacataccatattcatgtccatatacacccatccaagcatgttctaatgcacttctaaaaaatttagaggtctagctgcacgtagcacgggtacagattttaccacgaaacacacctatgccatgctatgtataggacattaacctagtgggcatgtttcaccacaagttcgccaaccgagcttaacttaagttggttgtatagaatttgcttcaatgagcccgctagccagtggcgaagcccaaaacattaaaaaaattatatattggagagtggaaatatcattggtgtctattttcaaaaaagtccaagcccctacttgcatcccccttatctctgcccttaccaccagcaaatctgcttcaatgaaatggtataggatcttagactcaacttagtggcaagtctagcttagtcttttctagcaaggatgattttcataagtttgcaaatcatgatagattatatttcttctatgcatgtactaattccttagcttgtgttgaacccaaccatagtgttggagatcggtactcctacaacagagaagagaagacccccccccctcccgagatttagccgaggggcaagtagagatcgagttcatatggtgtaaacactcaaacaaagaacacaagcaaatatataggtttatgctgctcgagagcgtaataccctacttctgtgtctagcactat

SEQ ID NO: 24067 - DNA, 53084 bp, Oryza sativa
tgaaaaggcgcttagtcctcacaacaaaaaaaactgcagcggaaaaataaaatctagcgaagctccggctccacccccataggcagctcaactcgggtataagtcaaacgtcttctccttctggatcatttttcttcaactgaggttgattgattattgcaaggcaagtcacacagatcccaaacacgattcctttgagcatgttgatcctatatttaaattctctatttatttcaactgtgcatttattttcgaatgtcaccgggtggtgtgaacctattcctttgttatggccaatttgcattgaatgccctattccttgataccttgggtaataaattgattagcttgaaccttatgtattggtttggttcagctaaatgctatatatatacttgcttagccatgcctagaaacattagttcattaatgggatgaatcctactacattattatttatggttatatttaggggcaatttcgtttctgcccctaatttgatgtctaatattgattttacccttattttttagggttttcgtttttaccctcattttttttaaccgaacgcttgttttgcccttaccttggatgataaaattaacggtgttaagtaattgacaaaatgacatttataccctctcatgtatgttcattaattgtgtttttgccctcattttatacatatagctttgaaactttatttttggagtatatttaaaactagatgatgcacattgactaatataacaatttggaaaaattctgtatttgattgaattttgacaaaatttcagcattttgatagaacttaaacaaaattttggcaacattatgtaaaatgtaattatctgttctctttagatattagtcaatgtgcttcatttaattttaaatatactcacaaaaataaagttctaaagctacatgcataaaataggggcaaagatataattaatgaacagagatatgagagggtataaatgtccttttgctaattacttaacaccgttaacttaaccatccaaagtaggggcaaaacgatagttcggttcaaaaaagtgggggcaaaaacgaaaaccctaaaaagtaggggtaaaatcaatattagacaacaaagtagggttagaaacgaaattgtcccttatatttaatggtagctcacgatggttaatcgtgttatgataattaattgataattaaaacttgataatggtgggttgtgagcacatggttttgaaggtcgtgctcatgacaattaaggaccagtacgcgagctactgttgtgagacattaaccgtgccaaccacaagccagcgtgggcaacggctttaccttttgtatagtatggtacattgcggggcaccagactgtgaagcggcgagaagtccgtgggggtcactgggagtccacgcctctggttattgagggggtgattatgatccaggaatggtgcactgtggtggattgtgttgtgcaaggggtactgtcacagttcctatctgagatatcgtggtggtattgaggcgcatggtaacatgttgtggagctgtgtcttgtgggtacagtggtacatctctggccagagtaaaactattcgaatagccgtgcccgtggttatgggtgagttgagcaatgttttcgtgattagtctcatacctctcacaataattattgatgcaataattggtaataatttgcttagctcctggttcggagttagatctgtacagctcggtatggttgttcagaatggttgggcctgagcagcatgggcgtgtgttaacaaccaaatttggtaatatcggcatcgggaaagaagattagatcgaagcaaagtcggaggcggagatcgagttcggaaacatagcaggaatcggctggagtccagttcggctacgattaggatcggctgggtctgagttgggctaggtaagccgatgcagccgattccgacaatgcaacttgatgaatgacatcgggttgaattgaggtgcttcaaggtgattgctgcacatcgatagagtcctgagaaggcaattgtatctattaattaagatgttttatgtaatttccttagagatatgcttgggcaaaagtctgccgcaaagacttatggtatcttagagtttgttagagatagtagtcgtgtccgttatggacatatcttgtaattctcgggtataaatagacccgagccctatgtaacttttaacacacacgttcaatacaatttcggcgcatcgccaccctttttgctttagttttatttcgacgagttcttactttcgggttgagctacatcggtttcgatcttcaacaagaggtaaaacttgttatggcggcttgcgttttcgggattagtgcttccatctttatgacactctaatcttgtttatgtaattcgtcgagttatcatatatcctacataatccttggcaatatcgatatctgacctataatcggctaacatccgtcaatagaaggcagccgattaggttaaataccgatgtttacttagattatataggatatctaccactctatgacacatccaacagcttgattgtctagatattgtcctccttttcatacttatagctgcatcagttaagtttgatattatgagttgtgattagaatctcaatctctagcccgcttattggttgctgattagggtagtatcggactttcagccaatcttgcctgatttaactactttttatcctatatgcttgattgacatgttaaatctgccctttacgttaagatcttgctgcatttaagtatattaagcttttgtttagtatattctacttgctttaatatcttaatatagagtggtatcggagtattagccgatacatgctagatctatctgatcggctatgctatgaacgtatatagtctcattattaatatatatttcgatctaagtgatttatactgcctcggcatggcgacggatctatcccaatcacttgatttaagtatatatcgatataaagattatatattggtaatatctgcagccgatcgagtagattcagtcctttcttatttattaatgactgccgatcgatgcatatacgacatcggctcaaagataaatgatatgtcatcggcacctcgccgatcggctatcatttatagatttaactgcgatttatttatcaaatcaactggcacgctcatacattcgaaggcgagctttggacctgcactggagttaagcagatctcccaggccttgtgttttctgtcaacacgcttttggcacacctggtgggacatttaagaagtcagccaacaattcttcctcatggccgagaaaccaccaccatccccagctagcccaggctctgttaaggaaaagatgctgaaattagggttggctgacgtcaatgaaggaaatgtcgtgccgatcgatccagaaaaattcacacctgagcagaagaaagagtttgaagcaatgttgcagcaagcacgggatcagtgcttgaactcattcatgcagacccgcaaggggacacttgttcagaagtacaaaataaaagtggttgctgatgatccggggaccagttcttctaaggatggagatgggaaacaagctccagacggctcggctcagctgagtaacaaaagtgctaccgacagctctctaggaaatcaaggtgacaattctcaaggagtccatggagtgcaaggtgacggggtgcatggagttcaaggtggtggtgcccgagggttgcaaggaggggatcttaatcagaatagtgatacgacactgtaacatacccaaaattctaggacttaaaaatttgttgtcaaaattgttagaagataacttctccaattttgagagccaaaaatttccgttttaatttaggtgatgaccaacttaaaccattgcatgattaaaatttgagaacaaaataaaaccttttcattcccagcattagactagaaatgtcatcaagcatttgagcatacatgtgcataatgcatgcctaggcttgagtccattgtgcatttggttttggtatcgcttttcataatagatctcatgagcataaactaaaagggttaaaactactaaacaaaactatagttaatattgggtgataacatgtggacttaatattaaattctaatatcattttctcagcccaaaagaagtttaatgtaaaccctataatagtattagatgcaattatgaagtaggaacacatattcaaagaaaggttattctaattctttagaataatctatgcaagaaaaatcatggaaaaatttatgtaaactatgtttagctcaagcaattcactataatattggtacaggttaataactaagtttaataccacaaattaatcagtcaaagcagacaactaaaataaatcaaattaaactttaatcggctaaagcgatacttcatccaaaagtatatttaactgcacataagtgaatatagaaaataatttattcaaatactagattatttatcatgcctaaatataatttttctagaatttttctcctctgtttaagcctcctaaaaattcaatctagatttctaatagcccttctttgtttaatttctgtgagcaatctacccattatttttaagtgcaaccaaagaaaatggaatctacgtgtaatcatttacctccagtaaaatcaacactaattaatttgatcgacacattaaattatggagttacaaatttagaggagaaaataattccgaaaattaatctaaaaatcaagtttacccagtcttctacccatatctctctccctagcctagtttccatcgagttggccccacttgtcagtgccttaggctagctttagccctgtccatcacttcctccactgctccagccgagagagggagagattgagtgagccgacgcgtggccacaacgtgtcgtcgatctcggtttcccttttctcgctctctactcctcccagacgcgtcgccattctccattcaacactcagagctaaagaaaccgagggaggaggttctctgcctctccatcgctccaaaccttgccgccggccatggagacgacgaccatcgccatctccatttgagtcaaggtcacctccatctctttcgcgttcccatctctccacacaatgccgagcatttcctcttttgacctaaacccctctcgtgcagtgcatcgccgggaacgcaagccacgccgacaacgccctggagcacgcaccggagcgccgccgcttcaaccatcgtcgtcgtccggccattctcgaccacctcggagcaagccgctgcgccatcgtcatcgcctcaacctcctcttcaatacgcctcaagaaccccagctggagatgtgaaggactcggagaacgcatcttttcttcaccggcgccaatctagaatcgcctccgccgtcatcgtcgattaccgctgcctcggtgagccattgttcgattcctcgcacatacaccatctccttgacctcacaaaccttgtgcatgcttgcttgtagcagctcatgcgagccgtcgtcgttcacccgaggaggagtgccgtcgccgagccgttccacaagtcaccactaccgccaagaccttgacaaccctagctcgacccatggtgagcattctgaaggctagaagaccacatgcatgcatcctttttgttcggaatcgacttccatccacacatgcgctttcaccccaagaaccaccgccgctcacactcgccattggcgctactccaatgtcccctaaccaagaaaactagaggaatggaatcgcaagaacatgctcttcatttatcttttaaccccaactccaaccgagccaccaatcgccgccggtgaacccgggatcgagctcagccatggctgctctgcctctgtgcgtgtgaaaaaggagtcagggacttcattttgagaatttaaataactataaggttcattacgtaatgttcccaatcaatgacatatggacctaggactgcgggttgagttcctgaaaccctaggggcctttttgcatattggcctgatactgacaggagaaccccatgagtttaaaatctgaaaaaaaatgtaaaaagataatactaaaagttttgtattttcaacaggaaagcatgtaaacttataaaatccataacaaattgaaaacaactcattttagaaaatccataacaaattgaaaacaactcattttagagtaaatcaaatttctgtgaactcaccaaatcatgaactttagagttattgcataaaactacattcactgtacaaactttgtctctaaaattggtctaagataaatcatacataaagcatacacaaacttataaaatacatagaaaattcatctcaactcattttgaaacaaactcaaaaaaactgcagattcatcatcatgcactctctgattaggtgaaataaaagtaattacttactttgcatcaaatgcctctaaaactattatctctataatgattagttttagataagctaaactttagaaattcatgtagaacccaatttagcttcaatttgaataaacttaagttctgtaggatcaccaaaacacgtatttccatgttatgaaataagattatatacttactgtgtgtagtaaaagtctctaaatattcataaaaggatttactaacatagagcaacctttaatttggcaaaacttgtagaaaattcatttttagtccaaatgaaatgaacaaagtttccatagaactagcaaatagttatcttcaacatagtaaaataaaatttggcaccttttgtagagaacatagatcaaaaccttaacttagtgaaataagaatttaaacacatagtgttgtttaagtaatacataaacatgtataagtatatatacactttaggtctaattaaacctaaacaaaaacttgattgaccagtaaagccatagttccatcctcatccactaaaacttagaagaacttagctcatatgacaatttctaggttaatataatatattgctagtttagattagagcatctctagcgtataaaatatgaaccatagtagtaaagaccataaacatgtgaaataaaaatgttttagttaaccaaattagtccttttattcaacttaaacaggaagtagcatgttctgaacctacaaattgagagtcatgcacatataaaacactatatgcctaaaacacgttgtaacttgtaaaatctataagaaaatcattataactccaaaaattgtgaaaccaaaggtgttagtcttagaaaacacatctccacactcctgtcaagtctaatataatagaaatcacttgacaaaagtattttataacactacctaagactatactactataaaccgataaaacttctaaaaattcataactccctaatggaataagataaaataaaaattctttcacctaaattcattttagatcagtaccaaaccactgtgcataaataatgcattttagagcattttggatttttagctctttcggtgtttaattgcatatcgtgtcctttatctagataattgcataatcggtgaaggagtggattaggtgctaacatttctctgatcaaggcaagttttctcctcccatcctttgaacacattgaatcccatgatttgaggaatgaaaatgtttgtttgcaaagctgcatgtgaacttagattatatcggtatttaaaattgggttatggtagttatgacctatttgctgcataccccaccttgaataattgatcctcttgctgtttgaacccctagaaatggttagagtacactctttgtgctcaaatgggtttatatatgctctatttgtaactacttgcttagccatgcttagaactatgcaaatgctcattccatctataattaaaatatgattttgatatatgaacctttgctggaataaaatgaatatgatgggtatttgcgaactaaaatgtgtaaaatgtgattttatacttgggcggcaagtggtgtgcatatggtgttagttgcataccgatagggggagtgtttgcccaagtccataaggaccgaacttgtgtcacccatttaaagttattcgtacatccacatgtgctagtatgggatggcctaagctgagtaatctatttaggactagccttgcattctggtaggccggtgtgtatgagttcgtataattcagaggagcttcctatttaccccgacgtggtagtttaggtgactaagtgtgtccaatacaacggtattgtgccacgtggtgggttcctgtcgtgtccgccatcacggcgttaagtttaaggcgtgggcccgtcacttaacggttctaggtatattccaaagtatgcctaggatggaggaacacgtatcgtgctggtgcaaggctaggctctaagtagtgtaaaggcttcgttatgacctctagatcacattcaacatgaagagtgtggtggagtcttgcaaactcaaaacaaactagagagttcatatcatgtgggtaaagttgtacaaactctgcagagttctttaaactaatcgattagccgtgctcacggtcatgagcgctttggtgatgtgtcatgtgtatagactatgttttaaaaatgtgatcatgtgacattggtttgaaatggataaatgtgttgagttgtgtgtgtggtgatacattatgacttattgttaagtatggcaataagagattgattatgatggaattatgaagaagttaataatgaaacttaaaacttgttttgttaattgaagcatcaacttctttacaaaagaattgcgaaacaaaacttgctttatgctgaacatgaactacatattgccttcctttgaatatatgccttacatgtagtatggtaggattgacttgtgcttgccagtacattaacttgtttaatgtactgactcttgctgttgatataaccttttgtttgcaggtttagacttagtctttgaatgatgcgggtcctgattgcttcttctaggatgagaacttaatggggtaaacccctagtcggtgtgcttgtgattgggtagtcaagcttccattgttctctaataagcctatttggccggtcggcctatgtaattattaagttgttgtaagtcttaagtttctttcatcttagttgtgtttgctatgtataatcatgcttaagatgaaagtgtgaatctagtgcacatcctgggaactagattcacatgagtatgagttaggaatatttgagaggttgtagatctttagccatttttgtcaagtctcctgaatgtgtaacgcatctggtcgctgccttcgagtggtttgacgggcacatctcaggctgaagttgactggcaggctaagggcccagcaatgtctccaatattcctctctcgaggcgtcggatgtttcattatgcttgttggatgacttgaattattcacttcatctctcaaatataatggaagatccggagagcctacgacagacacaaggttttttcagtaatttccaagatcgggtcgactacgctgtgcatcatgttttgatcaatcaatctggggtgttagtcaagaccttatcaaacatgatgaagtccatagccgatggttcaatagctgagcatcaggctgcaggcccggtttatttgcaaggaggtgtctttccaaattatcggtctttgattaccgatgttcagccatcaactcaggcggttccctctgttgcaccaacatctcagccgaaggcactggcgtcaattcccctacctgttccgtcagcaatggcgccaggccagccagtgaaccctcagttgttaatgagagagcagccacagcatggtgggcaggttgcgaatcggctgacccaagatcaggttgctgccacgtttctgccgcctcaacctattgttgatccaatacagcagcatccgattcagcagacacccccaattcagcaggttgtgcaaccaatccagcaacaggtcatgcaaccagttcagcaaacaccaccaaggcagcagcctctgcagccgactcagcagacgctgttaagacagcaaatcgttcagccgatccagcgccaaggttcaataggtgcatcggccgggtttgcaacgcctggtggtcagcctgtgcaacaatttttaaatcaagttgtcccagaacacttggttcaccacgtacagccggatggcacagtaatacctcaagttgttcctgagcatttggtacgtaatatccagccgaaccttcataattactaaggggtaacttgaattaccaatatcaacctccttccctgcaagcccaatatcagccagggggattggctcaacctcagtttgcgcctcaatacggtcagttcgagcccgtgcagcaacagtcataaggggtagctcagcaacgaccgtgggctgatgtgattgctgacgtaatgagggaacaatttgggcttaaaccaaaagagacaggaagcttgtatcggcagccttaccctgagtggtttgagagagttcctcttcccaatcggttcaaagttccggacttcttcaaattttcaggacaagatggtgtgtcaacttatgagcacattagccgattcttagctcagtgtggtgaagcatcggctgtagacgctctgaaggttaggttattccggttatctttgtctggatcggcttttacttggttttcttctttgccgtatgggtcgatcaatagctgggccgatttggagaagcaattccacagctatttctacagtggggttcatgagatgaaattatctgacttgacagcgattaagcagcggcatgatgaacctgtgcacgagtatattcagagattcagggagatgaggaacaaatgctttagcttgagtttaactgatgcccagttagccgatttggcttttcagggtacgattgctccgattagggagaaattctcgtctgaggactttgatagcttgtcacatctgatacagaaagtaaccttgcatgagcataggtccgcagaagttaggaaaaactctaagaaggttaatcatgtttgtccgtacatgtatggatcggatgatgacgaggacgattctgaaatagctgcagccgagtgggtgaggagtaaaaaggtcataccatgccaatgggtaaaaagttctagaaaagaggagaagtatgattttgatattactaaagccgacaagatctttgatctgctactccgagagaagcaaattcaacttcctgctggtcatacaatcccatcggctgagaaattaggcaaaaagaagtattgcaaatggcataattttgggtcccattctactaacgattgcaaggtttttagacagcagatttaggtggccattgagggaggcaagattaggtttgatgattccagaaagccgatgaaggtcgatggtaatccttttcctgttaatatggtgcatacagctggccaaacagccgatagggcccgtgcaaggggttttccggtgaattcggctaagattatcaacaaatatcagaagaagtatgacaagcagcaggagaagcatcatgagaaatacgatgatggttttgatcctcattggggttgtgagttctttagattctgctggaatgaaggtatgaggttgccatctattgaaaactgccctgggtgcagtgatatcgtcgagaactcaagccgatcatatgataggggcaatcggctaaggcagacaagagtttctgttcatcaaagattgggtccagtaaatcaagatcatggccaaaaggaccatgtaatcaggaataatcaatggtgtccttctggtattttcacgaagaatcagaagagaagggttcaatgattgaggaacagggagcgccttcaagaggctgaacaagaaattaatcatcggctgaagaaagcaaagccaaggcaggagtggcgtgttaagaatcaggttcctgcagtcgatgatgttgcagcagttgaggcaaaaaggtaggcaaaagggaagagtgttgtgacggcaccggttaacatggtctttaccctgccagccgaattcgggatcgaccaagccaatgttgacgaggtggaagaggaatcgactaagttggttctgtcactagaacaggcagtgttcgagaaacccgaggggacagagaatcggcatcttaaaccattgtatataaacggctacgtcaatggaaagccgatgtctaaaatgatggttgatggtggggccacggtaaatttaatgccctatgctacgtttaggaagttgggtagaaatgccgaggatctcatcaagacaaacatggtgctcaaagattttggtggcaatccatcagaaaccaaaggtgttctaaatgtggagctgacagtcggcagtaagactattcctaccacgttttttgtcatcgatgggaaaggttcttacagcttgttgcttgggagggattagattcatgccaattgttgcattccttcaactatgcatcaatgtttgattcagtggcaaggcgacaaaatagagatcgtgccagccgacaagtcagttaatgttgccagtgctgatttagctctttgggagatggatagccttgattgtttatctggaaaagtctgggatagagattttctaaaagtgtccgattctgatatacagccaattgaagatggagaacccaagctattactttgagggcgtcgtggagggttcaagtgtctacactacggacacggtagatgatctcgatgacaagcatggtcaaggtttcatgtcggccgatgatttggaagaagtggacataggtccaggcgatcggcccaggccgacatttattagtaggaacttatctccagagtttagaaccaagctgatagagctcttaaaagagtttagagattgctgagcttgagagtattatgagatgcctggactcagccgatcgattgttgaacatcggctacctatcaaaccaggggttatgccacatcaattacctccgagaaaagcaaaggcgaacatgcttgaccgggtcaagggtgagatcaaaggatgatatgatggtggtgttattggtcctcgccgaatatgttgagtgggtttctagtatagttcctgttatcaagaaaaacagcaagggcagggtatgcattgggttcggaaaattggaataaggccaccccaaaggatgaatccccattaccagtagccgatcaactagttgatggctgcttcgggacataagattttgagttttatggacggaaacgcagaatacaatcaaatttttatggccgaagaagacattcataagataacttttaggtgtcctagtgcaatcggcttatttgaatgggttgtcatgactttcggcttgaagagtgctagagctacatatcaaagagccatgaattacatatatgacgatctaatcggctggttggttgaagtctacattgatgatgtggttgttaagtccaaagaaataaaggaccatatagcttatttgaggaaggttttcgagagaaccagaaaatatggtctgaggatgaatccgacaaaatgtgcttttggtgtatcggctggccagtttttgggatttcttgtccatgagagggggatcgaggtaactcaaaggagtgttaatgcgatcaagaagattcagcctccagagaataagacagaattacaagagatgatcggcaagattaattttgttagaaggtttatttctaatttgtctggaaggttagaaccttttacaccattgtttagattgaaagtcgatcaacagtttacttggggggcagagcagcaaaaggctttggacaatattaaggaatatcttagctctcctcctgttttgattcctccacagaaaggaataccgtttaggttatatttatcggctcggtcttgattcaggaattggaagggaaggaatgagttgtattctatctcagtcgtcggctcttgcatgctgaaactagatattcccctgtggagaagttatgcttgtgtttgtatttttcgtgtacaaggttgaggcattatctactgtccaacgagtgtactgttgtatgcaaggccgatgttgtcaagtacatgctatcggctccaatattgaaaggaagggttggaaagtggatatttttcttaaccgagtttgatcttcggtatgagtcgccgaaggcgattaagggacaagctatagctgattttattgtggaacatcgtgatgattcaatcggctctgttgaaatagtgccatggactttattctttgatggatcggtgtgttctcacggttgtggtatcggcctagttataatttcccctaggggggcatgtttcgagtttgcttatactattaaaccgtatgcgactaataatcaagctgagtatgaagcagtgctcaaagggttgcaattactcaaggaagttgaagccgataccattgaaatcatgggggattctttgctagtaatcagtcaattggcaggagagcatgaatgcaagaatgatacattaatggtttataatgagaagtgccaagaactaatgaaggagtttcggctggttactttaaagcaattctctcgagaacaaaatattgaagctaatgatttggcccaaggggcatcaggatataagccgatgatcaaagatgttaaggttgaaattgcagcaatgacagctgatgattggaggtatgatgtgcatcagtatttgtgtaatccgtctcaatcggcttctaggaaattgcgatataagggattaaagtatactctgttggatggtgagctatattatcggacgattgatagtgttacttaagtgtttgggtgccgatcaggctaaagatgcaatcggcgaagttcatgaaggaatttgtggtactcatcaatcggctcataagatgaagtggttacttcggcgtgcagggtatttttggccgacaatgctagaggattgtttcagatattatagggggtgtcaggattgtcagaagtttggggcaattcagcgagctccggcatcggctatgaatcctattattaagccatggccattccgaggttggggaattgatatgatcggtatgataaacccaccatcgagtaaaggacataagtttatattggtggcgactgattatttcaccaagtgggtggaggcgattcctttgaagaaagttgattctggggatgcaattcaattcgttcaagaacatataatctaccgttttggtattcctcaaactattacaactgatcaggggtcaatcttcgtgtctgacgagtttgttcagtttgccgatagcatgggtatcaaattattgaattcttcaccttattatgcacaagctaatgggcaagctgaggcgtctaataaaagtttgatcaaattaattaagcggaaaatttctgattatcctcggcagtggcatactcggttggccgaagcgttgtggtcttataggatggcttgtcatggatcgatccaagtccctccttgcaaatttgtttatgggcatgaggctgttttgcggtgggaggttagaatcggctctcgaagaacggaataacaaaacgatttaacagctgatgagtattacatccttatgtcacgattgcgagcccttgcaaaggttaccaaggataaggaacgtattgctcggcattataataagaaagtggtacctaaggatttttcggaaggagaacttgtatggaaattgattgtgccgattggtactcgtgatagtaaattcggcaagtggtcgccgaattgggaaggaccgttccaaatttataaggttgtgtctaaggaagcatatatgttgcaagggcttgatggtgaagtctatgggcgagtgcccaatggcaaatatttgaagaaatattacccaagtgtttgggttaacgcatgatcggctagtattgccgatgcatgacagccaatgtgtttgcatcgccttgagatggccgatattgttatatcgcccttagttgttttttcaagaggtaatcggttgtgatttgccgatgtacaatggccgatattgttatatcgcccttagttgtttttcatggtgtaatcggttgtgatttgtcgatgtacaatggtcaatattgttatatcgccgttagttgttttataattttatcaatgcttttgtcattgtaaaattaggggggcacatatatatcaaaatgcaagaatcaaaattcaagacaaaaatgcaatgcaaattttttgaggcaatttttttgagcgaattttaaaagtcatattaatcggcacaaaggattgtcaagacaataaagtactagagcatcttagctgattacaaaaaatttctgagtcctattacacaaagttattgagagaagtatcgctggatagccaaaatagccctttgcctgattttttctacttcttcaatagcttgggcatcttgagcatcagttccagagatgactttcagagacttggttaggtcagcaacattcttgatagccgatttgagccttgcttttattcttcaattgattttgggagatcggctagctttttgtgttctatatctagctcggcattgcattcttcaagttgcaccaagagctcaattttgtgagcttcgagccagtcaatattggatttgatcggaccttcagatagctgatcaagtttggttttttcttcatgcacaagctgccgattagcttggattgtggcctcaatctctttgcgatcacggcgttcggctagtcttagcttggctttttccagcttgaactgatgttgctcgagataagcggctggagttaggacatcggccagatcttcgggaatcagagcttgaacttcatgtagccttgtcctaattgacccacagtcaactaccaaattgtctaaagaagaggcttctagccgatgagaaatgtcttcaagtgtttttctcacatcatcgaataggggagctagggctttgcttgaagtgtcttcttctgcttcgtcaaggtaatctctgatgtcaaaagagaagagatcagctagtgcctgtagagacaatttcggaaagaataagagctgggtaaattatagccgatctaattgttgagacaaagggaaacttactggaatagcaggagcagctggttgttcttcctcttcgacgtgatgactccccacagctgatggagtttgatcacttgaagattgctgtacaggaggagaaggaggaggaggctgcgaaatagacaagtgttatatagaatcggttgagattgattaattaaaaggattaaggacatctttctggtggaaccgatttaacaattgttgctgctgttttttttcttcacagcagttttcttcttctgcaaccacaaagtctatgggtaattagctgaagagtgaggtaatttcagaagaagtcagagaaaggtacttactcttgtaaaatgaacgggggcagaaggagttggaggcgtttgcttgggtgaagccgatggtgttctttctatgtcactcatttcggctacagcttggtcaacatcttcatcaatttcctcttcatctaaagcttgttcaatagatggatccaaggcgggcagatcatcagtcgacatatcagttggttgtggttgagttttcttgaatttggtctttttctttggagccaaggataaggtactcatggctgatgatctggttttccttttcttgcctgcgtcggctggttccctagttaggccgtgaaggagagttgaagtcttgggggcatggtagccgatgaaagggggagatagtccacctccattcggaattagatctgaagcatattcaatgttcttgacactgttactttgatgaggaggggaggactctgttgtctgcaaaacaggagtaagaggtcagtcaagtaatgaatcggctaactggttatgcaatttagtaatgacaaagtttaccggggcatgatgtcagggaatagatctgtcacatacattgaagccgattgatgaaatagatgcagcttccattcgccccaccatctatcaaagtttttgcttctaaatcttgccaactcaatattatcaatactgcccagagggggtcctggtaggttaagtagccgatccatcattagagtggaagtgatttgtcctcggcactgaatcttgtcggcaaagaataagccgattgggagttggcccaatccaagttgtctggccgagctcattgggtgataaaactcgtaagagacttggatgtttcttccttggtgaataccgacagggaggatgcatgggctgattgcagctataagaatttctctggatttttggaattttttatggttaatatcttcaaatctaaagtctaatggaagttcaaggtctgctgagtcttcgtagggaaaccagattcgtgcatctttcttaaaaccttcgtagaagctgcagaaccagtcttgagtaactcagccgatagcttcgctccagcatcggttggtgtggatgcatattctccatatgacatgcatctgcgatgggtgcgctcttctccatcatcttccacaatcggctctggcaatgggaattcagcttctgtcacagagggccgattgacaaccttcatgactaccaggtttaaccaagtttgcagcagccaccatggtccacctgctccaactattgagccgacggctattttagccgatgcattgttcaacatctggtacagatagccgagaaggattttgcccaaaggaaattctttctttgattctaaggcttcggctacgaattgccattggttgtagagcaacaactggatccacagaagaggaatttttccagccaaataagcaagaaagctacatgctctcgaggggtaacagacccttggcccatatatgccgccacatagccagaccagccacctatgcttttggtcttgaagttgaattggttcttggtgttcatgctcatagggttagccgatgaagttacatctaatccagtaatcatggtgatgtcaattaaagttggagtcatcggcccttggttgaataagaaagcattaatggtgttggactagaagtaggtggcggcagccatcagaggttcatccttagtagaattggctatggtgagagcgagtgcttggccgattccaatttcatcccagtgaactttcttactagccgatacgcgttggtactaggtggtccagctcttatcaggagtaggtttttcgagagatggccaagacttgaaggtattcttccagtgactcaggttagggttggctagtctaaaggggatccggttagtttcaccgatgatgaaatcagtggggtcgagattgccgattgggccaagaaaatagtggtttttgtgtgaaaggctgggaatcgcgactaggttggaaaggtgctgcaaatccaaaggaattgggaagtagaaaacaagaggagaaaaggagaaattgagttcatgcgaggaaaagggaactagctggtgaggacttacctcagcgtactcagccgatggcgcagtagaagggctggtggaagacgacatcgccgcgggcggagatttggttgggaacaaaatcgcccggggatcgtcttgtgcgtcggggagatcaccggagagagagagagagggcaaagttggtttcagtggcaaaaacggaggaggacggtgtgagatttctcgagggtaacggttagtatttaaagcacggcagtaacggtcggaaaacggcaaagtgtgaaacttgctcggagtcgatttacagcaaatctgaaactctatcgaatattccggacttcgggggcatgtgttaacaaccaaatttggtaatatcggcatcgggaaagaagattagatcgaagcaaagttggaggcagagatcgagttcggaaacagagcaggaatcggctggagtccagatcggctacgattaggatcggctgggtctgagtcgggctaggtaagccgatgcagtcgattccgacaatgcaacatgatgtatgacatcgggttgaattgaggtgcttcaaggtgattgccgcacatggatagagtcatgagaaggcaattgtatctattaattaggatgttttatgtaatttcattagagatatgcttgggcaaaagtctgccgcaaagacttatggtatcttagagtttgttagagatagtagtcgtgtccgttatggacatatcttgtaattctcgggtataaatagacccgagccctatgtaacttttaacacacacgttcaatacaatttcggcgcatcgccaccatttttgctttagttttatttcgatgagttcttgctttcgggttgagctgcatcggttttgatcttcaacaagaggtaaaacttgttatggcggcttgtgttttcgggattagtgcttccatctttatgacactctaattttgtttatgtaattcgtcgagttttcatatatcctacataatccttggcaatatcgatatctgacctacaatcggctaacatccatcagtagaaggcagccgattaggttaaatgccgttgttgacttagattatataggatatctaccactctatgacacatccaatagcttgattgtctagatattgtccttcttttcatacttatagctgcatcagttaagtttgatcttatgagttgtgattagaatctcaatctctagcccgcttcttggttgctgattagggtagtatcggagtttcggagtttcagccgatcttgcttgatttaactactttttatcctatatgcttgattgacatgttaaatctgccctttacgttaagatcttgctgcatttaagtatattaagattttgtttagtatattctacttgctttaatatcttaatatagagtggtatcggagtattagctgatacatgctagatctatctgatcggctatgctatgaacgtatatagtctcattattaatatatatttcgatctaagtgatttatactacctcgacatggcgaccgatctatcccactcaattgatttaagtatatattgatataaagattatatattggtaatatctgcagctgatcgagtaattcaatcctttcttatttattaatgactgccgatcgatgcatatacgacatcggctcaaagataaatgatatgtcatcggcacctcgccgatcggctatcatttatagatttaactgcgatttctttgcttctatttcttgttgattacaggatcaaatcaactggcacgctcatacattcgaatgcgagctttggacctgcactggagttaagaagatctcccaggcctcgtgttttctgtcaacagcgtgttgttcagagttgaataaaattaatgattaaattactctactgtttcgctactcttaaatctttgctaaatgctgcttttgcaaatgagcctatattatgccatcctttggtatccttgtggacttgcatatttgttgtgtggcttgttgagtatgtcatatgctcattcttgcaataatcaatcaacctcagttgaagaaaaaggatccagaaggagaagacgtttggcttataccccagttgagctgcctatgggggtgaagctggagcttcgctagattttatttttccacagcagttttcttcgttgtgaggactaagtgcctcttcagtaagtattaattgctttagttattttgatgtatctgtatataaaattgtcagtttgtgtacctcggctgattcctggatggggattttatgcacaaataagttcggaaattactagtgaatttccgggcgtgacaagttggtatcagagccatctcgactgtaggataagccaaatggtcagactttaaggacaaattttctgaaaacatgatttgtgaaaaattttcttttcttccttctctaaaattctttgcaaattgttttatcgttctttcccctcccactttcaacttaagtagttgttaaacttattagagaaactcgaagacgtcgatgtggtctacttatggaggtcaagtcaagtgagtcgaggaaaaagaagataatggtcgaactgaagtgcggagcttttgtgatggagtgaagtttggatcctaccttagaacctaaaccaccaaagtgactttgaagtatagtcagtagggtacaacgtttgttacttgcttgtgtgtaggtatggttgcattcccatcattgggtgtgatgagcgtgtaattatactaggttgcttgcttaatcaacttaaacaatataatggtttacacacatcagatcagtggtaacatggttaaggtctcgtctttagtgtgacccctctccttctaacttttcaaactctgcgacggataaaaaaaatgcaagctatagtgggaaccacaacaatgctagtggatcaggaagttggaccaatggatcaatttaggacaatcacttgggcagagttcactgaagcattaaagaagacacacatagctgcaggagttgtttttttgaggaaacgtgagttcaagacacaaacaaaaggatgataccatgacagagtacctccatgagttcaaccgtctagctcgctatgctctagaagatgtgcgtactgacgaagaaaggtaggagaagttcttggaaggtctgaaggatgagctgttaattatgttgatccctcatgactgcggatttcaggagctggttgtcaaagcaattcgactggaatataagaagaacaggatggacaaccgtaagagaggaaggattgtttcccaggaggcacagggtagtagccaaaggcagcgtaccaagccactccaaattggtgaatcttcttctgcatgtcaagaacaattacaacagttggacattagtggtgagatcaactcagagactaatacaagaaatgaagttaacatggagaaagctactcaattagtgctagttcagcaggatcagtctcaagaaggtaatagtaatggaagggagcagcagttgtgtttcaattgttatgagccaggtcactttgcaagagagtgttcgaagccgaagcatcaacatccacaaggtcaagtcaacaacatcatcctcacaggagcaaatgcagtgccggttgcgtcttcaagtgatacagctcagcgatcagtttcaaagcagcagtagtttttttaaagccttagaataattattggagctagggaataagatagactgcagttttacctatttcctttttctttctagccgttccgaatctcgagacgagattctttgtaagggggtagatttgtcacatcctgattttcgttttaggatttataaattatctaataaattattattagaatttatattaaatgttcattaatttacaagtgaagttaaatgtggaaaataaaatttcctaaatataaagcatggatggatttaatttttattcaattctccatggttaattatactctctggaattttctcggatttttcggagctcaactcttaattttaatcatacaaacaatatttcagtaattatccacatattaaattaatcattaaatggtctggttttagtatttttaaatactttgagtgtccaagtatgttcaagatttttcttggaattatttgagcataggaagtatttttaacaattcaaagatcatttcagtgattaatttaattgaaaaagtaataaaaaatcctcctcctcagcttgggcccttttcagcccattccctctccgctctcctttccttagccgcagcagcccactctccctctttctcttggctgaagtccattcaggtccctccttcagtcgggccggagaaaaagtaagcccagacaaagtctactttacctccccggtactgttcatcttccagctccagacagagcccgagccagccgtcccgagattgtgcagcgccgttttctcctccaaatctagtctcctctctcgtgttatttcaaaattagttgaggggaaatattcctcttatgcttctctatctttttcccccaagaatcggactttatcccgaagaaatcaacgcggaatcgagctcgattcgtgtttatctctccaccaaaccctaggttttcctggcgcgattccttgcgttccaagcgcgatctctctctcccatggctataaatagagtcccctccctctcctctttcggccgccacctctccctctctccgccgtcgcttgtagcgccgtcgccgcgttcgtcttctctctccgccgcccgcagccgctccagccgccgtttgccgccgcctcggccgtcgccctcctgtgccgccacctctctcggctccgcaaggtcaagagcaagcccggcagccggttcccttgcgccgaagaccccgggaagcccatcgtcgccatcaacccgaagctcgccgtcgtgttttgatctccggcgaggctctgcagctcctcccgtcatcgccaagcttcgccgccgcctccattggattcgcagccgcgaagtgaagcccggccacccctccattgtcgccgaaggtcgccgaaacaccgtcgccgccgtggacagtacctcgctgccatctcgatctcgtcgccggccatcttccgtcactgtctgtcatcacgtaagtgttggtaagaatcgccgtcgccttctctacctctcggtgccctctgtttgcattgttgtgttgtggttcgccggcaaccgccgcacctatgtcgttcaccggtgtagtttatccctagggtcttaattcaatataatctaatccgtggttgatctagcgcgttgtcatctccgtgtgttgctgtcggaacgttgtcatcatcccttcctctccgatcgctttggttcggtgcgacttctatccgttctctcttttcaatggtatattatttctttttaatatatgtcatctaccaaatataatctaatctttttcggaggtcgttttaatcttttctctcagttataaatcatttgtaaatggtttaattaatttggaatagtcttttctttaatatgtttaattggaattaaatcttataaaattcatatctaattcatatgaagtcggaatgaggccgttcaagtctctaaattcatctaaaatcatgatttacatgtttgtttacattttatgtactgtttatttggtttttattagtttttttctccgttttgcgtgttagcttgtcgtttccgttgttgcgaaggttcgcgagtgtgttggaagtggttctgaagactaattgaagactgattattgcaaggcaagtcacacagatcccaaacatgattcctttgagcatgttgatcctatatttaaattctctatttatttcaacaatgcatttattttcgaatgtcaccgggtggtgtgaacatattcctttgttatggccaatttgtattgaatgccctattccttgataccttgggtaataaattgattagcttgaaccttatgtattggtttggttcagctaaatgctatatatataattgcttagccatgcctagaaacattagttcattaataggatgaatcctactacattattatttatggttatatttaatggtacctcacgatggttaatcatgttataataattaattgataattaaaacttgataatggtgggttgtgagcacatggttttgaaggtcgtgctcatgacaattaaggaccggttcgcgagctactgttgtgagacattaaccgtgccaaccacaagccagcgtgggcaacggctttaccttttgtatagcatggttcattgcggggcaccagactgtgaagcggcgagaagtccgtgggggtcgctggggagtccatgcctctggttattgagggggtgattatgatccaggaacggtggctgtggtggattgtgttgtgcaaggtactgtcacagttcctatccgagatatcatggtggtattgaggcgcatggtaacatgtcgtggagctgtgtcttgtgggtacagtggtacatctctggccagagtaaaactattcgaatagccgtgcccgtggttatgggcgagttgagcaatgtttttcgtgattagtctcatacctctcacaataattattgatgctataattggtaataatttgcttagctcctggtttggagttagatctgtacagccgggtatggttgttcagaatggttgggcctgagcagcatgggcgtattgttcagagttgattaaaattaatgattaaattactctactgtttcactactcttaaatctttgctaaatgctgcttttgcaaatgagcctatattatgccatcctttggtatccttgtgcacttgaatatttgctgtgtgacttgttgagtatgtcatatgcttattcctgcaataatcaatcaaccttagttaaagaaaaaggatccagaaggagaagacgtttggcttataccccagttgagctgtctgtgtgggtggagctggagcttcgctagattttatttttctgctgcagttttcttcgttgtgaggactaagtgcctcttcagtaagtattaattgctttagttattttgatggatttgtatattaaattatcagtttgtgtacctcggctgattcctggacgggggttttatgcacaaataagttcggaaattacctgtgaatttccgggcgtgacagcatgtatgcaacacgttgcttcatccatgtgactttgagaaacgcggcataactagtgtttccaagctttgccatttcttggttgcatgtgatcgagctgtaatctaaattcgtaatcttttaatcttttgagcgccgcactataatcaggatgatgatgttgccctcgatcaggtcactgggcccaccatcttgctcagaccgctagcggcgcacacagtctttgccttgagatgataacccctcaggcggagatctctgtgaagagcatgaggcaaccaataccagcgggcttctcgttagaattatcagatgttttgcttttaccctgggatagcgtcaatcccccgggctgtgttctaccccggggcacgtactgtgcctgggcccattggacggacccgagccccaggcacagtcccgtgctttgtaatagaagtcttcattatgttggacgaatttctggaagatgtcgttgatgaaggagttcatgatggacacaactctacaagtttattccaatacgcaattgtatctatgccttgaagatgcaaatcttgatggaagccagggcttaagggaagcaagggacccaattcttgttctgtgccagatgtcagtccccacatatgcatgccagatgtcagtccccacatatgtaggttgtcacctggcaaatgaattctaaatatgacagaaagtaataatgtggcccatggtactttaggatcccggagaaagggggaccccggttcccatttctccaacacataggattcttcaaaataataaatttcaaaaataaaaactcatgtgttgcaatagttccctttgttccaccggtcatatgtcataaatcatactggataaattgtctactttgcaaaacaaataacttactcttatttcatcattattatctagctattattatctagttgcttgttgtatacctggtttgagcatagaatttgatattcctcttaactcccagatttggcacctagctagagtaagaataggaaaacatggccagatttaaaaagaacccaaaacttgctatgcgaggccagtctaaccgccactgtagggtaaacttgaatgcgtaatattattactaaaagttttttggtgagcttaggtagatagtgcaatgaaggcgtgcggttttatggtagtgagtacaacatatcacttatttagatgtggcaaaacttaagtatatcacaatgagtacaagtttacttgcgattatacgtttcaatagccaaggctttgagtggtgtctctttgtgaagcaccatcccatacttctctctcatatccacaccatctttctcggctccttctggaagcttccagtcgaagtgaaacaacagtgacgcaagaaccatatgaaccatcctgtacgccagtggcaaaccaaggcagatccgccgtccgccaccaaacgggatgaactcgggatgcttgccgaagaaattggtgtccgtctccatgaatctctccggcataaacctatcaggatcagcccacacgtcaggcttgcgatggatcgcccaaatattcagtatgatgttggtgcctttgggaataatatagccttgcacttccactgtagcctctgctttgtagtacgtcattgggacacttgggtggagccggagcgtttcttttagtacagcttggaggtaaggaagctggctaatgtcagactcctctatctctgttctagtacccaaaactctcctaaactcgtccttcaccttctgcattgattgtggattttgcagtaattcaacaattgcccactctattgcagttgagcccgagtcagttccagcgacaaataaatcctgggatgtgtgttgatcaaagccaattcatcaatattatgcagattgtgatgaacgattgaaatgataactaattactaccgtcttctgtcaaacgaaaatgaaacactaattggatgtcattatcatacattctcgtctcgtctcgctttccattgaattgagaaataatttaagattcaagaattaatcataccgcgatgagtcccttgatgttattacggtcaatcacaggattgttgttcttccattcgtcttcgttatcgagcgccacgtccagcatgtcatccttccgcggctcgccggcttcacggccacccttccgccgagcaagaagctcgtcgatgatcccataggcacgcgctactagcttccccatcctgcgccgcaagccctgcaggcaatgttttaaataacggggttaaggcatttatcggttagcttctcaaacagttatagcttccgctacagtagactaaatggagttataacgactaaattgtacatgagagcaaatagctagaacccttctcaaacagctatagcgggagatttaaaaccctgcctgcaggtcggcggccgccatcgccgggaagaagtcggaggcgttgggcgtcgcggctagcttggtggcctcctggacggcgtccctcaggtcgggtcgacgaggtcggcggagaacgcggtgcacgacaggatgcccaggaatgcctcgaacgcctcgagcccgacctcgacgggctcgccgcgcgccgctcgcctggcgacgcagcgcatcagctcccgaaccttctcccgccgcgtcggcgccagcgcgtcgagcctcctgggcgacatgacctcctccgtagcgagcctccgctgcgcgcgccacacgccgtgcagcgggaggacgatgacggagttgcggtggtgctccgcgccccgccacacgtcgaacagcgggcgggacgcaaggtgcgcgttgtggctgtggtggtggatatcgcccgcgacggccggcgacgaggcgacgacgtaatcgacgacgccgagccggacgcgcatgagcgggcagtagcgctcggcgaggcgcgcgagcgagcggtgggggccgctccgcgatacggacaggaggttgccgacgagcggaagaggcgttggtcccggaggaaggcggcggcggcgcgcggcggctactcggtggtgcatggcgaggtagagagaggcgaggacgatagcaacaagcaaccaagccagggatgccgccatggctagcgtacgttcaaggggtacgtacgtgctgatcgaccttgatatgatgcagtagcttgcaccatatgcctcaatttatagtgaatgctctggccattagaatgctattactccttccatgtcatattactacgtgaataccccgccgcattgctgcgggaaattaagttatatcatatgtataaataacatacaatacaattattaaaactaaaacaaattgatacttatgaattttaagccgaaaataattgagattgcatggtgttatgagagaagaaagaagagacaatttgaaccacagctctatcatccaaatgctagaaataattgaggtcatgtggcataataagagaagagagaaatagcattaactatgtaggatctgttaacaaccaaatttggtaattcaggcatcgaaggtaaagataaaatcgaagcagaatccaagatatggatcttccggaaacagagtaagaatcggctgaaatccgaatcggctgcgaccaggattggcagagttcgagtcggacaaggtagccgattgagccgattccgtcaaagtgtcccgatacacatcatcgagttgagttaatgtgcttcacatggattgccacacacggattgagttctgaaaaggcaattgtatctattaattaggatattttatgtaaataacttagagataagcttgggcaaaagtctgccgcaaagacttatggtatcttagagtttcttagtgataagagtcgtgtccgacaaggacatattttgtatctcggatataaatatgactcgaagccatgtaatcaaacaacacacgttcaatatcaatcttggcgcattgccaccctttttactttcgtttcatcccgacgagttcttgctttcgggttgagctgcatcggtttcgatcaactagaggtaaatttgtcatggcagcttgcgttctcgggattagtgcttccatcattataatactctaatcttgttcatgtaagttgtcaagttatcatatattctatgtaatctctagcaatattgttatttaaccctcaatcggctaacatctgttaatgggaggcggccaattaggttaaataccaacgttgacttagattatatagggtgtctaccactctatgaagtttccaaaagcttgattgtttagatattgttattgttttcatacttatagctgcatcagttgagtttgaccttataagtcgtgattagaatctcattctttaacctgcttttggtcgctgattaaagtagtgtcggggtttcagccgatattacctgatttagctttatatcttatatgcttgattgacatgctagatcagccctttatgttaagatgctgtggctttcaggtatattaagctttctgtttggtatattttgcttgctttaatatctttatatagagttttattggagtattagctgatacatgctgggtctatttgatcggctatgctatcaactcttataatcttttcgtcaatatatatttcgatctaagtgatttatattgtctcggcatggcgaccgatctatcccaatcatttggtttaaatatatatcgacaaagggattatatactaatgatatctacagccgatcgagtagatttagttctattttgcttatttacaactgccgatcgattcaaatatgacatcagctcaaaggtaaatgatatgtcatcggcggctggccgatcggctatcatttatgggtttaactgctattttcctattttatttcttgttgattgcaggttcaaatcaactggcacgctcacgaacctaaaaggcaagatttttggaccggcactgaagttaagcagatcttccaggccactgtctgttttccgtatcaacacgcttttggtacgcccagtgggaccgagtttcaataacttttctcatggctgagaaaccaccgcagtcgccagcgacggtgggcaaggccgagccacctcttagcaagccaccacctgggcaaccgtctgaggtcaataagggaaacatcatcccaatcacattagataagttgtcagctgagcagaggcaggagctcgagcagatgatgagcaccgtgaaggacaaattcatgaactcattccaggagacccacgagggaacggtcgtccaaaaatataagctcaaagtggtcactgccgatgaagctgggacaagttcatctcaaggtgttaagggtactgcagattgctcaggtgataaaggtgatgggcttcaagatggcttggtcgaggatcttggtgaagatggtaccgaagagcaacaacctctgaaattcaacagtttccaagatcaagtcgattatgctgtaaagcatgcgttgatgaaccaattaggagttattgtcaatactttatcgaatatgatcaagtcaatggttgatggcacgatagctgagcatcaaaatacgggaccagtttatcttccaggaggtgtcttcccaaattacagagagttggtaactggtaaccaacagcccgctatcagtgcaccaccagcctagccgatggcaccagcttcggctcctgcgccagttgcaccgtcatcggcacagaggcaaatgaccaatcccagattgctgaccagagaacgaccatagcatgctgcgcaaaatatcaatcggctgactcaggaacaggttgccacgatgtttctaccaacaccaccaactactgatccagtacagtcaatgctggttcagtaaacaccaccaaggcagcaagtagtacagccgattcaacaacaggtggttcagccgattcagcagcaaatggtgcgacaagtgccaactgggttgaggacacctgacaatcggcaaagacaacagaatgtagctcaagttatccctaagcatctggtgcataatgtacaaccaaatcaatcggctgtggctcaagtcgttcctaaacatttggtacacaatatacggccgaatttccagaattatcaagggggtaatttgaactaccagtatcagcctccttcacctcatgtccagcatcaacaaggtggatcacctcaattgcagacattgcctcagttcagccagtttgatccgatgcagcaacagatgcaaggagtacctcaacagaaaccttgggcagatgtgatgagggagcaatttggccttaagccaaaggactctggaaatttgtatcggcacttgtatcctgaatggtttgagaaggtttcattgcctaaccgatacaaagtcccagatttttcaaaattttcatggcaagacaatgttttgacttatgaacatattagtcgattcttggctcagtgtggtgaggcatcggctgttgacgctttgagggttagattgttcccattgtccttgtacggatcggtgttcacttggttttcttctttgccttacaactctgtcaatagttgggccgatttggagaaacaattacacagctatttttacagtggagttcatgagatgaagctatctgatttaacagcagtcaggcagaggcatgatgaaactgtacaagactatattcagaggttcagagagatgaggaatacgtgctacagtctggctttgactgattctcagttagccgatttagcttttcaaggtttgatagctcgaatcaaggagaaattttcatcccaagactttgagagcctatttcatctcgcacagaaggtgactatgcatgagcaaaggtttgcggaggctaagaagaatttcaagaagatcaatcatgtatatccttacatttatgactccgatgtggaggatgattccgaagtagcagcagccgggtgggttaggagcaaaaaggttgtgacatgcccattggtgaggagttctggaaaggaggaaagatttgactttgatatcaccaaggctgacaagatttttgatttgttgcttcgggagaaacagattcaacttcctgctagccatataatcccatcggccgaagaattaggcaaaaggaggtattgcaagtggcataattctggtttttattatactaatgattgcaaagtttttagacagcagatccaggtagccattgaaggggacaaaaatcaaatttgatgattcaaagaagccaatgaaggttgatggtaaccctttccctatcaatatggtgcatacttctgggaggacagccgatggaggaaggagccagaattctcaattgaattcggttaggattatcaacaagtatcagaagaagcatgataaacagcaggaaaggtttgatgaagaagttgatgatggttttgattctcattgggattgtgaattcttcagattttattggaatcaaggcatgaggttaccatcgattgaagattgccctgggtgcagtgatattgcaggagttcaagccgatcgtataacagaagctatcggccgagtcagaaaaggttgcctgttcatcagaggttgggcctgatcaatcaagaccgtcaccaggatgaagatgaggatggaaagacacagtggtgtccttctggtattttcacaaagaatcagaagagaagagttcaacggatgaggaacagggagcgtttttaggaggtacaacaagaaattaaccatcggctgaagaagacaaagaccaagcaagagtggcgtgttaagagcacggtcacaacagccgatgaagttgaagccgacaagaccaaaagattgctcaagggtaaggctactgcatctgcatcggtgaacatggtttttatgctgcctgcagaattcgaagccaaggaagccgatgttgatgatgttgaagaagcttctgctagattggttttgtcacctaaacaaacaatttttgagaaaccagaggggacagaaaatcggcatttaaaaccattgtatgtcaatggatttgtcaacgggaagccgatgtccaagatgatggttgatggaggagcaactgtgaatttgatgccatgtgctacattcagaaagttgggcagaaattcaaacgatctcatcaaaactaacatggttctcaaggattttggtggcaatccatcggagactaaaggagttttgaatgtggagctgacagtcggcagtaaaaccgttcctacaacattttgttgtgattgatgggaagggttcctatagcctgttgcttggaaagggattggatttatgctaattgttgtattccttcaactatgcaccagtgcttgattcgatggcaaggtgacaaaattgagattgtgccagctgacaggtcagttaacgttgctagtgccgatttagctctttgggaaatggatggtattgattgcttgtctggaaaagtttgggatggagattttctaaaagtgtccgattgtgacatacagctaattgaagatggagagcccaagctattactttgagggcattgtggagggttcaaacgtctactcgaaggacagagtagatgatctcgatgacaagcaaggacaaggtttcatgtcggttgatgatttggatgaaattgacattggtccaggagatagaccaaggccgacattcatcagtaagaacttatcttcagaattcagaaccaagttgatagagcttttaaaggaatttagagattatttcgcttgggagtattatgagatgccgggacttagccgatcgattgttgaacatcggcttcctattaaaccgggggttagaccacatcagcagccgccaagaagatgcaaagccgatatgcttgatgctgttaaagctgaggttgcacgtctatatgatgctagtttcattcgtccatgccgatatgctgagtggatttcaaatatagtttcggtcatcaagaaaaatggcaaagttagggtgtgtatttattttcgcgatttaaacaaagctacccctaaggacgagtacccaatgccgattgccgatcaattggttgatgctgcttcaggacataagatacttagttttatggatggtaatgcaggatacaatcaaatctttatggcagaagaagacattcataagacagctttcaggtgccctggtgcaatcggcttgtttgaatgggttgtgatgactttcagcttgaaaagtgctggaggtacatatcaaagagccatgaattatatattccatgacttgattggctggttggttgaagtctatatcgatgacgtggtcgttaagtcaaaagaaatagcagaccacatagccgatttaagaaaggtttttgaaagaactcggaaatatggcttgaagatgaatccaatgaagtgtgctttcggtgtatcggctggccagtttttgggattttttttgttcatgagagggggatggaggtgcctcaaaggagtatttacgcgataaaaaagattcaacctccggaggacaagaaaaagttacagaaattgatcggcaagataaattttattagaaggtttatttcttgagattgaaagccgatcaagagttaacctggggggcagaggaacggaaggctttggataacattaaagaatatcttagttctccttcagttttgattcctccacagaagggagtgcctttcaggttatatctattagccggtgagaagtcaatcagctcgattttgattcaggagcttgaaggcaagggaagggttatattttatctgagtcgcaggcttttggatgttgagacaaggtattctttctgtggaaaagtggggtttgggtttatatttttcttgcacaaagttaaggcattatttattgtccaatgaatgcactgtgatatgtaaggccgatgtggttaaatacatgctatcggctccgattttcaaaggaagagttggaaagtggatatttgctttaacggaatttgatcttcggtatgaatcactaaaggcagtgaaagggcaagctgtagccgattttattgtggatcatcgtgatgactcaatcggctcggtcgagattatgccttgtaataagaacacaactagctcggatataaccatggctactttatgtattactcaaccaaaggtgcatatgttctatattagatttacttgttatatatttgaacaaacattgcaaaacgatgagttttgtgtgttttcgtttgcagaggtacttgcttgggcgaaagaaaagagaccgagcataagaaatgcatggatgattgaagaagttgattagggaccaaaccaagaccttctccaagtcttctttcatctaaccacgtcacttttggcccatagaagacaagagattaagttgtgcacgttttggaatcggattcgggcctcctaacatgatcaacttcaaacgaacctagccactgatctagaaggaatttcggggcccatgaatacttgttggaaagcttatggagtctactttcagatggtttgtgtcccatgttaatattcctattgagctgccgggaatccgcaaaacaagccacgtatctcatacagtccgaatctgatttgggttctgggccatataattttgtcgtgggcttagcccaagggggtgtgcaccctaggcaatcctaggacgtccctaatcacattttttcagtacccgtcaacgtttagagtggggttttgcttagattaatctgtcaagaacagttttgccgctagatcggtttgtggaaccccaaatttgtgtgcttaatcattcatatgcaatttggttgcaatctatcttgttcttgcttgtgttctttgattcgcatgcagggattagctttctcggcgaggtcaaccgggtttcggcacggttgataaccagaggagacgtggtgctacgattgcgggggtcagtagcgtgtacattcagaagctggatcgagttgtgtcgcgactctgcccaaatcgactgtttatcaatacctatcggaagatcgggacctaacatccctcatcaccttggactttgtttttcgatggatcagtgtgcactcatggttgtcgtttcggcttagtcataatttctcctcggagggcaagtttcgagtttgcctacatgattaaaccttatgcaactaacaatcaagctgaatatgaagcagcactcaagggtttgcagttgttaaaggaagttgaaaccgatgctgttgagattatgggagattcattattggtgatcagccaattggcagaagaatatgaatgcaaaaatgatacattgattatctacaatgagaagtgccgagaattaatggatagttttcggctggtaactttgaggcatgtgtctcgagagcaaaatgttgaagctaatgatttggcccaaggggcatcgggatagaagccgatgataagagatatcgaagtggaagttgctatgatcacagccgatgattggaggtatgatgtatttaattatttgcagaatccatgtcaatcggcttcgcggaaattgcgctataaggccttgaaatacaccttgttggatgatgagctgaattatcggacgattgatggggtattgcttaagtgtttaagtgccgatcaagccaaggtcataatgggcgaggtacatgagggtatatgtggtactcatcaatcggctcataagatgaagtgattgcttcggcgtgcgggatatttttggccgatgatgttagaggattgcttcagatattacaaaggatgtcaagattgtcagaagtttggagcagttcagagggcaccagcatcggctatgaaccctataatcaaaccatggccgtttaggggttgggggattgatatgatcggtatggttaatccaccctcgagcaaaggacacaagtttatattggtggcaaccgattactttaccaagtgggtggaggctattcctttgaagaaactagattcgagagatgctatacaattcgttcaagaacatattatttaccgatttaggattcctcaaaccattacaaccgatcaaggttcaatctttgtgtccgatgagtttgttcagtttgccgatagcatgggtatcaaattgttgaattcttcgccttattatgcacaagctaatggacaagtcgaggcatctaacaagagtttaatcaagctaattaagagaaagatttctgattatccttggcaatggcatacaaggttggtagaagcattgtggtcgattggatggcttatcatggttcaattcaagttcctccttgtaagcttgtttatggacatgaggcagttttaccttgggaaattagaatcggctcgagaaggatagatttacaagatgaattgacagccgatgagtattacaatctcatggccgatgaaaaggaagactttgttcaatcaagattaagagctcttgctagagttactaaggacaaagagagggttgctaggcattataacaagaaagtggtgcctaaatatttttctgaaggagagcttgtttggaaattgattttgtcgatcggaactcgagataataaattcggtaagtggtcaccaaattgggagggaacattccaaattcataaagttgtttccaagggagcttacatgttgcaagggcttgatggaaaagtttatggacgagcacttaatggcaagtatttgaagaaatattatcccagcgtgtggattaattcacgatcggttgcgctttgctaatgcatgtacatccaatgtggttaacatcgccttcagatggccgatatagttatatcgcccttagcagtttttgtttatcatattcggctgagttttgccgatatatgatggccgatatggttatatcgcccttagtcatttatgtaatcttatcataatcggttgtatcttgccgatgtatgatggccgatagttaatatatcaccgttagtctcaaattataattttatcaatgctttcatcattgcaaaattagggaggcacatgtataaaaaaattgagaatttttgagtaaatttgagaattttcgagcaaattgaaaagttatgttaatcggcacaaaggatcagtaggacaatcaaaaggagtatcaaagtttcttagccgattacaaaagttttataagtcctattataaagataatcacccagacaagtaacgttggatagccgacacagcttgttgcctaatttgctctacttcttcaatgggctggatgtcttgagcatcggttccaggaatgaccttgagggatttggtcatgtcggctactttcttgatggccgatcttagtctggacgtctgttcttcaacagcgttggggagattagctaatttttgtttctccagatccagttcggcgttgcattcttcaaattgtgctatgagatcaattttgcgggcttcaaactgatctatgttagactgaattggcccaatagagagctgatcaagcttagctttctctttatgcacaagttgccgattggcctgaatggtggcttcaatatcctttcgctcccgtcgatcggctatcctttgcttggccttttccagcttgaattgatgttgctcgagatacacagctggagagatgatattcgccaggtcatccgggactaaggcttgaatctctgcaaatcttgcccgaattgaaccacagtcagctaccaagttgtccaatgatgactctagccgatgagagatatcttcaagagttcttttgacatcttcatccggaggagctagggtcttacttgttgtttcttcttctgcctcttcatcaaagtaatccttgatgtcaaaggaaaacagatcggctaagacctgcaagagagaaaattgaagacagttaaatttaaagctatataaccgatctaagaattatgacaatgaaaggattactgggatagcaggagcggctggttgttcttcttcctcaacattatggctacctgcagccgatggagtacgatcacttgatatcggctgaccaggaggagaaggaggaggagcctgaaaaggacaagtgttaattaacattggctatgatcaaagttaaaagacttttatagaaggaaccttaccgatggaacttgtctatatggtgctggtgccgatttcttcttcacagcagttttctttttctgcaaatacgagactaatgagcaatcgactatacaaatttctattcaagagataataaagatgagttatttacccttgaaaagtgagctggagcagcaggagtaggaggtgttcttttacgagaagccgatggtgtcttatctcccgagtcgcttagtctagctgctgcctggtcaacatcttcttcaatctcctcttcatccaggactttttctatggatggatctaaggcgggcaagtcatcggttggcttggacttcttcttcatggctttcttcttcggagccagagccgatagatcaacggccgatgccttagctttccttttcctgccgatattggctggttctctcagttgcccttggagtagacttgaggtcttgggggcatggtagccaatgacagggggagctagtccacctccttttggtatgaggcctagggcatattctatgtccttgccgctattgctcttgcgaggaggagaagattctgttgtctgaaaaatagaagaagttagtcaagatgcaaatcagttgacagctattatacaaaattgacaacatgaaggtttacccgagggataacatccgggaataagtctgtcatatacatggaagccgattggcggaacaagtgttgcttccattcatcccaccatcaatcgaagtccctactcctgaaccttgccagttctatgttttcaatgctgcccaaggaaggttctgagatattgagcagccaatccatcatcaatactgacgaaatctctcctctgcattggattttattggcaaattataagccgattggcaattgtcccatcccaaactacctagccgagctcattggatggtagaattcataagatacttgtatatttctcccatatggatgccaataggaagaatgcatgggctgatagcagctgaaaaaacttctctagacttatcaaatttctcagaattgatttcttcaaatctgaagtccgatggcagctcaaagtccattgaatcctcatatgcaaaccaaactcgggcatctttctgaaagccttcacagaaactgcataaccagtctttgagcaattcagccgatagctttgctccggaatcggctggtgttgatgcagcttctccatatgacatgcatcgtcggtgggtgacttcttctccatcatcattgatggtgggttctagacttggaaattcagcatctgtcaaaggtggctgatttacagccttcatggcaaccaggttgagccaggtttgtagcagccaccatggtccacttgcaccgactactgaacctatggctattttagccgatgcattgctcaacatttggtataggtagccgaggagaattttgcccaaaggaatttgcttctttgtttcaagggcttcggctaagaattgctaattggtagtagggccatagcttgatccacagaacagaaacttctcgagccacattaacaggaaggctgagtgctctcggggggtaacagatcctttgcccatgtatgcagcaacatagccagaccagccacctatgctcttggtcttgaagtcaaattggttcttggtgttcaaactcatggggttagccgatgaagtcacatccaaaccgatgagcatggtgatatcaagcagagtgggggtcattggcccttgattaaaaaggaaggcattaagggcgttggactagaaataggttgcagaagccatcaagggttcgtccttagccgaatttgctaaagtaagagcaagggcttggccgattcctagttcatccgagtgaacttgtttgctggccgatacacgcttgtaccatacagaccaacttttctcgggagaagttttctcaagggaaggccaagacttgaaagtgtttttccaatgacctagatttgggttggccaatccaaagggttatcctattggtttcggcgatgatgaactcagtgggatcgggattgccgatggggccaagaaagtactgatgctcatgtgacaaactgggaattgcaaccagattggacagatgctacagatgcaaaaaagaatagagaagaagaaaacaagatgagataaggaaaaaccgatctactacacaaaggagaggatctagccgatgggtacttacttctgcgtattcggctgatggtgcggcagacgggctggcgaaagtcgacatcgccacgggtggaagcttctcggagcttgaatcgccttgggatcgcctttttgcactgaggggattgccggagagaaatgagacaaagtttgcttaagcagtgaaaacagaagtaacggtgtgaagtttctcggggtgacggttagtatttaaagtgctgcgataacggtcggacaaacggcaaagtcttaacaaccaaattttgtaattaaggcatcgaagataaagataaaatcgaagcggaatccaagatatggatcgttccggaaacagagtccgaatcggttgaagtccgaatcggctgcgttcgggattggcagagttcgagtcggacaaggtagccgattgagctgattccgtcaaagtgacccgatacacgtcatcgggttgagttaatgtgcttcatatggattgccacacatggattgagtcctgaaaaggcaattgtatctattaattaggatattttatgtaaatactatagagataagcttgggcaaaagtctgccgcaaatgcttattgtatcttagagtttgttagagataagagtcgtatccgacaaggatatattttgtatctcgggaataaatatgacccgaagccatgtaatcaaacaacacatgttcaataacaatctcggcgcatcgccaccctttttacttttgtttcatctcgacgagttcttactttcgggttgagttgcaacagtttcgatcttcaactagaggtaaacttgtcatggcggcttgcgttctcgggattagtgcttccatcattatgatactctaatcttgttcatgtaagttgtcgagttatcatatattctatataatatttggcaatattgttatttaaccctcaatcggctaacatctgttaatgggaggcggccaattaggttaaataccaacgttgacttagattatatagggtgtctaccactttatgaagtttccaaaagcttgattgtttagatattgttattcttttcatacttatagctgcatcagttgagtttgaccttataagtcgtgattagaatctcaatctttaaactgcttttggtcgccgattagagtagtgtcggggtttcagccgatcttacctgatttagctttatatcttatatgcttgattaacatgccagatctgccctttatgttaagatgctgttgcttttaggtatattaagctttctgtttggtatatttttcttgctttaatatcttaatatagagttgtattggagtattagctgatacatgctgggtctatttgatcggctacactatcaactcttataatcttttcgttttatatatattttgatctaaataatttatactgtctcggcatggcaaccgatctattccaatcacttggtttaaatatatatcgacaaagggattatatactgatgaaatctacagccgatcgagtagatttagttctattttgcttatttataactgccgatcgattcaaatatgacatcggctcaaaggttaacgatatgtcatcggcggctggccgatcgactatcatttatgggtttaactgctattttcctatttaatttcttgttgattgcaggatcaaatcaactgggacactcacgaacctaaaaggtaagttttttggacctgcactgaagttaagcagatcttccaggccactgtgtgttttttgcatcaacgggatcgaacacaagtaaccaagccttccagaggggggtgaatggtagggaaaacctaaaacccaaaaacttttagcggaaataaaagttaccctcaaatcgatggaaatcacgacgtagtcatgtcaccgccggtcacaccgcttctaagccgccggtccgaccgccgtagtttgcctggttagaccatcgcgccgccttcggttagactgccgtactcccaccggtcagaccgccgccttgctgtcgttcaaaccgtctccctgccgccggtgtgaccgcccgccggttagaccgatgactcgcctccggtcaaaccggtgggatccagaaaaacacttatcgacaaaacacttgaaagtatatcaacatttttgcatcaatatgtgtttacaaagttcacctaaagcactcatctctcaattcacgaaataggattaaaaccacgaagtaaaccctaacttttctttcctagaagtcgttatcttctagcctcaaccgctcatctatttatagcaaaaaatcctctattcaaagtacatataaaactcctattcccagtaggactcaatccttcaatttccaaaacctgtaaccgcacgcaccggtcacagaaaatccagcatcaaatcccgaacgcactcggtctcctcgagcaggctgacaccaactcggcctagctcagagttatggatgtactgctaaacagccaaggtcggagcttttttcattaagagttgaaagcaaattggtaatataaatgctattacttaattaaccatttttggatgcaacacatgaaacaaagatgccacaaatgaccttaaaaaaaagaatcctagaacaaaatgggaagatctctgccttgcgcctccaggccgacagcctctgctggtcctgcacacacgcaagcaaaaccagcaagctgctgcatgataactccaagcaagtaacacacacgccaaccaactagctgctcatgtacagccacatgcacacatacatgcttcaccaagcatgtatcaacacacacgccaaccagactagctgcacatgtacagccacatgcacacatacattcttcaccaagcatgtatcgatcacacatacacgtacagcacacgtacatgcatctctgctacagtgcctcatgtactgtagcagccctttttctcctccaatttaatccaatctccttcgcgaacaccgacgcttgcacgcacacctcgtgaagcccgttgcataaatctcccccacacggtgtccatccaccgtgcgccatctcgtatccaactttgtcacccggtatgcttgaccgtatggacctcaactccgccttgagtctagtcccgatccccaccgttgaccgaagttgacctccaagaattctgattctagtcaccttctcaaatggtatcctgaccgcactagacctctgctcctccccaagaatagtcccggtcctcaccattgaccaaggatgacctcaagtcacctgcacacaatcagacaaaacaaccgttcctgggcacatatatcacaacatgacccacattagtcacacgaactcacaccaacatccacacatcttttcaaaccattttatcgaataaattattttgcaaagccaattattcatcacaaatattaatcatgacaatgatttcacaaactacacttagtgggaatgaactatatcagtatataggataagtcacttcgaattttttttctaatcatcttttagtttgatcaaatttatcgaaaaatttgcaataacaacaacattaaattaaagtttcatcaaatctaacatttgaatttatattaataatatgtttattttgtggttgaaatgctactgtgcaaaagctaaaaaaattgccttataatgctagaagttcaattgctctcatctggcggtagattaaagtgttagtatcagttaccactcttaattctgctcttgatatatagttccaataggtctatttagtgtgtgtgcgtaaaatttgaagtttattacaaagttcttttgtcccataatttacacagtgcaaataatctattttctgatgtgttttacatatatacaaattcaattgctgattcgccttttttttaatgttgattcatgtgagagtatcctcgagtgttacgacttgcatcttctatgaaggccaaaaaccttttaagaggtcaatctaggatgaaaattaacaggatgcttaaggtatcttagaatagatcgagtaatatattgtatgcccatgatgtcgaaacaatatttcagcaatactaaaagggtgtgtgtggagattatgggtaccccatacccacatggcatagttatccgactggctataggggataacttatatctatggaatatgtaacagatcatgacttgggtattacgtttccttgtatgttacggaacggcctaaagtcctggtttgataatattgtaaagtagatttaggaaaccgataccgtattggttaaggtttctatcttgtaatcctgccccccaccctatataaggtgggcaggaggccctctagggggcatgagacaacctgatcgtcagatctatactacaccggcggattcaaatccccaaacaggagtagggtattacctctcatcgagagggcctgaacctgtctaaatcctttgtctctgcatccatccacttttaggtctcgtgcgctacctccttttattattgccgaattcatgtttcgacagttggcgcgccaggtaggggttgcgtcgagtttcctatcaacgagcgcgatggaatcaatttcatgagtcgccgacttcgctttcgctttgggagttttcacttcctttgcgtcgaccacttcttcaagctcctcttctctgacttgatccaaatcagtcagggggaaactcaatctgatttttatcattatttatcatattgatttttaatctcagattaatttcttgctattttttgttgttgttcgcatataactacgcggcactattgaggcgattgatgctggtcatggactcgaggcgtctcagctttccggtcgatcggccgcgagtccactccgccggcttgtcctcgccaccgccattgctgatagcaacaacgacttcaccgccggcctgcctccgtcgccgccgactggtgtcatcgcctatacggttggtcggtcacaccaccgttcatgggcgtccatgtcttcaccgaccggctggccttcgccgccgccgactggtgtttccgcctgcacggctggcctattatgccgccgctgttgggcgtctacgacttcaccgccggcctgcctccgtcgccgccgagtggtgcctccgcctacacggctggcctattcactccgtcgccgccgactggtgtcctcgcctatacggtcggttggtcacaccaccgttgatgggcatcgttatctacaccgccggcctgcctccgtcgccgccgactggtgtccccgcctatacggtcggttggtcacaccaccgttgatgggcatcgtcatctacaccgccggcctgcctccgtcgccgccgactggtgtcctcgcctacacggctggcctattatgccgccgctgttgggcgtctacgacttcaccgccggcctgcctccgtcgccgccgattggtgcctccgcctacacggctggcctattatgccgccgctgttgggcgtctacgacttcaccgccggcctgcctccgtcgccgccgagtggtgcctccgcctacacggctggcctattcactccgtcgccgccgactggtgtcctcgcctacacggctggcctattatgccgccgctgttgggcgtctacgacttcaccgccggcctgcctccgtcgccgccgactggtgtcctcgcctacacggctggcctattatgccgccgctgttgggcgtctacgacttcaccgccggcttgcctccgtcgccgccgagtggtgcctccgcctacacggctggcctattatgccgccgttgttggatgtctacatcctcaccgttggctcaccttcgctgccgtcgactggtgtttccgcttacacggctgacctattatgccgccattagtaggcatcttcgctttcaccgtcgaccgccttcgtcgccgccgactggtgtcttcattgttattgatggacgactttgttcccacattggccacttccgccatcaccaaggggaatattacaaagctaagtcatcatttattttattctttatatgatatttttccttttcctctgcctcactacaccaattggtcttccattgagtagtgagtcgggggctacagatgttatatcatattttttataatatttatcttgattgcttgcgacataatctgagtacaaaagtacctatcgagttatggagttctatcttcctatgctttccgtttggtttgccaatggatggttgcctttgggccgattcctagcacccgggggctcgttggatggaccgagtaacgcaaggtgctaagtattattcggaataaatcaaaagcatagagataagataatttattttctgctcttaataattgcaaaagtacccgagtagtaaactccgatccgtgaaactttgttccattaatgacgaactcatgtcactcatatgcatgtttgggaagtgcttaggccgactcccagtgcttggtggctatgactagtcgggcagagtgtttaaacgtaatgagtcatctgctcggggaaatcaaaattgacaagaggagaaatacatatttataaatattttaaaatacttgattttttctcgagtattatatttatatcagatactactcatcctatatgtttgttctgcaggatccagatccagatatgcataaaagggattcatggctttaagcttatctcttacgctccaggaatggatcagtcagaacatcaccaccggctcgcctcgaccgccgccgactggtgtttccgcctacacggctggcctattatgccgccgttgttgggcgcctacgtcttcaccgaccggcttgccttcgtcgccgccgaccgatgtcctcgcctgcacggctggcctttatgccgccgttgttgggcgtctacgtcttcaccgaccggcttgccttcgtcgccgccgaccgatgtcctcgcctgcacggctggcctttatgccgccgttgttgggcgtctacgtcttcaccgatcggcttgccttcgccgccgccgactggtgtttccgcctgcacggctggcctttatgccgccgttgttgggcgtctacgtcttcaccgaccggccgccgcatccgccgctgactggtgtcaccgcctgcacggctggcctgttataacgccaactgatgctatcttcttcacggctggctacatcgctgtcactactaataggcatcagtatcttcaacacaagctgcctacgtttgccatggctgccgactggtttcttcacttccatggctgcatgattctgccagtgttgattggccttaccatcttcatcgccggtcgtctcgtctgctgctgactagtgccctcgcctctacatctggtttatacagctaccactactgatggacatcatcgtcttccgccgccgactcgtgttatgccgccgccgactagtgcttttatcttcacaactgcgcgtcttcactaccggttcacttcatcacggcaacacaactttgtcatcatggtggagcgacttcatctttattatcttcggaaccagcaaactctattgctgctacttcacaagttttgctacatcaccaaccatgacgttgttgtgaatctcgacatctcgacatgcgatgccgtgttattttactacaacaagtggctctccaatattcaggatttctacttggacatcttcaacacatatcttcaatcaagcaatgactactcgacgacaagaagctataattctcgactctatgttcagttgtttcccaactaaccaaagagtcgggggctacacaaatataaggctcaaaatttgacaaattttatgtcaagctgaagcaatcaattaatcagccaacaagtcaactctgggagtcatcaattttgtcttcgcttcagagcagtaggtcaagattaaatttacatgtctgggagtttggagtcatcaaccaatcaactcatatcagattcaatgagttgaacaacagcatatactttcctccaagtgaagcatctacaacagtttgatggattattgtcactgacatcatcaccagcacatctgcttcatcagctctgacattccgccgttgctaatggatgactaagactttgccaacttgctattccgccttcacggttgacctactatgcaaacgctgatgagcgtcttcgtcattatcatcggctattacaccgctattgactggatcaccgacatcgtcatcttcatcaacatcctgtcaaacctctttatcatagcttactctactgctattgataggcaacttcgtcatcatgtttgatcatctctgttgatgcttatcatcattgctgtcggttacgtttgtcgtcgccgactaatttcctcatcttcatgattggtggatttcgtcatcgcctttgatctgcctcgtctgtcaccgactgattattttgctgccatagctacacaactttatcgctgagcgccttcatattcattgctggctgatctgactgctgccgactggtttcttcgcctccacggctgtgcaacttcatcacttttgattggtatcactatcttcactaccaccaatatttttgccacctctgttgggcaatattatctctatattggtcgtcttgtctctatgccaactgcgtcagctaccatcaatgaacaattgtgactacgtgctcaggggcttactagctcaaatacaagtgttataccttcaatttggacttgttccggatacattccacatggattcatagtcatgagtctattttctatgctcaaagactggaccaattattattccccgtaagggctatcaaccgaatacttgcgccagtcgggattcaattattatatttattttggagtatcccataagagataatcactcagatcacatggtctatatcacccgggagcatgttacatgcgtcatcctttaaagggtgtcgaaggcatattttttggcctaggcctaatatgtctgcagcccatattttcaggtgtggcctgtcacgttcttttagggacttaggcacttttcgcttaggccaaagtgcgcgtgatcaagtgcccaataccttaaaatccttttataccgcagttactcgactttttaggagttggtacaatgcatcttaaaaggtgtcaaacagtaaagctttatatagctgccccgctggcttttttatatagtcaaggtgctgtttgggtttatcaagcaattgattggatacaatatcattgctttttgccacgtaagtgtgtatttttattgaccaatattatggcttaggctgattatatattatggtcatttttcaggcggttggtaaatcctttatgagtttacttactcggatgttataccatatatgccatatatttccaggtgtggtgaaaccatgtgtcttttagggacttaagcacatctgttaaagcagtgtgcgcatggcgtatgcccaatactttggaaatttctttattcacagcattcaagcttctttataattgttttgctatgtgaactttcaaagatgttgtcaactttaggttgtacgcatcatattttgccaagcagtcggtatatcacttggatcatattattcggggattcacaccgcatatgctatatattggtatcaagtcacttggttgactataattatcaaaaaccactcggttaattggataatttattccttgactatatgtttagtttgttcagctaatcacatagtcgggggctacacctattaggtgcatctagtcgatgcacctgactttatttttcagccctccacagtcttcatatttggtaaaagtacttcggagaccatggcgaagatgattgaagcactcagctttggagtaatctagttcgagagaagattatcttttcgactgtgaaggtctcaggggctactgtggagattatgggtaccccatacccacatggcatagttatccgactggtataggggataacttatatctatggaatatgtaacagatcatgacttgggt

SEQ ID NO: 24068 - DNA, 1017 bp, Oryza sativa
ccgattggtgtcaccgcctgcacggctggcctattatcccgccgttgttgggcgtatacgtcttcaccgaccggcttgccttcgccgccgccgactggtgtttccgcctgcacggctggcctttatgccgccgttgttgggcgtctacgtcttcaccgaccggcttgccttcgccgccgccgactggtgtttccgcctgcacggctggcctttatgccgccgttgttgggcgtatacgtcttcaccgaccggcttgccttcgccgccgccgactggtgtttccgcttgcacggctggcctttatgccgccgtagttgggcgtctacgtcttcaccgaccggcttgccttcgccgccgccgactggtgtttccgcttgcacggctggcctttatgccgccgtagttgggcgtctacgtcttcaccgaccggcttgccttcgtcgccgccgactggtgtcctcgcctgcacggctggcctattatgccgccgttgttgggcgcctacgtcttcaccgaccggcttgcctttgtcgccgccgaccgatgtcctcgcctgcacggctggcctttatgccgccgttgttgggcgtctacgtcttcaccgatcggcttgccttcgccgccgccgactggtgtttccgcctgcacggctggcctttatgccgccgttgttgggcgtctacgtcttcaccgaccggccgccgcatccgccgctgactggtgtcaccgcctgcacggctggcctgttataacgccaactgatgctatcttcttcacggctggctacatcgctgtcactactaataggcatcagtatcttcaacacaagctgcctacgtttgccatggctgccgactggtttcttcacttccatggctgcatgattctgccagtgttgattggccttaccatcttcatcgccggtcgtctcgtctgctgctgactagtgccctcgcctctacatctggtttatacagctaccactactgatggacatcatcgtcttcccgccgccga

SEQ ID NO: 24069 - DNA, 632 bp, Oryza sativa
ttcaactatgcatcaatgtttgattcatggcaaggcgacaaaatagagatcgtgccagccgacaagtcagtaaatgttgccagtgctgatttagctctttgggagatggatagccttgattgtttatctggaaaagtctgggatagagattttctaaaagtgtccgattctgatatacagccaattgaagatggagaacccaagctattactttaagggcgtcgtggagggttcaagtgtctacactacggacacggtagatgatctcgatgacaagcatggtcaaggtttcatgtcggccgatgatttggaagaagtggacataggtccaggcgatccggcccaggccgacatttattagtaggaacttatctccagagtttagaaccaagctgatagagctcttaaaagagtttagagattgctgagcttgagagtattatgagatgcctggactcagccgatcgattgttgaacatcggctacctatcaaaccaggggttatgccacatcaataacctccgaggagatgcaaggccgacatgcttgaaccggtcaaggctgagattaaaagattatatgatgctggttttattcgtcctcgccgatatgctgagtgggtttctagtata

SEQ ID NO: 24070 - DNA, 598 bp, Oryza sativa
gacaagaggagaaatacatatttataaatattttaaaatacttgattttttctcgagtattatatttatatcagatactactcatcctatatgtttgttctgcaggatccagatccagatatgcataaaagggattcatggctttaagctatctcttacgctccaggaatggatcagtcagaacatcaccaccggctcgcctcgaccgccgccgactggtgtttccgcctacacggctggcctattatgccgccgttgttgggcgcctacgtcttcaccgaccggcttgccttcgtcgccgccgaccgatgtcctcgcctgcacggctggcctttatgccccgttgttgggcgtctacgtcttcaccgaccggcttgccttcgtcgccgccgaccgatgtcctcgcctgcacggctggcctttatgccgccgttgttgggcgtctacgtcttcaccgaccggcttgccttcgtcgccgccgactggtgtccccgcctgcacgggtggcctattatgccgccggttgttgggcgtctacgtcttcaccgaccggcttgccttcgccgccgccgactggtgtttccgcctgcacggctgg

SEQ ID NO: 24071 - DNA, 747 bp, Oryza sativa
gacgcagagaagctcgcctcgtctgccgcatgtcctcaaaacgggaaaagcaaaacccccctttccactgcctcgtcctccctttttccttcccgagctcgaccgctctccctctgtcctcgtctctttgcacgtggaggcagagagccgctgacgccggtgcgccagctcgcggcccccactttgaccgcgccggcccgcgctccgcgttcaaattcgaccgctcgatccaccgaccccgccgcccaacgcatcctcgccgtcgccattttcgggtcgcctacgaaaccgtcgccccaccgccagccgagcgccagctcgtgtgcgatctcccccttgcctataaatcctacccaccgagccccaaatcctccctcaacctcggtcgccgtcgcgcggtcaaccccggagcaccgccgcctccttcgtcgccacggacaagaacgccgcgccgacaccaagccgttccaccccacgtcccctccttccctggtgcgcccgcttcggcgtcgcattcgtccccgtgcgccgccaacggccttcctccccttcccatcctcaaatcgccgccgacgccattcctcgccgattggtgagctccccgtccccttccccttgccgtacgccgtgttgcttcggtctcgttttcactcttctcgccatcgccctgccaccatcgccgccgagcgctccgcgcgccgtcgtcggcccttctctctcgtcgaaccactcgctgtcgccctcccg

SEQ ID NO: 24072 - DNA, 5664 bp, Oryza sativa
ccctctttttccctcccatcgcgtatccacgtcggcaatccggcgagcttcgccaccgtcgccggccgccgtcgcgccccttctttccgatctgatccgtggaaccgattccccgcctcctcctctcgcttccagtgcctgccgcccactccgattcgccgccgttcgccggagcgcgccgagcgccgtcggccgtccgatgagccgcccggcctcctctcccttccctgtccgacgtggcgtccacgtggacgccacctcagccgctgaccccaccagaccaagtcaacccctgcccagtcagccaccccccttctctctccccgttcgtgggcctggcccatcgaccagctccccctcctcggcccattgaaacaaaggaagtccatttttactccctccgccaaacacaatgaccaaaagtctatatatgctccctcccaattcacctctctctcaccatatgttggccccacatgtcaatgagtgataaaagggtattcttgagaatattcatttccataaatgcaataaatcatatctcctgctccataaaacatttcctatattccaaattccataaaatccttcctcttaatccggggatttcaataattcaacccattggtcctgcatgttagtgactgtcaataatactcttgagaatattatttctataaattctataagccatttctcgtactccaaaaaaatccgatagatcatttccttgtccagaaatccaattaagcttccaaaatccatatctcctcaaccgctcgaccgattgactccgttctacttccagtagttccgtaaaattgagatctatttaatgtcactattaattagtctaaataggatctttcttttggtcttttggttaggtttttgattgtttgcgtatagttgcggttaccagattttcatcaagcggatttcttgaagattcgtgaagatcaagaccctgagcaaggcaagccacctttgaacatattgagcctatatttgaacttaattatattgcttgcaaaatattatgcattgataggattgcaattaatatgttgccccgtctgcgaggcagatcggtgggcatacctaacttgttgcatttgatccttccattgttaattgctatatcatgtttccttgtaaccacctggtcgcgcctcggtattcgtgcactctatgcgagtatcgacggtcgccttcaaacttaaaatatgataaacatcttgggtaaaacttggtttacaaaacgattgggaaacccgacgcctgggtcggtgccttgtgaaagaaaatgagctttaaaaataaaactcgcgacacaagaccattcctgggcgggaagcttgtgcggtcgcatttaagggccgattccttcggaattacatccgagcatataatagtacaaccacatgggtggaatgggacacccctggctgagtaattagctaatcaggggagccttgatgccgagagacaagtggattcgccggggtggtgtcggggaggacccctggtcttcctggcacagtatggtctgggacctaacctgttgttggtctgggacccctctcgtcggcatatggtaaacctgtgtcggctttggaaatgccttgtcatgaaagcttggaggtctcccgacgtggctgatccccacgggctgggtgatccgggttagtaatgccgtgtgggtaaagtgtaccccctctgcagaggttatcaaactgttcgaacagccgtgcccacggtcatgggcagatgtgaggtgattccttagcgtagttttcgttttaccctgctttgtgaaaaggtgttaaggtctgggaaacctgatttttggaaagcaagtggctgtcagggagacagcgggacagggagtccttgaaagtgattggttgtttggagacgacctaactctgaaagtttggaaaattggtttggtttgggaaaccagcttcgaggccaactctgggagttgtgcaaatcttgataaataaatttggtcacttctcacccccctccccgaccaagctgagacttgtctcgctctggttgtggaaagcacacacttagattgttgaaaacttgcaaataaaattgattgaaaaataacagccttcccttgaagcttgcattaaccacctaagttcccatggcttgctgagtacgtaagtactcacccttgctctctatataaatatagttctgccagctctgaagatgaagttgaagcaaagattagggtttcgtcctagttcccagccgtcccctgtggtgttgagtgttagtccgttgtttccgctgctgctgccgttgttggtgttgcctcgtccgtgtcgtcggttgtaatctcgggctgtcctgagttgcaacctaagttaaggtaaataagtcctctatttattctaaggattgcaatgattcatatttgtcactgtgggtaccggcgctatgtcctgggactggtactgagatcgcggtttcgtaggaagcggttcgcgccgtttttcctacgacacgctctaatcaggtgccgctgtacggcggtgccggattggggtgtgacaatattttgttttcaatttttctcctttatttttttcgaatcaaaacatcacgtcaatgccatgtgggatgaggacctagtcaaaaggaaccacgtatgtgccacgtcatccaaaaccggtcacaatattgccgagggacctcttctgcatggttttgtaagttgagggatgtgttgtaaccggttttgaggatgaaaattaggctgggtgacaaattgaggaacctagagtgaacttattccacaaacaccgaagataccttcgttttcactggtatgagttcgctcggtccagcccaattaaaattgtgggctttactccgcgaagatttgctacgcttaatttcgttttggaccccgtgtttcatcacgaaggccagcctatttggagcacagctttagtaaggcaaagtcagtccactttatctccctctaatattggtccaaacttatccgtatcccccaaccgcaacatcagatatcttggctctaactattgaagccggtgcaaaatagcttcccgggtggttttgtgagcgatttccgttgacttggcccgttgaatttgatccaactagctgagtcaacatatgaggggcacgcatggtcagtgtctcatccttctctttcttttctctctctcctccctcatcttcctctctccacatgttctctctgcaaacagccccttgcatctccaaccctcctccatggcagctgatgaggaggatgtggtggtctagccagggagctagcagggccgagacgatgggctcatgtgtggaaggggtcgacaacaggatctggcgccatctccatttgtggccgacgggaaaggaacaacgcatctcatcgggtggtgtcggctagaccaggattaactctctaccgctcccagacctaccgacgagcgtggacaggaagccgtggctatctgcagtgcgcaaagtcagcgcagcgggtatagcgcaggaatgaccagaccaggtgtaactcctggttgctcccacacctgtcgacgagcgccgggaggaaggtaggatgccactttgttcccttgtcgctatctcgctaggtgcctttcaccaggcgcgcatactgatgggtgcggcacggggggggggggaggtggtgccggccgcaagggggaggatctcaagcggcgagaccctccatcgacgatgcggagccgggacgaggagtggcggcttggagcatgctccccatctcccccaatgccttccaccatgccatctttgtctccgccgctggaatcgtcctgctccatgccataactcctcatcgaggcaccgcttgatgcggaaggctttgtgctgtcgccctgcggccaccctctgcacgtgtacccctctgctaccgccaagaaaacatggggggagagagagaggggttatagaaggaaggagagagagagagcaagggaagtgtggctggtgagtcatattttattttttattttgtttgacgactaggatgacacgtggatgtcacatcaacaaataccactatcaattttatcatagagttaaatagtaatggtttcaattgttacgggggtcaagatttctaatattgtggttgagaggtacaagttagattggacccttatttgagggactcaatctagacttatttctaaggaaaatccatccaaaaattttaagctctatctagactgtgctcaaggagatcacatatgggccaacaaggcttcggttggtaccccaaactaagatgtaagcattttccagcgctgcacgccgttaatcccccccccccgcccccgcacgcgctgtagcttgtggatgcctcgtgcctggcataaactgctatcaaagtgacatcatcgatggggcattccggtgacgcacaagtcatgacgcatttgatagtagtaggtactttaactaaaataaataactgatcgtatagtagctaaccgttgaccacagatgacctatactagcccgtcacagatgagtcatctgtgacgggctatagttaatgcccgtcacagataagggtcatctgtgacggacgctagttgtggcccgattgagataggtcatctgtgacgggctatagtttgactggtcgtctgggtcaaagctatcggtgacgggctttacttagggcccgattgagatagaatcatccgtgacggccgtttgcccgattgagatagctcttcacatcagtgacttctagcctgtgacggacgccatgcccgattgagatgaggcttaccgcccgattgagatgagggtatccgttatagtggttgtattaaatgatccatttttctagcttcgcttcgggctactaaattgacaagacaagcctggacataacaaataatcttttgttgactgttgttatgttcttagctttcaaaattaaccaacaagaaagtcagtctccccaacaactgaagcaaagacatacatatagataattaattaaagaggccgatcatgagaattgatacaaattatacaaattaagtaattgatcgatctagtagaccacaacgcttccttagaccgatcgataaatatcaaatccattacaattattactggcttcacgacgacacacaatttcattttattaattactagcttgacgactcaattaatttgaaacaaaggctacggactgcgtcggcctgcacagttcctgcaagattatagaatcatacaatatatatgttgttagtcaccattaattcccacacgtagataattgtctaggaaaataactgttaattaacttgaccaagattatattttgatcagtggtcgatcaccttgaatattgtggtagagacgcatgcatatgatcagtcgtggatatgagcaccgctgataatgcaaatggcgtagatgatgcccggaagatagccgaggcaggtgaggaaaaggcagatccagaactccttctgtacgtacatgtatgtaacacgccgaatcaggtcaggacccatcacaatacacatcatcagatcatgcagctacgtctatatatatgcatgcatgtgtgcatatatatgcacatcttgatca

SEQ ID NO: 24073 - DNA, 7393 bp, Oryza sativa
caggtgcagctcgttaataatcaggggccgttaatcgcctctctaagctactatagccccccttagcttgccgatcacacgctggcacaggtgatacgtacgcgaaggcggcacaagcaggagtgatatgactgcttctactgtgtgctgccaacgccgatgacttgagttgtatcatcagcgcctagccatacatatacagcagagtcaatcgccagtcgtcaacgatttcttgttaagttaaacccaggccaatcatgtttcgattatgatctaacataatccggcggcgtcgtccacagttttctcgttggtctgaagctaggagtagactgcacatgtactgacaaccgttactctccttggctactgtaccaggactcaaacatgccgtgtcctgctgccatctgctttctcggctttcgtgtgtacgcaggtatctctgtcgtgtgtttaacgtatagcgggttggtttctctcttttttttttcttttttttctaggatcagacctatcaacgtgtaccaacgccacaaagcaagtccaaccgtcaatccaaattagacacttcaaacacccgtatagccaagtttctaacggatttagcaagttaaacttgttactcactctaatggcctctctattaaccttctccaaaataacaactggacctgtatatcagcctctactccccttctacttcctcccactccattatccaagaaaccaacatcaagaggagctagcacgatggcagcatcgtgcaagggccaaaagtggggatagcggcgcaaagaggagccggagatggtgggactttggttggcggcgaaagtaaatggagatggcactgtggtggcctttggaatcggtgctaaggattggtgtcggagagagagagaggcagcggaaattggcggcacgggcaagggctaggagacaatggcgaggcgcaacggcggatggtggcaacacttatcgatttgtttttcgaaagcggatcggatggcgtctgaggcgaatgccgcaaccgtggtggatggtgcatctccaaacgacgactcgggagagagactgtggggacaggagagagatagggagatacagacatggagcgatgaagccaaggccagcaacggcgaggcacaccttcttcctgagcttcggagcagtagaggagggtgccgaccgacggcggtgagggcaagttagggtggtcgtggggtcaagaaggtcgggcaccctgtcatcggccatggcgacaggtagagaaaagagatggagatgcgaaagtgagagagtggagaatggcgatgagagagatggtagcagctgaccaaatttggttaagttgagcgcatgtttggcgagtaatatggtcagtatgattgagtgtattttttatccatagttgctaaagttttttttgcttagagagtgaaataaagagactattggtgacgctttaaattaacacatgatatatagtaccaattcagctaccacatgatctgcttttacgaagggggtgtaactcaaatggataggtttctagctcgttgtgaaacctaaattcatgggctcgtatttgattaattatttttcagtggtaaacgatgtaccagtaaacaaacgtagctcgtacattgtacatatatatttattggtactctacaatacaaccaaagaggcaatgaggaatgttggcagcgagtcagcgactggccaggcgtagcaatcagcagatcagagcaaagtcaacgtaactcaaaattactactaagatcctactccagtatatatgtgaagatgtcaatatacagctggtacccgttttctgacgatgtacgagagataagaaagtcgaaacccagctacgtcgtcggtactaattagcgcgtggggcaacgtgaaagtcaccggcgccacgtgaattcacatttgttcgttgccaccggcaattttttaaggaagccatcccactttattaatctgcaaacatatagttacatcattcgctagaacgttgagaaaaatatagagaccccatcgacccaactataaaaatttttcaacttagaaacatgattagctagaacatgtgccatgcaattaacttccctattacaatactcaatcaatggagactttaacataatcacataaaaaaagtatggtatttatagaaaaccaacgccgacgttgttcttgaaaaacttccatcttgcatcgttgccaccaccattactgtatcagcaacataaggtaagtatttgcaacaaccagctacaaaatttccatgtgcatctcatatgatcgactactccggttcctcctatactagtggtggatctagaaaattaattcgttaatgtcatagcatgcaaattatatttagactatagtgttataacatatggataaacagtttaaccataagttttaccgaaagtcgtcagtgtcgcttgacatcgacgctaacactttagatccgcccttgttatgtactcaagacgatgtcaaagtaaacatctacatttaccttgaggatttctttaggaggtttatgctatcctttccatgattttgcatctgtttttttcttcgtcatcctataatttagtgtaagagcaataataaatatagctgatctagcagccacctgaatccttttaccgttcaccacttgcttctttcccaccaaagaaatcatccccgataaaaccagttcagcaaaacccacttcataattatttctttgccgccggctttgctttgcgttggcttttgatagcttgtactattattcttcgtacgcttcccggcccaaaatcccgcacaactacacccagcagcacggcccagtggcccacccatattgatgggccggtagtaagccccatccaaacaagttgtgggccctcatgtcctacgggcctcgcggacccggcccggcggctggtctaccctccacgccgccggcctgtccgcctacgccgctctcatctccctcttctctctcctcctcccggtgcgctccgtactaaccatccatgtctccgtcgtcttcaccgccgcctgtgctggcctcctccatatgtccacggtctccaggtgcacgcctgcgccggcaaggtcgtcgtgcggcctggggatgtgttcgtgacacgccggccgatgtggctggcgtgtgtatacgccaagtgcggacacatggtggccatgacgaaggcgttcgacgaaatgccgcaccggggcgtgccgtcctggaacgcgctcatcgtggggctacgcaaggaacggaaggtttcctcaaggctcaaagggtgtttcatggagttgcggcgcagggacaggaagtgccgctaatcggtcaggtgatagtgccaagtgcactgagcgcaggtccgtacttatattacatcatctaattataaggtggaactgtaggtgtgtgcgctgtgcctgagcaacacgaacgcccttcttgatatgcatacaaaatgctgctgctaagcgcttcaaggaagcctgtgttgagtttcttgagttgaggcccatggttcaggggtggcgtggcgttttgcctgatgatatatcatttgcctacttcattgcaagattcagcatgcctagcatcatatattctggatgaacttgtcagagtataggatgctaggtttatgaggcctgagagatgctgatgaacttttcaggtaggaaagctcgataggtggttaagactgaaaagtgagaactttagagaacagagaagagagaggttaaacgtccttgcaaaaattaagcatcttcttcagactgaggaatacagaggtgaatatccttgctaaggaatctgtaggagatatgctagcacgagcagaacatatgctgtgctctgcctaatttctttactgatttatgcagacatgctgatcagctgatgtacaccagatcaggatgatggacaaggagagcatccttcacaacacgaagtcgttatttggagattaatctgacagccgtgtgggttgggcctaaaaaggctcacctgcagcattccagggctgattataaagtttcttctttgatcttgtaggtttggcagaaattgtgtttttgtgaattgaagtgtgacatccattgctagactaatgtcactaaaaatttgtgttttcaggctttcaacattcagtagtggaatcgtagcaatttgctgaatcatcatcaagcgagaaaaagcaatctcttgggataggcttggagaaaactgacaattatatatcctaaggcaatatcaaaaagatctaccataatatttctggtacttttcttttatggaatgaattcagttagttatctttgattcatgcctagatttctcatactaaagttttctaaataatactttacctttgaaatgatggtagttctgtgtattatctttttagagaacatgaagaataagatattgataccaaaatatttcttccatacgtttaaattttttttaaagaacatgaagaatattggattcagatttttgcaattctaataaaaattttattaagtgctcatagaacataaaaattgcatttttagctgcgggatgggaggaatatgttaaaggccacaaaatttgattccactgaggtaaaatggaacctttgtgttatcaacttctctactctctttaacgaatacatgatatttacaaaccagttaaagaagtagaggaaaaataataatcagttctgctatacggtaggtagctgataatgctacacttctttactataatgtacactgctagtaagtataatctcagcttcagcaaaaatctttttcaactaacctacatataataagggccctccctccaatgggaaaaaaaaaagaagaaacaaagagaaattcaaatgcaactgttttagcatttatccatccttgcaatcctgagcttctttacgctgctcaggaagagtctgtaaaaacaataaaaaaatgagtaataagttaaatcagaagtagaatgaaacgcaaatggatcagttaaatatgttaggatacgtactcccatgggacgtccccaaccatcatccagtccccgtcctggtcttcataggtgaggacatgggcagccttctggccaggaacttgttgatggcactccataacatcagcatctaatcatatcaaacatatatgattatatacaacacccgacaaccatcgccatgtgtatatcatgacgaggtgagattggaccacatgaaaattgaattaatatctatcgatcgatttcgactcgacgtgccaaacaagaactcttgaaacaaaagctttcagactcatccgttggtggcctgtcaaattgctctagcaaaatggtactagttgctaatactactcgctgccgcgcgcgctcaagaaatacaattttggatgatatattgtattgttctccaatgctgaactgttcattcatatttactaaactaattctctctttctcatgttttatacaatcttctaacccttcgaaattgtagtgaaatgcagattaattggttggttgcatacttacaggtgatgggcgtcttgaacatgtggcagagcttgatgaggaggctgtcatacccatccagcaagagcaggtcgagcttccggccgatcgggacgccctccatgtacaccttcacgaacagcgttcgccgtcggcgagcgccgccgccgccagcggccgacgccttctgcaaggcgctcctgaggaacggcttgatcggcggccaatcggcgtgcacttggctgttcctgcatacgccgcgatcaccgggcgcccattcatgttgaaaggtctgttaattaatcaactaattgatggagatgatgggtacaagcgacccaattggccaatgggatggagtactgttgcgcaattaattttcgggtgcactgtatctccaagaaacagtaatggcaacaggaatcttgaagtggttttgtagagacaggaataatcgaattggtctacaagtttggctcatgtgagaaatctgactgtagctgttgatgtgtgtatttgtactgatgatgatcaagtcccttatcagaaataaaagcgtacgatgggtcattgacatatcaacagattggtgcgtgtgatagaacggtttgtctcattgtctgatctaattaaactgcagtgaacttgaagcatttctcttattttcttttatgtagattacaagttttggtttgtactatagtagtctaggtaaatatgcagctatgcactgtcgaaatgatcgatgcaagtgatcaagatctacttatgtgaagggataggagaaagcgcatagtaagatctgaaagatttacatatgcatgtgggaacagtttgatcaaatcaatcgtgtgtttcacaacaggtaaaaactcagataaagtttttttttcccttaaacttaaaaaacttacataagccccatcagactacatatacatgagaagcatgcacgatggattcgtataaagaaacggagatttttccctaaaacaaaacaagatcgatagatagaagaacatagaacatcaaaaactagtataattacatatcggagtatgtatatatgttcgaatatattttaaatgaagaacaaagctatatgtgtttcaatattgaatcgaaagaagaaacgaaacaaaacttatcaaactaaacagcatgaatctttgtagctagggagaggtaattaatcaaaaagcaggcttcgcggcaagaaactaagaaagaaagaaatctaataaccttggagtagaagggatgctatcatcagcagcggcggcggcggcggcggcctgcaggagggaggacgacgacgacgtcgagaggctaagccctagccggagatcggtgctgaggtcccgcctcgccgtcgccgccgacgacgtcgtggacagcgccgggtgggtgctgctatccatggaggaggacggcgacatgccaccgcccttgcactcctccatagctacgaatgcttacgtagaaattaatggagagatcgagagagagagagagatggatcgagttgagaaaaaaacaagcaaggaaagagagcagctagcttgtgatgtgtatatatagctggaggtgagcactagctagaaaaagccaaactatgctgaactaaaaatttgtgcgcatggtagagagagagaggattaattaaagctaaagagggaggcattaatcaatctgattagatagattaattaagtagttaaaagaacggtggaacaatttggcttgctttatgcaagcgtttttgttctcaattaaaaataggctgattctttcctgtgcttgatatctaggtggacacaactggtt

SEQ ID NO: 24074 - DNA, 5974 bp, Oryza sativa
aatttacaaattttgagaaaatgaaatttaacaaatccttaaattattatgtattcctatatatcaatctactctattttttggaatataattgaaggggccaatctctctttttcgattactgtgctaatttcatattttcacgataaattgggtgctttgtttaccatgtctgaagtataataataaatattttatataatattatgtctctatctctaaaagtataatagtatttcctatacatatagctatcaatctacacagttataacttagtccatctttctttcttttttctctcctgctaaagtagtaatttgagaacttagagtgaatgggatgtgtacttctaataagcttctctacaatgtaatagatgattaggtaaaaaaaatgtgatgatatcttcttaaggaggtacaacttgttttgatgttcagttggtttcaacaataatgtgacttagatcgttaaggataaacattgcatggttcacgatcgagcactgttttcatgcagtgatgggaattggagagtatagtattaaacattattctgcgtatcaagtccagaaataatgatgcaagatatcacttgggagaattaaggccctgttcagttcccaaaacaaaaattttcacgttgtcacatcgaatgtttgaacacatgcatggagtattaaatgtagaaaaaaaactaattacacagattgtgtgtaaattgcgagacgaatcttttaagcctaattgcgaaatgatttgacaatgtggtgctacagtaaacatttgctaatgataaattaattaggctaaataaattcatctcacagtttcctggtggaatctgtaatttgttttgttattagactacgtttaatactttaaatgtgtgtccgtaaatccgatgtgataaccaaacaaaaaaaatttcccaactaaacaaggcctaacaagcgctctaagcttattcaaacaataagagtcaaagactacttttattgattgcatggtagatgcgtagacggaccactatatactacatgtgtgcccacgcatggcaaagagtactactagaaaaatgattttttatggctaaacgctccgcctgctatttagggcatactgttgatatttgatatggtcacggataaatccgtaagcgcatatatacgtttgtagcatttcacccagagtgtttcatgagtatagtatttgtttttccctgcagggaagacgacagtgtaaaaaataagttgatatattcgtaatcacgctatatttaatatataatagtctatcagggttaaataataataataataataataataataataataataataataataataataataataataataataataataataataataataataataataataataattgggtagtgtgatacacagaagaatcatctcaataaatctactatctagtgaagagagacaaaggagatagctatggttctatgtatctaggcactaccaagagaccactccatattggtcggccagcgtggttataccactttatgaactcttatgtcatacccaaatgtgtggaatacaaaggacaaattaacatggttgtcaccaccacctctcgcctaccttactttctgtggtgcatggcatttaatcaatctacgcaccatgcttacattgctaaataatgtcactaattcctctgggactctcactttttgaatggacaaaagttagaactagtgcaatccactaagatcattggaccgacgccatagcatatatcaactagcctaaacgtgcatagtttatgaaagaggtataaactactgaccatatatatgataaagcagtatatgaaatacgaacacaattaaataaaaaagataattctattattgagttcatagtcttacaataggaataggagtataatactaaagacatacccaaatcttcgagaagtctaggaaaccgaagaactattctaagcctaaactccactaaactagagagtaatacaaatgtagaatagacaggttgcttcttaagtgtgtgttgtgaactgaagaggtgatctcctttttatagcctacttatgacagttgattaggtcgataactcccacaactgtcattaggaggtaattagtgatgtccacatggaaggtggagatgagaggcagcgatggcggttcaaccaaaccagggttcagtcacccctgggctccacctctctccaccgcctttctctagaggttgccatgtgggcccctaaggtggtgcattgcagatgtctgacttgtgtgccctttaatccgtgtgctctcacatgattcgctggaggtgtgttcctttgcatgccgatttatttctctttcacttttattgtataatccctacatccatagtatttctccaaaacaagtggaactaaattatttgtaattaaaatacgtataagaaaagttagttctccttttatttgttaaggtaattggaaatcggcacttaatgtctttcaacacctgcaaagcggacaaggagaaccttcacccgtctgtgaaaattgaattttgcaagctaccaccctaaaagccccgtatgtgaaaaatatgatttttcacaggcggaacagttaagtggcccaaatgcaaaagcaatttctggcataaaagaatgtagatccaaatatcctctaattaacataattcactatgcaattccaccatcacaaattcaaaataggtttgtctaaatcacaaaatttcagcaaaggacatcgtcattggcatcccagcgttggagttgtaccctctgcagtgtctttggtcagcgtcttggggaagaagttaaagcaacgcaacgcctcagcaaggatggccttgacgacgaggacggctgagagcttcccacagcgatgaggatggtcgcgacaacaagggagagcttctcgaggcccggcagcggatgatccatgctcatgaggcccaacggcgacggatccaccgctcccgaggcccgcggcgccggcagacccgcacgcttgatgcctgatctgcactctcgaggccggtgacggtagatccagcatgcttgaggcccagcggtggtgaatgcaccacgccgttgccatcatggtatcggttgtggttgttattgccgttgccatcacggtggagatcctttagtctcctaggggcccgctagttgcgggcgtggtcgacaatggtggcgatgggtgggagtggaggaggaagtctgggtgcgatgatgagagagaacggaggaggaattagaccgaggagagggaggtgttagggcaggagatgaggatgtaggagagcctgctcacttgggagatggagtagagagagccgagggaagagagatggaggacttagccatggttggctcttgttctgaatttaatagcacgcttatatttgcagttgggcctctttagtcctgactgcgaaaatcaatttttacacgtgaggtctaaagtgctctgcctgcaaaaataaaaacaatgttttgggaaaaaatcgttttttatagttagtgtggctcttttaacacacgtttaaagaaatggaggtcagggcaaatcccaagccttactaaatatctattaacattacactgaaatatgccatgtgtgtaatcgtaggtaccaacatgatttgaatcctaagccaatgggtagactcatatatatatacacttacaactctaccctcacatctctgatgcttccagagaaaaaggctatttagccacacgttccgttgcattcacacattttatccacacaatctcctctgaaaatggacactcgtatacctgtatcctgaaaggatccccgcccccaaaagctgagggctcacagataaggtcaccaaccaaagcaatcctcacatcaaaatcaaagtacatatatacacgcgactcacgaaagctccacccatgaatctgtcaatgatcaagttcaattaagtgggctaaataatcaggtgtcttggtttagatatatattgttttgctgcgggttgtatgaatgactagtatatgttaattaatataagaacgacgagggttaaaatattatgaaaatgatgtgaggaagatcatttgacatacttatatgttgaattttatgttataatattgtagataatgtgccttttgtttgtatgagatttaatatgctttaaaatagtaattactaatagacgatgatgtaacatattaatgggtaccaactatataagtatattaatggggttagctttagggtgtttttgataggaggggaaaagagaaatggagaagatgcgtaaatcgagatgaactattagcatctgactaattaagtattgattattttgattttaaaaatagatcaatatgattttctataagcaattttcctactacgtacatgattttttttcaaaaaaaaacataccatttaccaccaggagaaacgtgcgtgcagaaaacaagcgaatttttcttccaatccgctactgcaatgcagccttagttaagccgaatggaggtggaacgttataccgggccacgaatttggccgtgggcatgtgacaacaaccctagcttagaatctgttctgttccctatagctcgtcgtcgactggtcgtgtctgtcctgtactatttggttaccagcagcactagtgctgtagtgcgcgtacggcctgtggagtgtgggatcgtgcacatctcgtggaatatgttctctctatatatactgagtgaggtcccctagaagcatctaacaagcaagaatggaaaggctagaattaagacttatttcaatccctctctggctgtgtttagtttctaaaattggggaaaagtttggaaaaaattggtagtttggaaaaaaaagttagaaatttatgtgtgtaggaaagttttaaatgtgatgtgatgtgatgtaaagttgagagttggagggaagtttgatgtgaactaaaccatgcctctgtttattgttcatccgtttcaacgattgatcttcgtggagaagcacacctgcataagaagacagtggcgtagtcgttgatgtatatatgactctgatatctactaaagttttgttaattttagctattggctactagattatcatgtgcacggttttttaaatattaataaacgatatgattattttctacatggaagtctcttacaaatttaagtaaatctaattttaaatgtataacaagcgacactaaattaattatgtaggatatttgtcttctccgatgagtccagcggccacttgctccaaccgctgaaatggaactgtgccggaaaatctgtcactagcttttatctctttgagcgtacatatttatcaatcggtaaaaaaaaaaaaagaaaacaagagattgatctttacgtttttgtttccgcgttcatcaagagaaggtcagcatccaggcatttccatttttctctcctctgaaaacttcgtctccgtgttcacccaagcaataattccagagagtccagactccagagaactgtggtagacagtgatcatccctcccggagaacctgcatgctgtcgatcgatcgagcaagcgatcgacgacggcaagttgcgcgcgattcgcacaacgacaggtaattctcagagctagcaagcgagcacacaccgcgcgtcgcgatcccagcttagcttgttcaattcagaacgccccgcgcgcgcacccggccggcggctaggctagccgcgatcgatcgatcgatcgcggccaaagtccatatattattcttccgggcagaagctccagcgacggcgacggcaccggcgtaccagtgcgcgccccgcgtcgcgcgtcgccgtcgttcttttgtctagcgatatcgagcacgcgaaaggacccgcgcgcgcgtcgccgtcgccatcgcgcgcggggggggggggggggggg

SEQ ID NO: 24075 - DNA, 8711 bp, Oryza sativa
acgcgcgtcgccgtcgagctccggcattctctcctctccgctacctttattcggggcgatcgacgtcgcttgcaccgagaaaacgaagcgattttgctctactctagactagctagcgagctagttaccgctgcttggactacatgggatgggatcgatcttggccttcttcttgggcagctggacttgttgaggcctctcgttgccaagtcatcccttagcaatgctatctctttaatgtacatctctcccaaaaaggtgaggagttctgcagtgtccacgcatgctctttctgctttgagaatcaacaggggtgatgtggatgacacctagctacatataaatgtgtaagggttttcatggtctgcagtttcgaagccacatgattcctgtaggatatcaggatagatgtgtgtggctcttgttataaagtataacattttggttagttacatctttgtttaattagttttccgtacacgaaaatcacttttggtccgtctggaaaaattgtttttttatagtgtctgtttgggtcggtgccaaactcaagttggaaaacttaaattactgtgaacgtttttgccgtgtattttgatccttggcgacatttatggcattctacacacatattttttaaaaaaacaataatgacccacatggcatatattatcttctccacatttttgcataattagtcttcccacactttgccaaagtaatgtgtgtgaaatgttgtagccaaccagatcagtactagcaagttctctttatttgaggccactagtagaataaacaaaataaatatttatcttatttttcggtttgttggtacctcataaaaaactatgtatatttactatttattatacataattttgctgctatcagttgtacaactacaaattgaactcgctttggatcaagttgcgtagtgcgaaagaattcaagtacatacatgcatctcaaccaagagccacacgtataacttttgtgtgatacttgactgacacgtgtcttcatggtgactcatcaattagaaaaaatcttcgtagatcgtgcgacggggttcaactatgtccacactcaagatgcgcgacaaattaactttgtcttatatggttgaagtcaattttaatatattttgtgatgttggcatgatggatcaattggtggtgtacacattggagatgcaaaatgttgaactcatagccatagaattcaacttatcccttatgctctagaaaggatgtgaattggcatatatgcactatttaccacataaagtaaaaaaaaatagacatacagaatcaaaggcaatgtcctatatgctcctacaaaagaatcttgaacaatcttatgtgtatataaagtgaaaaaaacagtgtatatttatatctttatatactctttaactatgaacaaaaatcatcctaccactccaaacttttaaactaacatttatttcctgtcaccctctttctcgggtgaacttcgcaattccgtccatataaccccctaaagcactttacgtaaatcatccaatatatatgatacttaggcaaaaataattttatggagttatatggacagtgttgcaaaatttgacaggttgcttagagcaagtactgtaagcccctaaacacttgcctcaaaatgccacataatcttatatcatgaggtggaggaaaaaagaaagtagagatagtaggagacacccctcatgcaagggtaacctccacatgaatttcaaaagaaatgagaggaaaagaaagagtgaattggacaaacaaataaaatgaaattattgggactagctagtgtgctagaaagtttaggggagggggtacatgaatgtatttttcagggttaattagatgactggttttctaactttgggttctaggcagaactttggatatttttcctatttatatttgcaaaaaacaattaatttgaggtttatctatatatatatataatatagtttcaacctctaaaccaacaccattacgcgtattaagtagtgatccactatcagaacactcagttgatatttacatttaatcacatgttgtacattaatgcatattttttcacagcttttatttttgagatgagtatatgacttcaatttgtctctgacttgtcctggactcctgctggttgaccatcagcagaagtactttaaagataaacactatggcaattaatcatcaacacattcgacattagagtattcaactaaaccataattcactggtagtgtttggaataatcaaactaatgctaggtgaaatgtgtattcaactaaaccataattcattgatgatatgtgttatggtcataatctagaatttccacattacaaattaagtccatatataagcattgtgaagaaaaaaatatgtattgaaaaatttatttgtgaagcacctaaacaaatccaatgtgggaatggatatataactaacaaattggatagtgcatgatcttcatggcacatatcatataagtacaggcacatcaatggttaggtgtactagttttaaaagctagaatgtttattttaagaaataaggtgatcattatcattactgtgagttcttgcattggcaatttcaagaccaaaccctcctaattacattttttttctattgcctcatgctactaccacacaacatcccttaaccaccgattaataaccagcatcaatgccggttacagaatgcagcaagcaatcgaaactatcactactagttgcccaaccacctccccacaccccacataacgctgatgcaccgccgttgttgttgccgtcgtcttcatcttggagacacggatgccatctttgtcaccaagacatagctgccgagccgcaccctactcctcccttaccctgccaccgcccccacatttccatctctctacctcctcctcctaccaaatatagcaacctccaaactggatcaagcatggaattttacgaattcttaggttttcaaaatagtgtaatgaaaaaaagaagtgttttgaatcatcggagaggccatggaggtcctatctcctagcggacgcgagatttggagatagaggatgtagtttttgtcgttgtactaaatatatgatacccttcaagtatggaaacatatctaaatacagaatttcctatatataccacacctggtacgatggatgggtatgaaaagaatacaacctaccacacctagtacgatggatgggtatgaaaagaatacaacctaaggcaaaggttctattaggatatgatcacctcatatggcaagactttgaaaggcctactcggacaagaccaagatatacaaagtttatctccaagaatcctacaagaaaaccaagattatgggtacaaatatacagacctcgtggtgaagagaggattgatcttaacaagccaagtcgatgatcatgacaagttcctgattagaagatcccaaagagatacatgtaggtataaattagagcctctctacatattgcactctatacacatctacatatatacaataactaaaaggatgtagggttattatcctaagggaggctcgagcatgtataaaattcttttttgtctcggtgtgcatacgagggtctacgaggcattgcctttacacaaacaaccctagatagacttaaaattgtagtcatggcatcaaagtgtttacacttttattgttgcaatgatgtgactccttggaaataaaatagggtagtcaagcatagagcagggtggagaggtgaggaaaatcagtgcacggaaagcgagagtgggggaactagaggggccgataaggagaaaacaagaggatggcagtggttcgtgaactctagcctcagagcggatagggccgctagatctactgacccctagctggatctggcactaaaaggcgacgggggagggagggagtaggcgtggtggaaatgatacatcctcatctctagttgggtggatgtaatgttgattaaggagtcacttattggctatctactattatgtccgtgtctttacccaatataaaagggttcgagggctaaacagatttttgtaaaataggactctaatatttttaagataggataacgtaaatgggttacaatgaaaaatggattatactatgttgcagtatatatatatacccatcaatttcaaagagctaagtttcagagtaaactttattatgtttatttagtaaaggcacgaggacagcgcatgctctgatcgtacggtgtgaatagaaacccaatggcaaagcttgagctgtcttgtggaaagaaaaaaaaaaggaaaaatctctcgtgatgcgtacagctaccaactgtagcaggtacatgcacctgattcagttgagcaccagtacactgcactactcactcctagtataggatcatatcatattcataggagagagtcatatgaaaacacactgagtaataaaatcataggactataaataagtatatatacttctacataaactactccggagatagatagccatgcatgcaggcagcattacctgctgctggttgcctctgcctcctcaatcctgacgccccggggttccgtctccggctgagaaattaggctagccgacaagagctcgccatactccctcgtagctcaacatggcttatgtttaatgccccttgcatctctccctgcagcgcatacacatgcccggctcccgagaaagtaagtcaccgaggaatggaggagacgaagatatctgattccctgcgcctgcttttgtagcaaccggtggccgggcggggccgggatggtgatgccattagcgctgacagtggtgttgtttgttgttgttgctgttgttaggaccattagaccgatcatgcaaattaattaagggctaatttggattactaccctactaaaatttgccctaccaaagttttggtagggtagcaaactaaacatctctactaaaactctaccaataccatacatttggctttgtctatgaacttgtctcttatgggtaaattgtggcttcaatccaaataaacatttttaactctaccctactaaagttttggtagcccaaaatttggaactaccaaaattttagtagggcagcaatccaaacatgccctaagcaatcaaagccaagccccaagtcaaagcaaagctagggggtgtagtactgtacagtagctgcagcattctctctcttctatctcctctggcggcagtgtcaatcattagtggaggtatgtggtacatgtgtgacgcgagggggggcagctttatttatcatcgagtggaagcaaggactagcagtagtactactactactaccttgctgtgagtgtgagacagtgtccgtcgtccttgagccttcccatcaccggtcagccagtcacactgccaggcagtcatgctgccatgcacgcacctggagtacctgggctggatctccgccgagcaaaagttgctttggcagcagcaaccaccgccgcttttgcctttcccgatcgagcctgcacctgcacgcgccacaaacgaggaccaaccaaaccaacccccgtggcaccgcagttaccaggcacactgtgttggctatagtttcactcatgtcatgtcatgcttctgcgctgcggtctgcattgtcacgacggatgccggagctggacctggcgggggagtatcaccaagtacacactagcgcagccgctgccgctgccgctgccagtgccatgccaaccgcggggcacgggatggaggagtatcctgtagtattcatcatgatgcatgcggcgatccatcgatcggtttggtccccgccaatcaccccaaccatccatttatgtcgtcgcgccccgccccgcccgcgcgctgagacacgcggctgcgtaggtgtgtaccggtggcggggggtgccccgagcgtggaacgtgaggcagaggggcagggcctcgttttgtcactggtcctgagtaccaggcgaggcgacgccaagcgagggaaaaaaacaagggagggttagactaatgacggtggagtggtggatacagatacatgcacggacggacggactcacgcacgcactcacgcatacataccgtggattgacgcgagggcggtgcagggaacccggggcttggggctgcggctgcaaccgctgcgttgcgttgcgtctttcttatctgcttgtccattccgttcccgtccgctaggtccccccacgccacagcctcttatcccacacgcggaccaacagcgccgccccgcccgtcccccgcttcaccttcggcttcgacttcggcttcgtttcctcttctcttcgtctctccctccctccagcgaaagaaagagagagctcacctcgcgttgcccggccggccgcggaggagagcacggcttcgcattcggctggagctctcgtctctgcactcggagtacagctgcaaactcctccttccttgatttcttcaccctgtctccacggactgcacagatgtgggtgcaacgcgatctttcgctgcctccggtttagctctccggttgattccgatcgaggaagctgatgcatgtgtttgtatatggctcggtgttttgtgtgtgcaggtccgacggcaacgacttcgccgagctgctgtgggagaacggccaggcggtggtgcacgggaggaagaagcacccgcagccggccttcccgccgttcggcttcttcggtggcaccggcggtggcggcggcggcagcagtagtagagcccaggagaggcagcccggcggcatcgatgcgttcgccaaggtggggggcggcttcggcgccttgggcatggctccggcggtgcacgacttcgcttctggcttcggcgccaccacgcaggacaacggtgatgatgacaccgttccgtggatccattaccccataattgacgatgaagacgccgccgcccctgctgctctcgcagcagcggactatggctccgacttcttctccgagctccaggcggcggcggctgccgcggcggccgccgcgccgccgaccgatctcgcctctctgccagcctccaatcacaacggcgccaccaataacagaaatgctccggttgccaccaccaccaccagggaaccctccaaggaaagccacggcggcctgtcggttcccaccacccgagccgagccgcagccgcagccacagctcgccgcagccaagctgcctcggtcgagcggcagcggcggcggcgagggcgtgatgaacttctcgctcttctcccgcccggccgtcctggcgagggcgacgctggagagcgcgcagaggacgcagggcaccgacaataaggcgtccaatgtcaccgcgagcaaccgcgtcgagtcgacggtcgtgcagacggcgagcgggccaaggagcgcaccggcgttcgccgatcagagggcggcggcgtggccgccgcagccgaaggagatgccgttcgcgtccacggcagccgctcccatggccccggccgttaacctgcaccacgagatgggccgtgacagggcaggccgaaccatgcctgtccacaaaaccgaggcgaggaaggcacctgaggccacggtcgcgacatcgtcggtgtgctccggcaacggagctgggagtgacgagctgtggcgccagcagaagcggaagtgccaggcccaggcagagtgctcagctagccaagacgatgtaagtaaatggtatgagatagatatgcactgcataaccagctgactataccttcgctgattctcatgataaaaaactggttctattcaggatcttgacgatgaacctggagtattgagaaaatctggaaccaggagcacgaaacgcagccgcacagctgaggttcacaatttatcagaaagggtgagtagctcacatcttcagtgcatggatcatcctgcatccatttgcttcaaagttcacatgtcagtgcattgatcatcctgcatccatttgcttcaatcccatgactcgactcatgctgcaattttattgactgtattgcaacccaacaatctttgcagaggagaagggacaggatcaatgaaaagatgcgcgctctgcaagaactcattcccaactgcaacaaggtaaagataagccattccatcgtcttgctccctctgagatgcctctgaatgaacatttggtcaattcaggcatgctatgttttgcagattgataaagcctcgatgctggatgaagctatagagtacctcaaaacccttcagcttcaagtacaggtacattgaaactgccttcgaacaaatgtaccatgattgtcgggtgaatatgtacatagatgcattgacaaggtgcagttgtcattgacacagatgatgtccatgggaactgggctgtgcattcctccaatgctattaccaacagccatgcagcacttgcaaattccaccgatggctcatttccctcatctcggcatgggattggggtacgggatgggcgtcttcgacatgagcaacactggagcacttcagatgccacccatgcctggtgctcactttccctgcccaatgatcccaggtgcgtcaccacaaggtcttgggatccctgatacaagcaccatgccaatgtttggggttcctgggcaaacaattccttcgtcagcgtctagtgtaccaccatttgcactttggctggtcttcctgttaggccaag

SEQ ID NO: 24076 - DNA, 5841 bp, Oryza sativa
  unsure (1)..(5841): unsure at all n locations
gcaaactgaaaataaaaaaaataaatttctgcaaactgtccttctccccgatttatataactaacctgtatagatgatcaattatataagtacatgcatgtccgtccatatatactcccatttaccaacaagctccgagatgagatgacgacgacgtctcctgtacgcatatgtgctgtttgttgatgtgaaccggttggagggttttagatccgtcctccgatcaacgcgagaggcccgtggacacgtttacacgcgaccacccagtagtacgtacacatgtcgtgattaatttcgcagacccacgaacaactactcgcgggtcatgtcaaatcgatccatcaactgtttgcgagcagctgagaccgttagccttgtcttccaaagcgccgcactagctaacggccaggtttgatccggcaaatatagtccaaacgagatcgatcggtttcaaatcggcctcaaggactttcaaatcaaagctcttcgattcgatctagctagctaattcgaatcagcaaaagatcacaactaacgccaaagcgcggttacatatatatatatatatatatatacataataattcatatgcgcctatacatgtcgtcgtcgttgttgtctgtatatgtacgtataatctctccagctcgttgttaatcaagtgctattttgacatcgacgtgtatggtcttaaaacgtccgtgtgatttattagttgattgatctgataatgctgcagcgcatctgtaacatggaaataaacctgtcaatatgcgaatcggtgcttcgatctgttattcagagttatttcagacaatgggtaagctaaggggcctcccctcttattgataagcattatatatggcaattgccgtaagttttctaggattcagcttattaaaaccctactccataaacattagaaatcaattaatacaattagctagtgttttacaagtccatgtctcctaaaataaaggatatcacaccttatactagcttaattaatttgtgacactcttgcatggaggaaagttctccattaattaggtgctctctctgtacagtaagctggccggaagtaatggtcaatagatttaattatgctgcgtgctacgtacgtgtctacgtgtgtgccttttaattatctgttccctcttgcaccattattctgcccttttcaaatcgtgcctgaagtgtaggtatacagttggtgaccccaggaaaggctacaattaagtgctgactagctagacggttactgtgttggtgaagatggcaagtgctaactaatctgcagtgcatgtatagttggtagtgtaccctgcaacgtccatggccgttgttagttgtttggcaggtgatcgagccattcggtgatgtgaaggtctaaacaagtggtaacgttgtaacgagacgtctcctgccatggtgccactgccaccttcaactatctcctaattgttgcttgttggctactaccaactagctagctaggggtttagatcagtcaatgtgcatgcatggttcaacttaaatgaatgctctgtgtggttttctttgttacatgcatgcactattccattgtgattataactgaattagcatataagtttgctaataagcattgaacatcgttttctatcttaattagtacagtaaaacacgtgtttgtcctctctaattacaaatgcagtctctaattacaaatgcagttaatttggtcttgttatagtttccaattcttctggaaatttagctttaatttgtaagcatgacttcttaggtactttgtttccaaacatgtaagtactcgggacatataagataattttgacacattctacatgttatttaattagcataacttcaaaatggcctacctacattttcaaccggagcatgcgacaatatttcgaataataagttaattattataggaggcgtcttcgtccaaggcgtcactagcgaaggcaataatgtccacagctcaagatttcatcgacgcatgcagctgtactacgccaccggtttggtagcttgctagctatacgaccgcgcgagagctagctatcaatcagatcggtgcacgaatcctgcagacacgtcatcacggcacgctacggtagtaaatcagaattttcaccagtgatctaatctagctagcactatataattccaagttttgagccctgtcaatcgactgatggatcgctcaataactagttaattaggtatagttacatatatgtaggcagcgaatcccccattaattttgtctacgtagctatagctagctagcgtggactttatattggctatattgttaattttttgcacgcgcgcgacgggatcatctggcgtcacgtatatgcatatttatgtatctgcgagaggtagcagtagcagacgtaacacgagtggcgacgatcgaaatgaactgggccatccccgttcgacgggaacgcgcgcgcgcctgtatgtaccgcaccgacagtgcggagaaagagtactactcgcggcacgtacgtccccgcgcgcgcgcggccgagccatggctgttggtatcgaccactccacctcacgcttgtcaccgtcgacctcggcaacacgtacccacgcttgggcgagctagctagctagctagtgcgcggccccgcctcggtcgatcggtggctggatggatgtacggtggattggtggcgcgcgcacggattatttgggcaggcagcgcgtggtgcactggtgcgtcgcgcgcgcgctggtggcgaacgtgacgacgtactgcgtgggctccggccccgcacgtacgtacgacgacgacgcgcgctccccgtgcagggcacgtcggcgtcgtcgggaagggacgtacgcggggtacgtgggggacggcgcgcgtgatagggatgctcgaccgccgcggcaagcgacgtcccacccgcgcgaccacgcacaccgtttcgcgcgcgcgcgcgcatgcatatgggggccggaggatttagccgggccggaaggccggatgcagggctgacacaccgcccgacaaaaacggggggcgtgtagntgtagcgaccgccccgccccggccggacgtcgtccatcgttatcgctagtacgacgcgacgtttagtactgtacctgcacgtaaacccctgcgattacagaaacagacccgtaacattagtctcaacggttttctgcctagcaattactactaagtaatacactctcactggtggagaaaccctttgtagtcccggttcgtaacccccctttagtcccggtttccaaaccgggagtaccaatccgggactaaagatcgctatctttagtcccgggtgaaataaccgggagtaaagatcgatctccaaccgggactaaagatagagctgaccttttttttttttttgcatgcccatgttgctgcatggtttatatatatatatatatatatatatatatatatatatatatataaaccatgcatatatatgtttcaatacatatatagaaaatctgtacacatgcatatagaaacatatgtagtcatgtattaattacaattcattatatgtcctagctagctacgatttcgacgtagtagtactcgctgctagctcagaagctaaggaccggtgaattgtgtttccgtcgtagtagaattcacccttgggatcaaggatttcttcgttgatgaatcccatgagttgttcttgaaccgccgcgataaattccttgtgtgtggtcaggttatccctcatgcgaataaactatatgaatgtatgaaattgattagtaattaaacaagaaatcgctacgtaatgaaattttgaatttatttgtacgtacatcgagctctcttgtggtgatgatttggtctgcaaggcagtggcaatactcgcacacgtaatagccgcacaagttagttccctgcttttgctttgcgcactacaaataaatgacaaacaacgagagatctaattaatatacacttgtatgtatttgaatcggagaaatataaatgtagagcatgtgtactcacaggaaatttgaacttccgcctaagtctttctctccatttgccgcggaccaaatgacggaaccgataccaagccctacatggagtttaaagctatgattcgtagtagcaattaacataacaagattttcttaattaacaaaggaacttatgacggtacctgtctataagttcgaaaaccttgtcaaacgtagactcttttttatccattgagtcatatacgttgacagtgcaggcctccaggtcgatgagtaaaagcacccagtggaatctgcaatgtgcgtgggatgcattacatatgaaacacttagcaagttcgtacgggaatgaaatttggtatgtaggaaaacagtaaaattaaactaactctgtgttgtatggcaacagtatgaacgtcttgtaatgctgcgccttcaggagatggacgagattgtcctctgtttcttgtggatattggtcgagcattgcgacgtttactttccgagggtcgatgaatccagtatcgaaaaccctccgccgtcgggccctttgaatctccattctacaacgataaaagggagtatattattttctatggtctacttatatacaaggacctaattaattaaaggagacgtatagtaagaaatctaactgaacgatatacttacaaaatccagcaactcataatagagacgtcgagggcgtccagctggtatagttcgtagattcccctgaaattgatccagagaatgtcatctccttgcaagaagtccgtgtccctgatcctcgctccgatcatctctctaccggtggcgctcatctccatgtacagctgatggaacttgtacatttgtgtgggtagggactgcagcagctcaggcttgacaagcggtttaccgagttcgtacatgtatttcacttccgccttttcgattggtgcgactcctagcaattaatccgtagttagaccggtgtcagtaataaattgttctatcgtcatttctttaccggtcaccaacggctcgatctcctggtttggttgctctccaagctgagggactggtttggactttccagaagatgctttcttcagcgttcgctcatagtccgatagcttgatggcctccttgacagatgcagacatacccctgaagaagttcctgacactggggtctataggaatcttcttttctggacttcgaggcttgaattgtctcttgacttctgatgcaacgtaagcgtcaagctcctcttgcgtgcaatcgtaccccgggtccttgttcttggcggcgtcaactttcgccttctttgttgcccttatgtgggcaagcggtggagctggggggggcccttgactttgaaggtgccggaagaggagcttgcgggggagtaggtgtaggagcacgaggaggagtcggtgcaggatcctgaggagtcgatgctggagcctgaggtggagacggtgctggcggagcatgaggaggagacggtgcaggatcctgaggaggagatggcggagccggaggagatggtgcacgagacgccgcttgtcgcccagggaggatgatgtaccgcctgcgccatagaataatggcatggcatgtgtctcgtagatgcgtctcaccgtctcctccagggtaatccagctcgaggtcctcgtacgcgccttcgaacaactcaacttcgaccttggagtatcctgctggaatcggcctgcagtggtaagtacctgaagggtccgttgggatggccatgcccgacgccaccttcatgttgtgagagattatttattagtaatcaacatatataagcagcaacta

SEQ ID NO: 24077 - DNA, 2785 bp, Oryza sativa
cgctgagtgatgtcatcaacgggacaggtcgattcgtcctgtgtttgcatggcgtccatgctctgtgatcctacctgccccgttgaggcgcagctgctacggtttcctgacgggctcaccattgcaggaggaatggtcggctggggatcatgggaccgatgtgcggccatgcgttcatcaaccttccttgccacctcctcttgcatgttgagttcgtagctcgatacccggaactctaggtctgcaatcttcgcctcggtatctctcttgctcctcatccgactcctgtacgtgtggatgtcctccttgaaaccaatcttccaaggaatcacccctttccctcgagttcgtcctggatgctctggagtctgtagggcgagtgtcagctcgtccctatctctgtctggtcggaacgtgccctgagaggaggcttccactgcatctgttagtcgtcgcgcagcctcttgtatctgatagccgaagaccagtgagccatcagctgggttgagcgttccaccgtgagcatagtaccagaacttcgatcgttccggccattggctgttgccggttcgatacccctctcaatcaagctagcctccatctgctcccacttcggcatcgcgacgctatagcctcctgaccccaagtggtgatggtacttcttcttggcggcattttctttgtttctttccatcatcgccttcccttgttcacctgtcttatatgcaacgaactcgtcccagtgatcccttagctttgggaatgtgtcgaagttcggtgtctgccccttcagtatatacttctggtacagatctcccttgaagctctgaaactgttctgccattttcttcagagtccaccttttcactttgtcctctgtacccgcaggaagggtgaatgtctcgagcattgtggtccacagcatctctttctccgaatctgggacaaagctctcatgatctccgcgtgcccttgttcttcgccagtacaccgtactgacaggcacgttatcccgcacaacccaaccgctgtgacgtacatagttcttggcggcttcggccggggcactaggacgtccatcttattccacttccgttatgatgtgccgaccctcaagcttcttcgctgcacctcgttgcccgcgtgccctcttctgtccaacggagggttgactaccactagcctcctcctcctggttcccctccacatccctttccacgtgcccctgctggttcccctccgcatccctctccacgttcccttcctcgttcaagtactggtttggatcctcgttcccctcttcttcattccagtactggctgcttcccttcgcgattgtatcgtacaatatctgttcctcatcgcggtcagccatctgttgatacaagaaacatctgctaagtcacgagacatttatgttttaacaatctaagtcatgtatgctaagtgtaaatgtcgtacattagaaccctacacaaccttacgtgctaagtctaattacaaatcgtgatataagctaagtctaggtgacgtatattatacaaccctagctagtaaataattatatactaagtctaattacaaataaaataatcttatattaaaactcaaataatattacatgctaatactaaaatagtcatgtatatgctaagtgtttcgtgcgtatatgttaagtctaattaagactacaatagtcaattgctacttgtcgcaccaattccgtagtcaataattacataccaagtctaattacaaataaagtaatattatattaaaactcaaataatattacatgctaagactaaaatagtaatgtatgctaagtgtttcgtgcgtatatgctaagtctaattaagactacaatagtcaattcctaggagtcgcaccaattccgtagtcaataatgtcatactaagtctaatttgcaataaaataatcttatattaaaactcaaataatattagaacactacacaatcttatatgataagtctaattacaggtctaataatcttaattaattgcattacaaatataacaatcatttatattattacgtcacttgcctgctccaattccttctagggctagctcttccactcaggcttgacggacgactccgacaacacgtcttttctgcaagataaaaaaaatgtgttaggataaatgcgaagtaacatatatatatatatatatatatatatatatatatatatatacacatgtatacatgtatatatacacatgtatacatgtatatatatacatgtacatgtatacatgtatacatgtatatatatacatgtatacatgtatatatatatatatacacatgtatatatatatacacatgtatatatatatatacatgtatatatatatatatatatatatatatatatatatatatatatatatatatatatatatatatattgcatttcacgttaacgttcgtcctcgttcgttcgctcgttcacgttccctagctcgttcacgttcgttcgatcgttctcgttctcgttcacgttgtcgcggcaacgtacgttgacgtgttcgttctcgctctcgttcgttcgatcgttctcgttctcgttcgataacggcggtgtggcggcatcggggcggcggttggcgcggcggcgtggcggcggcgtggcgttgtggggccgtggcggcgcggcgtggcgtggcggcggtggcgtggcgtggcgtggctcccggcggcgtggcgtggcggcggcggtatttgcgcgcgcggcggtgaaggcggcggcggcgtg

SEQ ID NO: 24078 - DNA, 4749 bp, Oryza sativa
cagttgttgagaacaaccgggagtaaagaaaagatctttagtcccggttgttctcaacaaccgggagtaaatatcttttcccgctatttcgaaattctttttaaacccggttagggttaagaaccgggactaaagattatagcactgcatatgattttcgcttacatatgtgtttataaaatagaagttaatgcattaacattatttaaagtacaaagattgatgacaattacttcgaaaaattatttttgtctgtaataaattaagtggataaatcgtaataagcaaatatatgacttataattaataaaaattccaatatatatatattcttagcatatatatgaatgatattattatattggtaaaaactctaattaagatattaatgtacatactgcatgatttaaaattaataaaaattgtaatcatcatatgtacttagcgtaggaattatattaaattaaatgctaaaaactctaattaacatatgtaaatgccacatgcatgatttaaaccttttaaaaattcgaatagtcatatataagtagcatatgaaagatagtaaattaaattgtgaaaaactctaatatatgaatgatagttttaaaaatatattaaatttaatacttttaaaaattctccagtcaattataattagcatatgaatgatagtaaattaaatgttaaaaactctaattaacatatgaaattgccacttgcgtgatttaaaacttttaaaaatcctctagtcaattataattagcatatgaatgctagtaaattaaatgttaaaaactctaattaacatacatatgaaattgccacctgtgtgatttaaaacttttaaaaattgtaagtatcacatataactaacatatacatgatttaaacttgttgaaacctctaataatcgtgcgtaattaacatatgccatacatcaattgatttatatggataatcaatacatccaaaatagtttacatcgtgtacacaataattacggcattacatcggcggtgacggttgaccgcacgtactttctcctcactattgttccctccttgtgatcgctgcgtgagtaaggggtgtcttcatttgataggaggatgctagggtcaattgtcaccgtgaaagggggttacccatccaactgatcgtaatcctcgtcagtcttgtcctcaactccgacgatttttcttttgcctgggagaaccacttgacgcttaggctcatcaggccctctgcccttctttcctttgctagacatgtccttcacgaaaaagacttgcgttacatcattggcaaggacaaaaggttcgtccgagtatccaaccttgttaaggtcaacagttgtcatcccactgtcatcaatcattacgcctccaccagtcaacctaacccattggcaccggaacagaggaaccttgagaggaccatagtcaagttcccatatgtcctcgatggcaccgtaatacgtggtagttgttccatcgtgtcccatggcatcgacacgaacagcgctgttttggttcgtgctcttcatgtcttgggctctcatgtagaatgtgtacccattgatctcatatccctggaatgtcgcgatcgacccagacggtcccctcgccaggaaggcaagttgttggttgatcgactcgttacccatgagatgttgtcgtagccacgcggggaaagtatcaatgtgatgccgtgtaatccatgcatcggacttaccgatgttcctggcgcgaactagagccaagtgctcctcgatgtaaggagctaccaatgaagagtgttgcagaacagtgaaatgggctttacggaataaattgttgtctaccgtcattattgctttccttccgagagttccctttccccgtagtctcccttcatggcgtgattcaggtaccccgattgggcgaaggtcttcgataaattctacgcaaaattcgatgacctcctctgttccataacccttggcgatgcttgcctctggacgagcacggttacgaacatacttcttcagaacgcccatgtacctctcgaaaggaaacatgttgtgtaggtacataggcccgagaatacggatctctttcacaaggtgacaaagcagatgcgtcattatattgaaaaatgaaggtggaaatatcaactcaaaactgacgagacattgcaccacttcattctgaagggcttctaatctatccggatcgatgaccttctgcgaaattgcgttcatgaatgcacatagctttgttattgttgcctggacattgtctggaaggataccccttattacaactggtagcagttgtgtcatcaacacgtgacagtcatgagactttaggtttgtgaacttcttctccttcgtgcttattattcgcttgatattcgtggagtatccaaacggtacctttatgctctccaagcattcaaacatactttccttctctgccttgctaagagtgtagctggctggactcaagtaatggcttcctttctcctttggttccgggtgaaggtcgccgcgttgttccatatgcttcagatcattacgtgcttccagtgtatctttcgactttccgtatacacctaggaagccaagaaggtttacgcaaaggttcttagtgaggtgcatcacgtcgattgcgtggcgtacgtccaagaattcccaatatggtaactcccaaaatatagagttctttttccacatcgccgcgtgaccatcttcgctctctatatgctggcttccaggcccctttccgaacactactttaagatctttaaccatagcaaacactgttttcccgctgcgatgtttaggcttcgtacggtggtcggccttatgttcgaagtgcttgcctttcttccgtaccgggtggtttgctgcaaggaatcgacgatgacccatgtatacaaccttcctacagtgcttaagatacgtactttctgtttcatccatacagtgagtgcaagccttataccccttgttggactgtccggataggttgctaagtgcaggccaatcgttgatggttacgaacagcagcgctcgtaggttaaactcctcctgtttgtcctcgtcccacacggggacaccttccttcttccacaactgtttaagatcttcgaccagtggtcttaggtacacgtcgatgtcgttaccaggttgcttggggccttgaataataatcggcatcattatgtacttcctcttcatgcatagccaggggggaggttgtagatacacatcgtaacgggccaagtgctatggccgctgctcatctctccaaaaggattcatgccatccgtactcataccaaaccgtatgtttcgtgcgtcctttccaaattctttaaattttctgtcgatgtttcgccactgcgaaccatcggcggggtgtctcagcatcccgtcctgttgacgctctttaagcgtgccatcgcaacattctagcattccccttgttcctgaacaaacgccttagccgtggtattatagggaaataccacatcaccttagcaggaattctcttctttgttagctgcccgtcaacttctcctggatcgtcccgtctaatcttgtatcgtagtgctttgcaaacagggcatgcttctaggttctcatactcctcaccgcgatataggatacaattgttcggacatgcgtgaatcttatgaacttccagtcctaacgggcagactatcttcttagcctcgtatgttgtctcgggcaatttgtttccccccggaagaatgttcttgacgagtttcaataaatcgccaaatgccttgtcactaaccccattttttgccttccattgcaacaactccagagtggtatccaactttttgtgcccctgctcgcaacctgggtacaacgaagttctgtggtcctccaacatcttgtccaatttatgggcctccttttcactttcgcagtcttccctggcgtcctgcaacatctgaccaagatcatccgcaacgtcgttaccataagcagctatttcctcctcgcccgtttgatttccttcaaatccaacatactgagcaaagtccggaatattgtcgtcttccacttcatcttcttccatttcaacaccttgctctccgtgggatgtccaacaattatagcttggcatgaaccccgactcaaacaagtggaaatgaatagtcctggatgcagaatactccttctgattcttacacttattgcatggacaacaaataaaacccctttgcctgttagcttcggccactctcaaaaaatagtgcacgccgtcaataaactctttggaccgccggtcagcgtacatccattgccgatccatctacatgagtcaaaaaaaccgcacacaaataattattcttacaataatgacagtcatacaataattataagatatctttattcatacaaaaatcataaaatattacaccaaataattcttaaaaactatttgtaaagttttaaactaattttaatgtgttttacttcttttaatttttattttagtttgttttctattatttaatattaactttcactagagttttccttctcaactattttataaaaccttgtttagcaaatgaactaaatttctatatattctttcttccccacacacattttctctctcatcaacttacaactaaaatttggagacaaaaaaagtgtgcaaaacataagtgcaaatgtagtatgacaaaaaaaaacattggaggatgaagttgcaaacctttt

SEQ ID NO: 24079 - DNA, 2270 bp, Oryza sativa
cggccttcacttgggacagtgcagcaggaacccttatgagtatgggtgaaaacggtatggaaactttacggattctggacctatttttgaaaatggaattggtcggtccgaattttttcgaaatttttcggaaacgcaaacgaattcggaaaatatttctcagaaacagaaacgaaaatgataagagtagcttccgtcggaactcggaatcggtcggaaactttccggaaattttctcggaatttccagaaattttgtgactgaaataccctggattctttttttaagcaatgaatagtgaataccatggtatttggctgttattttttaaaaataatatttgttatgcaaatctgaagttacataagaatatttttttcatgcattgagatttatctacaacattactctcttaaacatagataatttattttatagattgtgttttgtgatgtactgttaagacttaacaattggacttatatgattgtgttttatgatgaattgttgactgtttgaaacttgagaattggatttatcagtttgagggggttttttactctaataaatttccgttaccgtattcacgccggtttattttcgctccgatttcagttttgataatatttgatttcgttttcgtatccgaggtttccgattcccaaaaaaatatgaaaatgaaaatgataaaggtggtttccatccatttccgtaccgttttcacccctacttgtgagttgtgacaccccaaaaaaaatggaggagaaaaataaaaagaaaagagggttgcttgagctgcttagctccttgggcctgaaccagtgtgcagcaagttgggccttagcctggttggtagcaagtgtgcgtgcgtgcagctgcagtagcagcctagcaggccggccggtggctagcagcagcagcgagcggagcagcagcagttctggagctcggcacgcaccagctagtaccatgtaagtttggagagaaagagacagcagtagtgtataagaatgctcgagcaacccagactaaaggggttacaaatcgaaacctcgaatccagaactaaagatgatagcgccacgtgaataacgctaccatctttattaccggttaccaaccagaactaaagtttttttttcttttttttattggtttattttgctgcttgcaaccagacatcaatactgccatgggaccaaaattccacggtgatgtcatataaactccacgtaaagttgaaagacggctggtgaacttattccttttccaaacgcaaatgatggtccagccccgaaatgcccagtgcttaggattaaaggattagttcatcttaggtcccttaacttggcaaggaatccgattttcgtccacaaacgggaaaatcagatacagccgtccctcaattgtcaaaaccaaataaggccctcggtggttttaatggcggttttggctgacgtgacgcctatgtggctaatttgacttaatcttcatctgatggggcattgacgtgccggttacgtggcaattcaaacccgaaaaataataaacctcatgagacccacatatcagtttcacataaaaaaaatagtagggcccacataggccccacatgtcattttcagtcccccctttttcctcatcattctctccccatctccctctcttcaactctctctcccctctcctctctagcgacggtggaacggctccggcggctgtggccctggctgcggcgcccggcggagatgagctgggcgtcggtgcccatgccaccgcctcctccattgacctcgccgtcgccggtctcctccagtatactcaactgcatcaagaggtatatactctttctaagaaaagaatggcaagataaagagctgacattgcagagtaacaacactgctactccagtaaacactgagaggcagagtgtacatgtaaaccaaactcattttcccattcaactgctatttgccatgctaattactaaattgagcaccgaaaggatcaaagaattaattaacccgtcgctgccgcggctcctgcaaccaacctgcaccttcgtgctggcgccggcgaccaagaagcacccaggcttgctcccgagctcgagcgagacggagccgggcttcccgtcgagccccggcacgacgttgaacatgcaaccggctcctccattgacctcgccgtcgccggcgacctcctgcccaaatctggcctgagcttgccacgctccttgtgggcggtggcaaccgcttcttgaagggcggg

SEQ ID NO: 24080 - DNA, 14261 bp, Oryza sativa
ccaccccggcccccgccgcggcgcccaccaccccaggtccggccaccgcgccacccaccaagtccaccaaggcacccggccaaggccaccccgccgccggcctcatcatccccgccgcggcacacgccgagccaccgccgccggagctcgcccacccggctcgctcgcctgctccgccacccacccgcgccgtccgctgcccgggaagaagaagagagagagaggggaagacgtgaagaagaagtgaggatgaagaagagagaagggagagggaagaaggcagggctgaggctgacatacggggctcacgtgggccccaccatttagaaattactctctccatttcaaaataagtatagttttagcactgttcatgtccaacatttgaccgttcgtcttatttgaaaattttttatgattactacttttattgttattagatgataaaacatgaatagtactttacgtgtgactaatttttttaatatttttcataaatttttcaaataagacggatggtcaaaacgatgaacacggatttctatgtctgcacttattttgggacggaggtagtatttttttatgaagctgacatgtggggacacgatttttattattttttcgagatataattgccacgtaagcaccatgtcaatgccacgtaggatggagacctagtcaaaccagccacgtaggcgccacgtcagccaaaaccaccttccaaaccgttgagggacctcgtttgcaccggttttaatagttgaagaaccggttgtatctggttttgaagtttgaggacgaaaatcagatttggtgtaaaattaagggacctcggatgaacttattccaaggattaaataggcttaaggtccaatcgtcaaaatcctaatgtgggtaacaggataactagataatgcccatttgcctaaacataaccagaaaagaaatgtccattttgattcccttaagggtcaaatctagtttgtatccctcaactgtaatcttgatccaaactattaaaacaagcgtaaatgtctccctctatgtttttaggggtggtttttgctcacgtagctcgttgacctaatccaaccgacacagtcaacatgagtattttctttctttctttttttctcatcctctcggctcttgttctctccaaccaaaaaaaattattcaaaaggaagcaggcagggcagcacattgtgagggaatcaggcggcggcgcacagttctctcccttggcaccctcctttccctcatatgcaatggactcaaaagggcggctgcagcgtatgccggtggattaggtttcgagggtggatccagtgagagcaaaggtggtggggtgacccaaggacgctgcttcgctcaagtccacatgtgcttcgcctcaaggccaggatgccgccgccctactcgagactaggtagctgacttgagactaggccgttgtcgcgcgtcggggccgcccagccgctgctccaccttgggtcacgctgtcactctatctcaaggctgggccatcgccactatgcttgaagccgcactaccgtcccacctcaaggccggcaccctgtcactccacctcgaggctacctagacgttattttgttccgctgctacgccttagagacaccccactgccgctctaccttgggctatgccgtcgctctttctccaaggcgcgctgctacaactccgccctgagtctccatgtgcctgtgtggagaaaggagagggaagaaagaaagaaaggagaaagaagtgggaggaatcactaacatgtgagctctgtatattgatttggtcagttggattaggtcaacgagccatccaagagaaaacaacccttaaaatcattgagaaaatcatttttaactgttttaatagttaagagatgaagatatatttttttttatagaaagagatgaagatatccgatatccaatatgataggaatcagaaaacgtatatttttgagggagtcaatgcggacttattcccaccagaaactgcagcatattggacgcagtggttccttccgcggtagctgcgcccgcgcccacgggaatgcgattcccagcccattccacccccttcccattccggtgggccattccgaatccaaccaaccaaccaaccatcgaacccgcacccgcatcgtatccactcctctccagtctccccgccgctccgcatcccgcagccgctcgtcagcgacggacatggccgccgccgccgcagccatggccaccgccacctccgccacggcagcgccgccgctccgcattcgcgacgccgcgaggaggacccgccgacgcggccacgttcgctgcgccgtcgccagcggcgcggccgaggcgcccgcggcgcccggggcgcgggtgtcggcggactgcgtcgtggtgggcggcggcatcagcgggctctgcaccgcgcaggcgctggccacaaagcacggcgtcggcgacgtgctcgtcacggaggcccgcgcccgccccggcggcaacatcaccaccgccgagcgcgccggcgagggctacctctgggaggaggggcccaacagcttccagccttccgaccccgtcctcaccatggccgtacgtcttcttgctccccttctcttctgattctctcgcggcggagacgacatgaatgggaatggtggtgcatggattggggcgcgcaggtggacagcgggctcaaggacgatctcgtgttcggggaccccaacgcgccgcggttcgtgctgtgggaggggaagctaaggccggtgccgtccaagcccggcgacctgccgttcttcgacctcatgagcatccccggcaagctcagggccggccttggcgcgctcggcgttcgagcgccacctccagtttgtgtgctctccccgctgtgcattcttgattcacttgtgaaattcgattgtgctgagcgtttccggcgaaggtttcaggggcgtgaggagtcggtggaggacttcgtgcggcgcaacctcggcgcggaggtctttgagcgcctcattgagcctttctgctcaggtgtttattgtagtgtgcaattgctgttttgtttttgatgattcagataagaatacggtgatttcggtgcttaggtgtgtatgctggtgatccttcaaagctcagtatgaaggctgcatttgggaaggtgtggaggctggaggatactggaggtagcattattggtggaaccatcaaaacaatccaggagagggggaaaaaccccaaaccgccgagggatccgtgagtgagaaattgccttctttgttggattaattgtccattgtgttacactgatatgccttcaccatttttagccgccttccaacgccaaaggggcagacagttgcatctttcaggaagggtctgactatgctcccggatgctattacatctaggtttgttatcattgtctttgtaatttacctagttcttcaactatggatattaggtgctgtagattgttcagatagatgcacattgtacaacaatctaggtagattgattgctatggcttgttgaattaactgtttcacttgcatcattgcctcagcacatatgaagcatatggatagattcttcaatcatttatccctcaataacacaattttgacaccagtgcttctcctttttttcatcctgcttcatctggctatccacaatataattaagcatacaaaagaggcactctttgatggacaattcatagtgttgtgggttaatattcattgcattctttgagggacaattcgttacaccctaacatgaactagtaatgattggggtgcttaaccatttgttctgcatttcctccattttcaggttgggtagcaaagtcaaactttcatggaagttgacaagcattacaaagtcagacaacaaaggatatgcattagtgtatgaaacaccagaaggggtggtctcggtgcaagctaaaactgttgtcatgaccatcccatcatatgttgctagtgatatcttgcggccactttcagtaagttatatatatttaattaactttctgttcccaaaatacactgcagcacttcattgcttcctgaggtcctcgattcatttttcggtagacaggaagtagtattcatttgcactttttaagggattaattcaacatatccactggaaatatacatatcctacacatcctgtcaacatacttgctaaacagcattttgtttgagttgactggcatctcagcagccaattactatctttaggggacaagccacattcttaataaatcctgtcggaaatcactttttgatttttatagattagtgttgtcatagaatttggcttggtgatctacttggtaaggttaactgattcacaagtcggacaatttcttcaccaatctagcagtatgtttaagtgtgttggtacttaattctaaatgtcctgcgcatggtaacatatcatatgcaaaaattcctcagtaaccgaaatttatactgtaagttttaactgtctttacactgttaattttagacatacttcttccttgcttgttcattgaacttgtttcccccttccacagagtgatgcagcagatgctctgtcaatattctattatccaccagttgctgctgtaactgtttcatatccaaaagaagcaattagaaaagaatgcttaattgacggagagctccagggttttggccagctgcatccgcgtagtcagggagttgagactttaggtacttataggaattcaaccttattattcttctaacatataaatgaactaatctttcttgtctagtttgcatttattgtggattaagtttggttatattgttcttacaagtttgtggtattattttgtataggaacaatatatagctcatcactctttccaaatcgtgctccagctggaagggtgttacttctgaactacataggaggttctacaaatacagggattgtttccaaggtatcgctgtcaagttgtttattttgcgactatatgattacagtatcctgtttttcaactccagctgctgttagactgtcataataaatctgctactacatgtttgcacactatttgactgcatttaaaaactcagatagcctatatttttagttgcctgctactgggtgtatttctaatgatcccatcatgtttgcagactgaaagtgagctggtagaagcagttgaccgtgacctcaggaagatgctgataaatcctaaagcagtggaccctttggtccttggcgtccgggtatggccacaagccataccacagttcctcattggccatcttgatcatcttgaggctgcaaaatctgccctgggcaaaggtggttatgatggattgttcctcggagggaactatgttgcaggagttgccctgggccgatgcgttgaaggtgcatatgagagtgcctcacaaatatctgactacttgaccaagtacgcctacaagtgatcaaagttggcctgctccttttggcacatagatgtgaggcttctagcagcaaaaatttcatgggcatctttttatcctgattctaattagttagaatttagaattgtagaggaatgttccatttgcagttcataatagttgttcagatttcagccattcaatttgggcagccatttactatatgtagtatgatcttgtaagtactactaagaacaaatcaattatattttcctgcaagtgacatctcaatcgtcagcaaattcagttactagtactactgtgtcatacaggaacacatgagaatgcagcaatctgtttagactcttcccagacatcccccactataccgtttcagtgtgatctttgtgaaaagaaaaagaatgcgactattgatacagtatttgactacctagattattgtatactagtgtcaagctatattcctcatggctcttttctaaaacaacaatacaaattgaagtacaagagtacttaaaatttatatatcccaaggaccgtgccaagcagtgttcttaattaatttgagataacacgatcctaggaagaactagtactagcaaacaattaacaatcaacacaaaccctttggcttgaacttgaaggatgccatcatcatgcatgcaaaatgtacaccacacacacatgcatgtgctagctgtgatcacttctgaaccctttttttttttttaaaaaaaagcctagcatgatcacaggatgacaactgaacacacacacaaatgctgaaatgcctctagctgcacacacattgtcatttgtcaaaggcagcagcaatgaatgcagtggagggatttgatgcacaagaaactgaagcaggtcaccgaggatgagggatccctgcctcccttgctatgcctcttttatctttgactgcatcgatctgcaattctgcatctctgtctgcatatcacgtccctagctgcagcccggccggtgaacagactgaagacaaccatggagatcatcggccatgcatggacagacaacaagggcacaatcattattagctagggttcattcttgcatggatccaacattgcaagtttatgccagccagtagcttttgagccttttgtttctccagctaattggtctggaatggattactgaaattttcagatctctgtcagctggccagccctgcatgcatggaaacaaggcaggcaaggaggaaacagcttttgctgcacagcatgcatttagtagtagaattcatggagaggccaaggagttgtgaattgtgtggttatacatgaggagcagctaggtaggggtcctcagaatgatgtcttgcatcttttgtcgtgcacacatctcaatgcaatgttgtatgtataagttatagctagtccaatgtggcatacagctaaaatggtagctagctcgagctttgtgtctaccgttcatcgaccagctctttattcaggttgatgactctattagctaggtgcatttggcctctaagccaataattgttgaaatgtttaattctttgttaatttttaattaagaccgatgttgaactgtgcatgaatgatcaaatgccttggggtttaatttgtttactctctccagtgtcctagcagctagcaaagatgattctattttgattaacttgactacacattctactatgtgaaaacacacactcacatattgatccatcttctggccatcatttgctaggggatccagatctctgcgtatgtaggggattccgagaggcagggagcagcattacgtgaaacatggatgcctagcttagatttgcaagcaagcttgctctgcacataaagagcagaggaccctatgtttgtactaacgaatggaattatatttaggcattggacattcggtccgagttgctccctccgttgagaaattcaaggcgtattagtttttgacaatattcaatattaaagtgtgaccattattttttataaatagaacactgacaactatcatattaacttcatgtaaaatcttctaaatatgaatccattgacaccacttgtatcacactaaacatatatattgtttgtttatttattagtcaaagtttacaagtgttgacttttacaattactacatgcatggtttatattttccaaaggagggagtaaattatcggatagtcaaactattttagttgatcaaagatgaaatattcaccaaaatagagtgggacaaattataaaaagcattgaatcatttttattaaaaaaagaatccagtgtgtaaattgcaacattaaaaaaaaacttactaaaacattcaaataacaccacatgcaacatttgcaaaatgacatgctaaaacatgtgaaaaatacttattgaaatatatccaaataataccatgtataatgtttaaaaaatccattgcacttacaaaagcgtaatgatccaaattagcattctctccaagcaaatcgctcagctcgaaccaacccaatcgtccacactccatacatggcgtctcctcctgtggtttggctgttgttttcctctctgcccctaccacactttcgcgtgttaggaacccgttggttgcagcggggcatgctaacgtgctgtgagagatcaggggtgctggatggtgatggtgtaggagtcggtacatgggaggacggtgttaggaacctaagcacttcatggggtagttgacactgaggatctgacaaacttcctgtatggcaattgcaagcaggtgctgcctggaacttccattgtgacgatgaaagcggaggcagggtagtatggagacaccgtgccattgccactgtgttggatgaatgagccgggtgagaggttggtggtggcacacgagaggaacaagcgaaagagaagtgtataaaaaaatagttaatccctaccggttcaaaacggtatcatcgatcggtttttaaccggcagtgacacgagcgtatcactatcggttcgttcaaccaaccggtagtgatacaagatgcataaatagatcaattttattgggttcaatcctcacggtggtccatgccatgaaccagcagtgaaacatcacagccaattcatgccatgggtcagcagtgatgctaagcatctctactggttcatggcagtttggacaggaaaattcattcaacccctatggacggatagggatggagaatcactgctagctcaagccaaagtggcagtaacaataagccaattaatatgtgaactcatcaaagtattattagaaccgtatcaatatatgcgtataattatgggcattaggatttaaaactagtcagtatccacaacgactcaatcactatactaaaagtgattctctaatttccaacattcagttatgagtttgctcagaaagtcgcaaagcttaattagttccggacaatcgtgtgccgcgcggaaaagaaaaggaaggagaggttgacaaccgtgagcccgtggccacaccctgttttcacaggccacgacaacgtgagatgaaatgtgatgatgcgaattgaatcagcaggcgatgagccgatcgatggatgatagaggcgaccgaccgaccgaactgggaatgaagcgaagcgacgtaagcgatgtcgcactactgtcccaatctgctccctgctcaactacgcttagaaaactgtcaaacttgtaaaggagatcgagcttagctgctgctaatcgcaagagcaagacaacgttcttttatgtctcgttgctgtcataacccaagtaatctttaatgatctagttgcagcgcgcacacacacacacacgcaatgacgcaaattgatcataattttcttttcctgaaaagaatcgaaagggcctgcactgaataaaagaatcctgcagcctagctaatgaacattcagatacacaagcccagagatagatatatatatatatatatatatatatatatatatatatatatatatatatatatattgtttctttaaatatgattgtcccattgtcatctgctatcctgatgagctcgaaaacgaggcagcccgggtatgtctcatgtgtgcctgctaaaagttggtggtgagctataaaacaatgcgccgcttgtctgaagaaaggccatgcaatgcatatatgcagtttgatctgcagcgagcggtaggaggagagcagtttgcttttgcttccagctgaatgctgctgcatatgctagctgctcgttccctcgatcgcaatcttcactcgcacaaaaggggggagatcgagctggctctgcctgctttatgattcgtcttgtctccttcgatgcatcgatcggcagcttctcgaggaaaccttaacgagaacattttgtctggttaatggccgtcgtttcgatttaatttgtctgattatccgatcccatcagttaattgacttgtaattagcctatacgtcgcccaagttgttaattagtattgatatataaagttattagaagttttaatcatatgacgcatcgattggttattttttaaatcatatagagcttagataaaaacaagactccatgttggtccaccttactaattattgattttgaattacggaattaacttaataaaatgctaaattgagggttcaaaatggtacaacttaatattcattaattttaaattattgacttttaaaaattagaactaaatagtccacaatatttacaagaaaaagttcattttacttccccaaactagttgattagataacttagtacccaaaaaatattttacccctaaactattgaaaatagttcactttactatttaataatatttttcttttatattatgctttatacaagttttattctataggctgaaattttttaagccatagatgacaccattatctaagttcaaaaatattttcaaagtttttcatgactttgtttgaaatttaaaatcttaatgtttaaatcacttttaagtgtttccaacctatgtaacaacgaggaaacatcctttaaaaatgttgagatgccagttataatgcatctatcattctttcaaaatttcaatgtaaaatatgacttatatagagagaaacgaaaaaggaaatatataactttagagatgaaagtggaccgttttcagtagtttatgatgtaaaacaataaaaaacacttcagggggtcaagcgtttcggtgaaattgtctgagaaagtaaaaaggactttttattttttaatgttatgttttatttaattacaggcttttaatatgatctacggttatcataattagatctaactaactaatcaatggctcccacatctttcagattcgcatagaagagtgttcaatctatctatctatctattatattattaaaacagctttgaaatgagggaccacgttcgctgcgggggctaaaaattcccacattaatcggagaaaaagaaaagaagagtccaagtagaaatactccctccatactcgtaaaggaagtcgtttaggacatcgatacaatctctaaaacacaactttgacttcttatttctataaaaatatttattgaaaagtgatacaggtatacttttatgaaagtatttttcaagacaaatctatacatataatttttatattttcaaactcaacaacttgagagttattcatgatttatattcccaatgtttgacttaaacattgtcttaaacgactttctttacaagtatggagggagaacaatttaaaaatagctgaaagtcggaattaaaaataagcaatattgaaaaaagagtccatataagaacccaacacgagattaatcaaaattcggaataaaaataaaataaaatacaaaattagaaaagaaaaggagagttcaagtaagcatacaatttaaaaatagctgaaattctgaattaaaaataaggaatattgagagaagagtccatataagaacccaatacgagattaattaatattcaggataaaaataaaaataaaatctgaaattagaaaaaaaagagaaaagaatagttcaagtagaaatacaatttaaaattaactgaaattcggaattaaaattaagcaatattgaaagaagaatccatataagaacccaatacgagattaattaaaattaggaataaaaaataaaataatatccaaaattagaaaaattaaaagagagttcaagtaggaatacaattttaaaacaactgaaaataaaaaataaaaaataaaaatattaaaagaacaatataaggaattaattaaaattttaaaaaaattctgaaactagaaagaaaagatttcaattaggaatacaatttataaataactaaaattgttgctaaaaaaaataaagattattgaaagaaaagatcatctaaaacacatgacgagataaattaagtaacaggcctataaaagagttaataaaaaactgttaatacgacatataaaaactgttaataaaacaccaaatagaatactaataacgattaaaaggagggacaacaaataggccatgaagcaagcaggcaaggcggttgccgggacttctagaaagtaaaaacaataaaccccattgataatcatattcgatttttaaatctcaatgataataaaaaggagaagcaacggggcatggtgtataggagtatagttgcagagctgtcgacggttggcgggacttctagaaaataaaaaaaaagaattccaaagatagttatattcgatttttagaatgccaatgacaataaatagtaggcggcggatgtgccgtagaggagtataggggcatcgtttaacaagacttctaaacattataaaaaatgaaacccacgagacaataaactctaaatactacaaggtccaatttttaaaggttcggaacttctaaaaagtaaaaaaaaaaacccaatgataatcatatttgattttaaaatctcaatgacaataaagaagggagacaacaggcgagccataaaggagtacaatggcaaagcggctgacggtttggcgggacttatagaaagtaaaaaataaacccgaacgataattatgttcgatttttaaaatcccaatgacaataaagagaaaagagagtggacgggccgtagaggagtataatggcagtgtttgacggtacttctaaaaattataaaaacaaaacccaacgagacaataaactctaaaaactataagatccaatttttaaaggcttaataaagaaggatatgacagaagtaagggatagcagttggtgtgacattaaaaactatataattagaaatacgtggatgataaggtttgatcttttaaagtcttaagacaacgagatagctatttaataaattttaagtaaaatcataccgaaaaatatatgattttgtttgtgttttagtcgcgcaattgcgcaggccacccagctagttagtaaagaagagggagattggctttgttgtgtacgttgcatcaagctttgcacgtgaaaccacaaggatggacgagacttaattttgttttgctcgatatgaattgaatgcccggagtatgaatccaaaaaacctagcaagaatcttatcaggggagaggagaaaatgtagaagctggttcagtgtaggtagctagtgcgtgcccccttgccaaaagcccaaaacttctctcaatggtttgtgcgtgttctctctaaatattttatcctcttacatcggtgccctagctaatataagttaaccatattgacgggctttgccccccttgtcaaaaacccaaaacttctctcaacattttgtgcgtgctctcttaaatgttttatcctcttacattggtgccctagctaatgcaagttgatcatattggcgggctttgtgggggagggcgttccattctcttttaccgtctctccttcaatcctaaagacgtggatatatagttgagtgctgctcggctgttagggtttgtttttgaacggttcggttgtaacttatttgttggtccagtggtggttaatcacacttagcggtgaccggtccggtgttagccttctcccaagttctgtgtaggtacttgatatcggtgcgtagaggtagattatttttaggaaaaagtacgaattacctcccccgaactatcgcggttgtccgaattaccctcctgaaccacaaaaccggacattcttcaccccaactatgcaaaccggacgaattacccccctcaacccaatccgcggtggttttggtctacgtggcgtacgcgtggcagtctagtcagcattttagttattaaaaaaatgtggggcccacctgtcatactcatattcctctctcttctctctctcactcttcctctctctcttctctcactctctttctcactcaggcgctcggcagcacgggggacagggagcgacggcggtggtggggtgcggcgaaggaggcgaggcgaggcgacgacggcgagccgcacgcgggcgcggggtcgaggcgacgacggcgacgggcgaaggacgacggcgcgcggtgcgggcgggactcgaggggagatggcggcggcggcgggggatgaggcggcgaggtgcggcggaggagacgaggcgaggcggcggtggcttacgcacgcggacggggatgggaggcggcggcgaggttggcggcatgcacggcgcggcggggcggggcgcaaggaggcgacgcgacggcggcagcacgcgggcacgccgcacgcgggtgcggggtcgaggcgacgacggcgacgagcgacggacaacggcagtggcggaggaggaggaggagaggggtc

SEQ ID NO: 24081 - DNA, 7257 bp, Oryza sativa
taaataaaatgctgactggactgccacgtatacgtcacgtagaccaaaaccactgcggattgggtcgagaggggtaattcatccggtttacatagttgggggtgaagaatgtccggttttgtgcttcaggggggtaattcggacgaccgcgatagttcgggagtgtaattcgtactttttccttatttttattcctgactgttgtcttttcaaggtgctagccttataatttttattcaatgaaacaacgcatggtctggtgctgttttttaaaaaagaaacgtaggtagatagtgatcaatccattgttcttacgctcaattagccgcaaaaggtgaaacgaatggtttttgttaggtactacctccgtcccaaaacactcatcgctttaagtttttttttcaatgtttgattattcgtcttattcaaaaattataaaattattatttattttgtttgtgacttgctttattattaaaactagcatggtggcccgcgtgcggctagctaccaatattccttacttttaattccgaatttcagctatttaaaattatatttatatatttactctattgttatttttaatctgagtttttgatatttctaaattatatttctacctagactcttcttcaaattttcttcattttatattcctaattttagatatattaaattttatttctatttctaaatagttttctttttctctaggtagttgaagataattctttattctgaatttcagatatattgaaatatatttccatttgaactctatttttctttttctctaattaatatggaaatttatagaaagtgggagcgaatatggtggcttttttcttttacattaagatataatctctactattataaaaattgaagatgattttgccggtaatttgatacgtcatccgtgtattagtcagattttaagtttgttcgcttttagaaatagatatatgtatttgagtaggtttttaagttcattcttttttgaaaatactgatggagtcatataagaaatctaatttaaaaaaattcgcatgctaagttacacggttggactctttactgcagctcataatttttttaaaaaaacatatatatcaaagcgaattcctgcagtgaattttaccttaataactataatccatataataataataaggttaaaatagtttttacccgttgcaacgcacgagcacttttgtagtatagatagacatataaatgcatcaggagtgtgcacgtatgaacctgccattagagatttggtttgttgtaacggagagaatagatcgagatatgcaatggaaccaatacctattacggatgcacacttgtgatttgtattgtacacggtcactgtagccagcttaggttttctttcctagcaaaagactaatcgttctatgcagctgtccgatcggacacaatttttctctaaaaaggaaagagaaagagtccttatctacgatgaattctccttatatatattttttattttattttacttcaattaatatggaaatttttagacgttgagagttaacgtggaggcttctttttatattatttattaagttgatagatttttaattcccaattttgctatttttaaattgtatttctatattgactctattttcttttttctcgattaatatgagaatttttaggcatgagagcaaatatggagacttctttttctattactttaataagataatagttattttaaaatatgacttattttttttatatttgcactaatttttcaaataagacgaatgatcaaacattgcaagcaaaaagtcaaagcgaccattaatttaggacggaggtagtagtgatcaattcacttatacctcatcatcagtgcgccctactttgtactccctctatcttaaaatataaggattttctggataggctagaatgtatcacatctctttaaaatttcttgtattttgagacggagggagtagttagctagtgatctatttgccttggcgaactgtgtacattacatcggcgataataacatagcaattatatactctctccgtactcgtaaaggaagtcatttaggacaatgtttaagtcaaaccttaggaatataaatcatgaataactctcaagttgttgaatttgaaaatgtaaaaaattatatgaatatatttgtcttgaaaaatactttcataaaaatatacatatatcactttttaataaatatttttatagaaataaaaagttaaaattgtattttagagaccgtgttactgtcctaaaggattttttttttacgattacggaggtagtatatgccacaaggactacgtactttaaggtctaagctaatactagcagtacactgctgctgcctgctaccatcatcgttgcctgcatcagaggcagcagctacttgggtcttgaattgcgtcttcgtgaacctacgtcctcctgccgctgggaagaggaacagaagaagtgcaagcaagcaaataaacaaagaggaaagagggaagttttaattgtgctttttattttttgctttttttttctgtcttgctgcaggggaatagtagtggataaaaaaaagtagacatagctaggcaggaaatttactggcaaagcggtatataggtgaggtggtcgccgtcccttccttaatctggaagcctgccttttcaccgaacaccaaactaatttattaaccaacatgttgatactatatatatgctgaaataatttaatattacagcctataggttacttgtatatcgtgctagttgatgtcatggattaattttgcacaagtacgtatacgtagtgctcgcttgcgtagttgctttggccctggtccaatgagaggaatagaggtaaaaaggatccatcatcgaatgatcgcggccgggggcctgccggggtgggacaatggcagatgggtagctattagccaggtagttaagggcttggtcagttcattgcccaaaaaaaaaaaacttaccattcgttcgtatgccaaatttaataatgttaaaattttgaaaaaaaaaataaagatgtgaaggtagtgtttagtttgacaccttgccattggtagtggtgcaatttttgatataattttgtgagtagaagtttctaaaattacaaaatgttagtaggaattgacaaaattgtgatggtaaaatatcatttagtttaggaaaaagtacgaattagctcctgaaccacaaaaccagacttccttaccaataacttatgcaacagacaaataatcctcatggctcaatctgcggtagttttggtcctacgaggcagtccagtcaacattttttttaaaaaaaaaaatcggctgccctcacctgtcagtttctcaccctctttatctctacctattttatttctttccccaatcccctttatctcttctccctcccctaacctccatcactcactggcactgaggacggcggtaggaggggacggaggtagctgtgtggcgatggagggggagccgaggacggcggcgggcggtggcggagggggagctgaggaaggtggcgagcaggggcgtgttgggaaattttatgtcttggcatggaaatcgagaggaaatcccacacgattgttttccacccgctacctgtgggattaacgcgattaatttgtgattatttccataattacgtgattacgtgcattgatcggtagcactaaatctttccatgttttggattgcccccgactccctcagtgccatattaataggggagaccagtttcgtggaaagatgacgatctctccacgaacatcttctcgaaaaacctaaaaccctatccgatcagttgagcattggagggagaacgtgcggctgttccgggacagcgtagatggtgaccggaaggccgctgctaccccacaagtgatcgccggcaaccccttcgggatcaagctgctacgactacttccgctacgccgacgatcactggagcagttcgaaggacttcgtcctctacttccactttgactgacggcattgcagagggaacaaggagaagcacatcaatggcttcaaacaacggtcagtaaccctaagaattccgcagtagggtgatcatgtttaggataaccagtcatgttagtatatcacaaattctagagggtggagctagctgggagcggcggagggggagccaagggcgacatcagaactccacccgagcgagctctgcctccttcgccagccgcccgagttcgctatgcctccgcctctatctccaccgccggctactcgagcaagctctgcctccgtcgttggtcacccgagagagagagagagagagagagagagtagggggattggagagggattttgttgagggagagggatgacgggtaggtccagagaggttatttattttctttgctgactagattactacgttggctacgtgtggaagctcaagtgaaaatcgctcagaacaatgttaagggtggttatttttccgatatgaatagacgagggtgtaaaatgtctgttatttgagtttatgggataattcgatcggccgtgatagtttagggggtgattcgtactctctcattttagtttattgcttttaacaataccaaaaattagtatggttgatttttccacatgtaggtggactttcaacaagactttagtgaaatcagggaaatgtgcttgtttctgtttcttagagcatgtgtcaggggacgcatttacgggtgtgtgagtgtggtgttgtgtgtgtagtgatgtgtgcgcctatgtgtctgcagtgtaattaaaaaaagttgggactagctatatttatggcgtcatatttttcatcaaaaaatagtcggtatgtatttacattgtaaatctctaaattacatatgtaattttagtatatttatagtgtaagtcctaaaattacatataattacatatctaggtcttaaaattacatatgtaaatcccaaaattacatatgtaagtgatgtgtaagtggggtgtaactagtatttaaatttgtataaaaacataattacaacaacaaaattgactgctacaaaaccatagcaattccggatcaacaaataaagtaaaaaaattgcaaagggataaacaggtggagaaacggatatgcatcgtgcacacgatgtccagcgcagcgcatcccagccgttaaaattcgactgtactcagccacataatgtggcgacactttttcagcaaatccgaaaaagtttagtgtggttgattttgacagcaaactttaacaagtcctaacatcctagatcttcactataggtctatagctcgtgcgaaacgggcgtagaaaaaagtaatcgaagaaggggctagcttagctgcgtcgcggtcacgagctaggcggcaatttggttggcgaaattggacatatattcgacgagaaaacgacccccggcgaccgagatgtgatggacgcgacccgcgcgcggccggccccctctccctgtactgtctgaccgaccgaccggccgcccccgcccctctccgtgtcgatcgcaaaactagagatcatcatgcataccgatgaacgacttgaagctccgatcgatataacgacccatcgcggttacgtgctggaacgggcatgcacatcagatcaatctatcgtccatcacccggggggtggctagtgtggcttctagtctactactagtactagtagtagtaccctgaatgacacgacgtacgcccgtactgcaccctcgcgttatatagctggccgtagcggaaaacgcgatcgcgatcgcgatcgcgagatggacgatgtgcgtgagtgcggcgaggaaaaaaaaatgagaagacgatgtggctgggtcgtcggtgtcaaagagctataagagcatcgctttcagcgagcacggggttgtcccctcccgtgtcgcctgcgtgtgtccccctgccgcggcaaggcgctgccgctgtgtcaaccacgtccccctcatctcccccccccgctaccgcccgcccgcccgcccgcgcatgcattcacccaaccacgaacgtacgtacgtagagtacgactacacacgccgctagcctaactgctccctccgtaagtacctatttcctcatgtttaggccggataagttcaattacaacttcatttttcaacaccttttcaaagttatttttttattatgaggtaaaattcataaaactgcatatatttcttcaaaactgtcaatttgttataactttagcgcatattgggcaaaagaacgtataatgatagctaataattttataagagaactgcacactttgttggataggttaggtccattcttaaacattgtaaatactcacaagtttgcataagttgggtccatccttgaacgcgcatgtaaatactcacaagtgtataacatgagccccttacatgtcaaacacatatcacataagtgagataaggttatgtttttttttaaaaaaaatagtttgctattattgtagtattgtgaaatgtttatctaaagttactctaaggtactcctttctaactgcatcataccaccactactacatattcgatttttccgttcggtcaaaatggattttcccgtgcggaggtccagtccatctgcgccaggtgtctgcgaaaatcaacatttttatgtgcgggtggcccaaccgtgttacgtggtccgcactggataatcgattatccatgcgaaccgtcgatcacgtgacgaacgggtccgatcgatcattcgtcaggtgtgtgtgtgtgtgtgtatatatatatatatatatatatatatatatatatatatatatatatatatatatatatatatatatatatatatgtggatagatctgacggacgaacgcacactgttggttagcttcatttattccgagcgcgcacacatgattgatggctgtttggcatcgtatccatgatcgatcacacaagaggagcacgcacgctatctaaataaccaaagcttggtgtacaagcgggagaggggctcacacagggagattttggttgtggtggtggtggtggtgtcacatccgctgcactcgagtgcgtcccgtaccaaccaaacacgtccgctgtcatgggtggcaatctattgggcgatcgattagtttatgcttaacactaattgcactgctcccacaccttaatcgatcttcattaatcgctaacctttatgtcatgtctagctag

SEQ ID NO: 24082 - DNA, 2960 bp, Oryza sativa
gtccccgcgccgcgccatgagtgccggcgtgcgcgctactgcccaatgactgaccaagagagagagagaaagagggtgtatgacatgtgggtcctactattttttaaaaaataaaatgctaaccggattgccacgcatacgctacgtaggacaaaactgctctggattgggtcgaggagggtaatttgtctggtattgaaagttcagggtgaacgatgtctggttttcaggttcagggggtaattcggtcgaccgcgatagttcagggaggggggtaattcgtactttttccattctgttaccatatctctactattataaaaattgaatatgtttttatcggtactttggaacgtcatatgtgtatgagtcggtttttaagttcgttcacttttgaaaataagctcatcctctatgtaaatttgggaaatagctccttatccccgcacggccgctccctgtgcccgtagccattgtattctaattggttaggaccgaactacaagagagttcatctgatagcaccggagatagaagataagcttattggaactcaaactgtataatagatcataaggtcaagaatttctgagatatattttttaatttaccgtaacttttacgaaaaaaattactaaagtactttaggacagtgggtgagattcgtgctctcataagggtgttaacagtgcgtcgctcatatttgccgttcctcgcatgccacacagaccaagaacgtgttaagctacatgtttcacagtgcaagttgtttgtagtgggtctcaccggtaccatctttttcacttttgaactctccctctctcctctccttttttgttccccaccaaatgaagcccccccctctcctctctcttttcttcccctagcggaggaaccgaagctgacggcgggagagaagagcgacgacgccgacgctgagcggccctagcggtgctggtgccggcagcggagtgagggcggtgcgaggcgcgagcggcgacggaggcgccgggcggcccgagcggcggcggcgccgactacggatcaagctcgccgtcgccgaatcgacgtcggtttgtctccttcttctcttctcctccgccgtgcctcccctcctcctcctcctctggcgcgggagcgagggacagcgggggcagccgcgtgaaaccactgcgacctgccccacggcgccacccctcctctctccccgtgggcggcctctcccctctctcctctctcccattcttgacgtcatggaccacgaatatgggtcccacccgcgacgaggaacccgtggtcaaagttggctacacgatccttaagaaactgcacggatggagaatgtagcaaggaatattcgccttttggtatcgagactaaatgtcactgaggccactgtgaatggccttaaggcagtgaagtagtatatctgcgtacattaattgggggagagaacagttggggcattcgctgtcagggccggccttggggcagtgcggacggtacgaccgcactgggcctccaaaaattagaggcctctaaaatatgtatactataatatcaggcctaataggcttagaggaaagatagaaaaccgatcggcgatcgaggatatcgtgagtcgtgactgcttgattgtattttaaacttattagtgtgaaattcgttaatgacaatgactttttaaatattaccttgtatttttatagtgatttaggagcctttatttttttgttccgcaccgtaccgggccaccacaaagtcggggccggccctgttcgctgtgttgatttgaagcaggtgtcccgacaaagatttatattccatcatttcggagagagccgatatggtgagtgctgccgtctgcaagacgccgggtacaccgagggagagagcgacactagtgacaattcgaggcaccagccaaaggaataagttaactttggtccctttatttgtagcctagtctgattttcattccttaaccgtaaaatcaggtatgacctctcccccaacttacaaaaaccggggaaacatggtccctcggcggttttgaaggcggttttggttgatgtggcgcttacgtggcttgtttgactaagtctacgtcccacgtggcattttggcgcttatatggcaattatatctcggaaaaataataaaaagtgtggccccacatgtcagctgcacacaaaaaaataattttaaaatggtggggcccacgtgggccccacatgtcagcctcactcctctcttcttccctttcccctctctctctctctctctccttcccgggtagcggacggcgcgggtgggcggcagagcaggcgagctcctgcggcggcggcgggcgtggtccgcgccgccccccgaccggagtgccgccggtccgcgtgaaggcgaggagagggagagccgagaggggaaagggaatgacgaggaggaggacctccttgtcgggtccgcccggggcgccgccgcttttttctctggggcagtgctcgctggtggggagcccccgggaatccgacgccatcaacgccgccatccgtgtcgccgcggcggagagccgagagggggaagggaatgacaaggaggaggacttccttgtcgggtccgcccggggggccgccgctacgacggaggcagcggctgtcgcgccgccgatttcttctctggcgcagtgctcactgctggggaggccccctagaatccaacgccatcggcgctgccatccgtgtcgccaccgcgaagagccgagagggggaagggaatgacaaggaggaggacttccttgtcgggtccgcccggggtgccccgccgcggcggcggcggtggccgtcgcgccgccgccttcttctctggcgcagtgcttgctgctagggagcccccccagaatccgacaccatcgacgccgccatccgtgtcgccgctgcagagagccaagatgggaagggaat

SEQ ID NO: 24083 - DNA, 7706 bp, Oryza sativa
agccaagatggggaagggaatgacgaggaggaggacttccttgtcgggtctgcccggggcgccgccgccttcttctctggcgcagtgctcggtgctggggagccccctaaatccgatgccatcgacgccgcatccgtgtcgccgccgccgaccacccggacgccctcctctcgccgccgcttcctcctctctcgccgccaacgccaccacacgccgctccctcttctcccgccggcggccatcagggaggagggtggcggacggctaggcgagcggcgcaagagagagatgaccgccgccgcccgccgtactttacaccacccagcaagaggagggagcagagagatggggagagctggagagaggaggagagaggaggaagaagaggattggatttgatcatttgagaatgacatatggggcttacgtgggccccaccattttttttagctgacatgtgggacccatcatttttaaattattttttctgtggttgagatgtgggcctatgatttttattatttttccgagatataattgctacgtcagcgtcacatcaatgccacgtgggacgtagaactagtcaaacaagccacgtaagcgccacgtcagctaaaactgccgagggatctcgtttgcttgttttcgaaagttaggggatgggtcgtacccggttttgtagtcaaggatgaaaatcggattacgtgacgaatagagggacccaaagtgaatcccagccaaaccgtgtcacatctaatcctactcccaactcgacataagttatcagaaaatgagagatgggccgggccctaatgagctatacgagcaggccgataaacggtccgtaagtgggccgaggttacaaaatatgcgggcccgaacggaattccctcctctctcgttcttttccggttccttcttttccccgacgcagcgcccgcgtggggtggtgacatgggcggcggcggcgacgaaaggggagagtgggaggcggcggtgaggaagaaggtgggggtcggcgggtggtgggacgatcccgacggcgacgagctccgcgccaggttcaaggccttcacggggcagcgccgcgactggccccagcccaagctcctcttctggaagggcctcctcctccgcgtcgcgcgccgcctccgcctctgctccgcccccgcgcgcctcgtaagcgctcgacgcctcctcctcctcctcctcctcccgctcccaccctgcatccggttcgcttgctccctcctctgacaccgcggtggcgctgacaactgcaggtgctgggtgtttggttcgcgcgccctggtggcctcacgccgctgtgcttgccgcaggttctggtcagtatccacgacgatctcaccctatttgctgttaatttgttgccaaacgggggccaaaatttgtcgtcatttcaggaagagatgcgtgccgatggggagattctgctcaaatcggagctaatcgatccgactacagggagcttgtatcagctagtcaggaggatgagccagatggctgtcatctcaaagcagccgattgcgcaggacgacatcctcgtgtttaaatcgttgattgaggtatataagagtttctattttattttttttcatgtgattattgtgccagttctatcgttgtttatttggatatctgctagtcaattgcaggaacgggctgctgaaattgttgatcagctgaggaactctcattggacgtcaacgtgcattgttactattagtaaattcaatgccttcttccatgggcaggaggattctcatgttgcattatgttacttgacacaatgtgggaaagcacggtatattgttgataggaggcaagattctgttgaggtttgtgctctttgttgtccattatcagcaatttcattgcaggaagtgcattgtggtactttacttcatcccatttgtaccttcagggtgtgaagttttcgctcatggctgcacaagttcctgctgtctcaaagcttgaccacaacacattgcacttaattttgacggaagaaaagttgcagcagcagcttgatgtacttgatcgccaatggcaaatgttagtctactttccaactttgtttctgcaatttggatgcatgactagtgcgttataaaaggatatgccatgttcagacattggcgttctgttttagattgcatagaaacaaatagtgtacatttcaacagatactattgcataggacagttctaaacttggtactcaggagtgcagttatctttaagactatcacctgctgcatcgtttgtggtactgtttacttccttttgctagtttcgtttgttatgtaaaagactggcactacacattccattctaggtattatctaactttgtttcatgctaaatgaattgtctgttcacattgttggaaattatgctataattactgtgttttcccttctttatccccaagatgaggggacctattcataagtactaaataaaattatgtttctctaataattcgatgtaatgatagttcaagaaggagggcattggtatccttcaaatctggggataaacagtcagcttatcgatatgtgcggcagtctaagttgttctcagaaagcaggaaaagattcacaccactgctggagagggttgaagaagttataagcctaattgctagtgctgaaacaactaagaaggtatataacttttggggaaaaaatgtttactaaatattaacccttaaaaaaatggggatgctgcattcaccattattcattataccttgacattctctggttaggtaatgaaggcattcaaggcagtattcaggcgaataatgaacattatgtgagccgtaaagaaggtaaacaagcaccttaaaggaggtgatgacccttgttgcaacacacaagagaaattgatgctgcctttacgtgaggtttcatttttgttgttcttttacaaagaaattccagtttcccatccagcaagtttatattagacatgcaagataaggtggtctttttttcatgtggtgatgattttctttagggaaaaacaatatgcagtttttggtattctttgacctatgtattagatttagggctctgtgatgcaatggggaaaagatggaaaacttctgttattcccagccaccaagagaaatttgggaaagatcgcctattttttgacatatccaaaatcaacctagccaaacttgattcagctcaagttcccaaatccaactaacccacaagtccttgctcaagatctcaaatccagctcaatcccttgttttgcactcttgttgctgtcgacagaatgattgctggagtccacttgcatggtctctgccatcttctgcatgttcctcaccagatccactccacagctatacatggagtgaagaaagaagaggacatctaagaacatgcatgtttgtgtgcatacacacggctatgctaaatatgccaacatggctgcagtccgcagctggtccagtgctaacctcctcacaaactggccttacccaagctgctggatgaggcagaaccagaggttgaagaaggtgcaggtggtggagatgtgctggttgctgtggtggtcactgctagtaatctgttaattggatgcggtatacatgcccttctaccaattcaactggtgctgcagcaattagatcaaccatggtaataaagtgatagatggagcataatggaggagtctaggagtgctattgtagaaagactgcagtttagagtggtatgtttgcaaagggggtacagggtactaaaagggcaagtttccgttgttcttttggtggtattttcctgacgtgcattccttctggtgctacagaactaaaccttttgctatatatgtcttctcatctacagcatcaatttgtttccctctgtttgtaaaaggatttgtggatgtttgtttgttcttttcaaaattctgatttcaaatatttttcaggatcagtaatactccagtcaatggattctgaagaaaatatcgaggaagaattcatgaagctggaagcagaattgcaggatgagtttcctcacgttcaagaagatccagtttcacatgccaatgaagaatttcctaatgatgaagatgttgattcattgagcaataacctttcaaacattaaactcgaggccatctagattttcacttattaagtgctacttgtacatatcgtgatctagtcacatcttttgccccatcagtatgtgttgtatttcttatgacaatgttcctaccaaaacagaaattctctattgcagaaatattccttacagggttgccatgaatttgattttttttattctttgaacctcaacatttttgggatagtattttgcatgagtgtctgctatttgaaatctgcctgccctttaccatttgaagtgtatggttgccctctatgtttacttgtgttctgtgtaatgaaaccaaaagaaatatctggttcacatttcatactgcatctatcttaaaagctcgatccttgttactacggtatgaggtcatggaaatgatatatgtgcattttgataataaggcagatagatcagtatcttacatgatattgttttctgatttggcaggttcagaccttattatttcatgaagtgtgcttattataatgacatagccatattatgtgtcagctcatctgatcattgttgcaatatgaagggtggctgcgaagtatggaaggaccttaattcttaactatggaattgattggtcagtaaattgtttttctctgcgcgatactgacatacgagaaatggcttgctcctttacaagaaaggccagcaattgtaaatgtagaggcactgaagaatctgtctggctggtgagtctgttgaattaagtcttttttggtgggacctgttggattgaatctactttaatgtttttgtaacttgtttctttgtatgggatgagtgtggttggacccgggtgtaataggtgacccattttagttcaactaaaacaaactaagttctagttttgaactcctcaaaacgatatttggttcatttagttgacctaagatggggtcacctattacccatgtgtcgacccgcacccgtctcttgccagtgccaataattcgtcacaggttcaggatatgaacatatacccttcaactgactagtgtttagttgtgtcctttgaacgagtgtatcatgaaaaaacactagaagtttcctgtaagcaacggcattggagcatagttttctatctagtcagagagctggctaggaaacacactgtacttctgataacctaataagtactcctaataaatatcacatcagaaagttaggataaagcagtagttggatccaaaatagtttggaaatagaaaattgccatcaatgccagtttttgatgaattaagtttttggcaatgccaaccgaagagaacacagtttgttgtaaatagttttggatgctaaacacaataaacatatgtaaaaggtgctataacatttattttgtaacaatcgtgttagttcaagtcgtaacaatattcctcgtcaaatttcaaactgtaggagtccaaaatcaaaatgtgtatctggcaagatacaatgacatgttgttgtgtttctgactctggattcagctaatcctggtaacagcaactttggactattacaatatatatagatagtgtgtgcaagtaatttatgagtgcccatttccatgtttgtgaaaacattgtgagggggcttctaaaattatccagacttggtctagaagtgttgatgtgaaacttatcctgaactttgtggttctgtttgaacattggaaagaatcttgacaagcaggaaatcaatctgattaactgtgtaaggtgattgtgattgttgtgcccatcacagtatacctctgggtttggttccaataatatctagaataaagacaatagagttctcttatcatgtgcatgtccaaggccaactatcacaacatgaaatgtttcccaggccccatttcttgggctggacccactccagtccttgaatatatattaacatcaatgttgccgttctcatacatcactgtccacaatttccccatactgtagatgatcagggcatacatagttgctgacagacttaaagatgacatcttgagatcgaactaagctaactgtacgcattcaatggaaagtaaaatataggtcataggaaaggagaggtggagaagaaaagagaagcatacgataagctggcaacagtgaataatcttgcaaggcgaagcatttccttattttgagaggagcaaaagatccttcaatgggcgatctgaagataggactgaaaactgacgacaacacatatgtctgaaatttcattataagaacttgaattattggaggggaactttgcttgtgctttctccacatgcaaggatgcatgaatctatcagatgcctgtccacaccagtcttcaaagctacgtcatatcaggaataaaataggagaggaaagcaatcttgttcctccattaagtgttacaataatgctagataccacatctagcttatcctcttacacatgttactgtagaacgatgtgcttgggtaatgaaaaccgtacaattcaagatgtcagggcaaatgaaccagtaacctgtcaaacttgtggagtacaacgaggtgagtactttgttccttttaggcaaaaacggtatactttaagactctggattggtgcagcattttagttgtatctttcatctttgatttcctgcattgtactacctggttacttgttgacatctgagcttattttagtactatgctgcttaattgtattataacgataacacggccactgattgtttaatgcttgtttccttaagggctaacaaactaagctgacggatgaagtcaacagactgatgcaaacatgtaatcaagcatatgtaaaatatgctcatgattgagctttttgcatgtttctgcagtagcatgtgtccttgtaaccgaacaacatacttttttagaaaaaaaatgaaacagcgtactgatttatcctttgtctgttgtatggctaactagtaggctgcaattctcaggtaaattctctattttctagacgtctcatatagtcatatgtctgataaatatgcatttgttctgtgtggttgctaaatccttccctgatgtccggttatattgaactgacatttcactgttagcataattttcagggttgtgatgatatatctccatgttcatataatttgtagaagaaagtgcttctaagtctgttccttctagcactgcaaataatctgaccaaacttgtaagcataaacaactgtgtcataataattcatcattatttgcaccagaaagcgctgtacagtaacagcggtgcaagttaaaccgcgtggagaccaagggatcccaggctcccagtatacagtcataagataaccatggaaaataagatatattggtccaagatttcagatagggcaaaaactactcataggaaactgcactggaagtcaagaattacagcttgtaacctggtagcatcttctaccatctacattttacacaaaattttggggcatcttggctgatacatctgcctcgtggatcttgatactcaagtaagttctcccagtatgaattgctaactttcatatctggaaggtgttagttg

SEQ ID NO: 24084 - DNA, 2176 bp, Oryza sativa
tagttgataagataggaagtgttaaaggcctcataatagcattttagcatagtctaatattgagattatatttttatatcggtgtactcagtatgttgagtccccccaactttttgtttctggatccgcccctggaagctagtgatgctacaattgaacatgattagtagtatatggttctattggagagaaaaaacaattgctaaaaaatatccactatagtttttcacttccaaaacattcaaacttctaatggttgattgcctcgagatccatgcagaagagggggaaaaatagctagtgcgtgcatcttcaagggtttctacttcatgaaaaacttacccgactagccaacaggccacgttacatttgtaattacactttactatagtatagttacatttgaatgattttcttaaaaaaaactgttgaatgttatatagctaataaaaaaatctttggcaaagcacagtcaagctagcttcccatgcgtgcgtgaaaaggaggttgagattaagttattgtttgttactacttattttaggtgcgggtctaccaaagatatgtccctatgtatatattccagaaatcatatagatactaacttatacatcctcaacacatagatgcaccaaccggttttcaatgaataacatactttttaagcataatacatacacagatgcacatattcacgcatatactcacttatgtaaatgacacatgcgtacacatatttaaaacgatcccactaccacaaaattattcaaaggtaacactctattagtaccggttaaaaaaaacctagaacacaaccgctccgctcgcgccctctttagtgacagtactgaagcaaccagccgtgatgagaggtgccggtttaaatctaattggctagatgaccagggtgtttcctaaaatgccggtttatgccaccaatcggcatttatgacccccacttctgtgaccattttttctaataatcctacactaaaaaatgatcgagctgagctataagctaaaccaagcagtgaaaacatgttttaagtcctctcctctactcttccttaccatgttacccataaatttcttgtgatctccatctctccctcttgctctctcggtacctccttcttcctctctctctccacaatcaacagcttgtcatctcactagacaagctctattgcactgccaccgccggcgagtgaccaccccagaaaggctaaatcctacctctgacgtgcaatgacgttagcctctccctcaccaccgtcgggtgcctgcatcttcttattcacccacctctccccttatgagcctatctctccttcgcctgatccatatcctctccggcacataggaggcggcagcatggtggccataaacgatggccccgaagctccatctagccagatttagtggatggactgagggcacgccgggagcagtggcgggctgtgggtggagagggtagtagggctgtgtgggggggggggtgcaacggcgggtccatgtacaggcttggtccttggcaggaggaatgacatcaatatagctggaattttttgttgaaattgttgttcgatctattggatgaatattttgttaatgatctctgttggatattaaaattattgatttgttggagtaatttctatctattatttgtgattgaatttgttatgaatctagctatttgtgattgaatctgagattaatgttttgagaggttggttctgtgattgaatttgttatgaatctagctatgatggatcatctcgaatcaagccgagctgcctgttttttaaaaggaaaaagtatgaattacccccctgaactttcgcggtcgtctgaattaccccccccgaactacaaaaccggatattcttcaccctcaactatacataccggacgaaatacccccctcaatccaatccgcggtggttttggtctacgtggcatacacgtggcagtctagtcagcattctatttaaaaaaaattgtgggacccgcgtgtcagacactactctctctcactctcacttctctctgtcactcttcatctctctctccatcaccatctcacggcgagcgaggcatggtgcgagcgaggcggaggccgcgtgcggggacgggcggtgggcggtggcgcacgagggcgggcggtgggcgg

SEQ ID NO: 24085 - DNA, 18725 bp, Oryza sativa
agaagaagagaggaagagtggaggagtatgacatgcgggtcccactatttttaaaaaaatagaatgctgactggactgccatgtgtaagccacgtagaccaaaaccaccgcggattggattgaggggggtatttcgtccgtatgcatagttgggggtgaagaatatccggttttgtggtcgggggataattcggacgaccgcaaaagttcgggggtaattcgtactttttcctttttaaaaacatgtgtgcaaactcatccgtgctagttcaacaactagcactgttgcccacacaattagtgcgtaaacttaagtgacgtttagggaacctgcactaaggacgttttaaattcatacactccctctattttaaattaattgtggttcttttgtcctaagttaaatatttatatttttaactatcaacttttaaagtgattaaaatccacatactgttttaaattagttgtcgttctaattttgtcataagtcaaatatttatatctttaatcatcaatctttgataattagtgtagtttaatgacatgtaaatatatatattatgaacgtatttctcgtgatgactattaaaacagaaacattatgatgttaaactaagtttttttattgaaacagatagtcacacatacaaattaatgtctaacttaaggtaaaattaatttttttttcataatggaatgaaacattccgacctttgcttaaaagagctacagctaaaggtaaaattaattagaatcacaaataattcatttttgaaacggatcgagtaatctctcagccgcatgcgcgcgccttcggatttcatagtagcatcaattccatattatgaatgcacgtctaggtacagtttaacgaattacgcacgcgaggcccagccaaatagcgagcttttgattatttgacaatgatgtatggcaaaagagacgtagctatgagagctagtgcagtggcctctgaatagtacgtatacatagtactgtacgttgcagcgaaggttcacccgacggagagacgcgatggatcaccgatgctgacagccgctcgctggcttgctcgcggtcgcccgcggctaaatgcacacttgacacaggaccatatgatatttggcgcgcgctagttaatttctctgaccgatgatggacaaacagtcgctgttagctacttagacccgcgcgtgatcatcctcgtcgatacatgcacgtataactaatgagctagagctacagagacctagctatgctatgctatgcatcagccatggagagccaagagttttctctataggattgaataccattgcttcatattttgttagagtttattcaattttataaattttaatgggtttacatataaaaaaaggagacttgcaaatgcgtttatgaaaaagcaatgattcaattgatcaccacacaagcttatacatgtcttggtatgtttttgtcataagaaacccacacataccagctatttatattagccaagcctacatcaatgtgtgcttttatgtggacaagagaggcattgaaagatagcgaaagcagatgctttctggagtactcctctagctagcgtgtgtcttttatgggctcatgtattatatcacccaaccatactcaagcaatctcgatctctagagctaagatgtaatcgctaatggtgagtttggtggtactaggcaaatttcatcggatatggttgggattacctcaataacgaacgagaacacttgtaaattaagcgttgtgctccaccatcaactgtttattgtaaaaatgccatgcagttgtgctagcaccatggccccatgagaagttattggtggtgaagttggtatctaatagccggactatgtgtcgacatatgagcaccgacaaatgtgagaaatcacttgtccaagatggaccaaggctctgggtgcacttgtcttgtccaatagtgctcggaaaaagatgaacacatataacatatatataggtttaggcctcccgaaggtgacaaccggcttacacctgttcttgttcaccatatgcaaagttcgtacaaagtatgcgaagctctcgagctagctaaggttgtgttcgggagtgaccctccctggcacggaaaaaacaagatgggagagttgggaacaactctaaacgcaccgtttatcagtttaaaaatcgtgcgcgtggaaaacgagatggaagaattgggaacattagttctaaacgaacacagcctaagaagcctagagttcttgttgattataccgtccaatcatttctaccaatccctaaatactttctcttatagggatggagccatgcatcgccaatttcattgctgcatgcacttgttaatttgttaagcccacctagcccgaactatctgggggtacgtggctccgccgatgtagactctttaacattgttttcggctgatgtggctactctcgtagatattatgtactcctatattgcaagccaggtgtactatcaaacttgcttttatacacgtcaccatctatatggaggcaatcatgtaagcattgatcagcaccgttgaaacagtggacgcaagttaatcaactgattaaactcagcgaattttataatctaagtcaagttttgaatttttcaaacatgtataaattaaaccaaaatctgttccaattaaaactgcccaagggtaaaatcgtttttaaagtttcatctttccattaaaaatatgatgtattaaactaatagcctatgtatcttttactagtaattaaacaactaaaaaaaattagagtaagactccgtcccgaaaagagagaatttctagcgagaagagtttgtcccgtaaaaagacgacttctaaaaaaacaagaagcattcaaccgctgctgattacgaagtgactgctcagtcggctcattagcatcgatgggtgagaaaaaaattaaagacaactgcattcacacttgctggatactagtactactccagagtagcttctttatgggacggagggatacacattagcgcttcaagattggtggtgcacgggggaaatgaaaaccaatactccgtacttcgtactggcagaatggaacacatcatctctcttataaggcatagcgtgtcctaccgctgagctatcaacacttctttttttagttacattgactatagtacagtatagtatagcgtaactacatcataagggcatcctcaatatttgtggtgtagtgtaaccttaaggtgggccctatgaatagtgagtcattgttaaagccatacccacaatgttatggttagaatttagccataagatggacccacatagaatggaaaaataattgtttcatctcttgttcatgaagtgaatgagagagaaaaaatattttctttttgcttgtggtagaccttaaacataaggtgcaccctaaactaatgctactttccacaatgtatatagctcactttacaagtgcaatcattaccttaaggtcacctttttcatacattgtggttgccctaattatattatagttatataagtttttcactcataaaacttgcgaaagttttttaatataactgcatcataataatataatacttatatttgaaagtttttcactcgtaaaccttacgtttttagatagacctaaattatacatatggtggtgtttgaatctcttaaagataaagataaagatgaaaattaaatgtttcacgtaaaacgagatggtaatagcgtgtgattaattaagttttaatttttacaaacttggaaaatggattaatctgatagtattttagaacaactttcatattgaaagttttcgcacaaaacacaccgtttagcggtttaaaaagcgtgccacgaaaatccaaaacttaatccatccttttaattatagagttgagagagatctctcttgaacggggagttacatctttgatctaaccttttcatgtacaaacatgaccaaataattaacttgcatggagagctagtaagtcttaccggatatgataaactgaatttgatcacgacactgcccactactagtatactatacactaatatgtgtacatgtgtattatgcttagcacaacttaattaaatagagcaattaagaagtgtaacaagcatagcttctttagtttctgtccggtgtatgtatttcttttcaaaaataatatttaactttgaaaaataacttcttgcaaattaaatatgtgctcctagctcttgataatatatatcaagcactgcagaatagaacatatatatgtgacggattgtaaccctcacccattcatcacatacacttacactccacaattacatagactcatcttacataggaataaatcgccataaacttaaaataattaaaagtgacaagtctcaaaaccaaactgtgcatgtttctcgaaaagaggaccatcacattatgcgaagttaatttaaaattgaaagaagtaatattatgatttatgtaatgcacagttgaaacaagaatgttgtagttaaatgccacataattatttgtttgagacattttagaaacaataattgttctacacgaaaattgcagtagttctctctgtttcatacggaagctgccttgtctttcgaagatatgacttctgcaggtaagaagatatagctatatttatcctctaatagccgcaagatttatctctccaattaatgctcctaacttgtgccggtaaaagaataaagttagtatgttaaatgcaataatatcgcaaatttataaagcatagacataagcacaaatcacaaatttaacgaggtcaatatgatgaagttccacacatgtttcgcccaacctgttgatagcataagaagtcaatatgatgatagagggtaatgtaattttttggtataattaaattttgagacactcttcgtcttcagcgcctcctcccccgcctcgccgccgcctgagcgggcgctggcaaagccgtgcgcccgcaaagacggcggcggcggggcctctctccccttcgcgcccggcggctggggacgccgctcgtcggcgacggtggtgcccagatccgccatggctggccggatctgggggagcggcagtcggcggcggggaatgaaggtggcggcggtggacgacgcggcgcgggaggtggcggctggggacaccgctcgacggtggcgatgcccagatccgtgcggtgctggctagatctgggggagcggcagccggcggcgaggaaggaaggtggcggcggtggacgacgcggcggcgctagagttggcggctgcggctggtggcgactgcggctggttggcatccgcgtcggtgactgcggctgccgacggcggtagaggacggcggcggctgactgctggcgaggaggcggctggtgacgaggcggcggttgctatggtgactgctgaggcggtgacggtggcggcggctactgatgcaccggttggcgacgaggcggcggctggcgagctgtggcggcgagcggatggctgctgtggtggcagctggtgaggcagcgccgcggcggtggcggccgtgtctggcggcggcgactgccgacggtggcggatgcggcgacggggaaggtgtggagaagtaggcatggcggcggggacggatgcggtacgggggtacgaacgcggtgttgacgaccggaaacgggcgttgatgaccgcgaaagggcggcggtggcggtggaaggaggcatggcggcctcagacagctagtcgagggcgtggcagacggctgcatttggccggcgcggcaatggttggaggagggtcggaaaccggcttggcgcagaaaggcgcaccgatggtagcggaggccggctcggcgcgagaggcgcgggcggtggagatggaggtcggcttggcgccaaaggcccggccggtggtgggaagccggatttaccccaaggcgcgtccggtgaagaagcccggcttggcgcgaaaggcgcggccggcggtgaaggaggcgaccttggtgcgaggaggagctgccggtgaatgtggcgcggtcttcggtgcacgaaggctggccggcgggggcgccggtgcagtggtcccacatgtcggcagaggttgactggtggtggagcatcggtgcatcagccgtggattcgcaggtgttgagcagcgggtgaaaacctagcccggccttggccgggcttgcaacgatggttaattccccctcctgagggcgttgtcgtgctgtctcatccctcacgggtggttgccgggcgaaagcccagtcttggctcctttgagccctgacggacgggggcggcggttttccgtcgcttctcttcttgaagacgtcgttttgacatcccctagccgaagcctctcgatcggtgcaagcatgctttaggagttggctttgcgttggttctgagggtgttcttttgggggatctcgtctgtattcctttgtcgtctagcggcggccggtcacgcttagcggtggccggtccggtgttagccttctcccggttatgtgtcttggcgctgtcggtgtgtgggtggcggtatatttttttctttttccttgttacgaccctccagggttgtaatcttgtaattttttcctgctctatcaatagaacttcgcaccgtcttgtgcgagtcgttcaaaaaaaataaaaaaaatttgagacattttacggtgcttggaaggtatcctgggtaccttcatgtctaataaatattcaccgttgatcataaaaggtaaattaggaataaaaataacttgaatatgggtaatttggtaattgtttacaggcatgttaatcattagctctgtcgggcctgcggcaacaactccctattttagcgcgctcgttctagttcctaatccttattcatgtgtttcagcgtttgtttaactgtatattgctgatccaaaattataattctttctgctgtgccgctgtcccagaatcgtctaggaccctatcacgtatttcctcatccattcatctatgtacacacgagagacgaatacctatcaatcctcgttagtgagagagaaatcaatccctgtttgtgaagccttcgatgataatcagcttatgattaatttggtgagttgtaattggacacggaatactcgacgaatcgattactagagtttagttttatatcagttgtacgatcaccatgcatctcagtttggccgccggacgaaacaagaaaacaccgtacgtgatagaagaagctatcagtttacacaccttttgaagcgatggggagaaatttacttatctaacctcccaccaaaacttttaagttaatacctggcccacactttaatacctttccatcagtaccttctatcttagattgtcagattataggcaatgaacggatctcatttatccccagcaccggagaaaatctaataaattttatgtactaaatgtacacgtaatttgatttttttaagtaaaaatagtatatgacttctaaaattaaaaaatgtcttctaagttctaataataaatggagtattcagcagcatgcaaattggagcctacaccacaatccattggattctggcagttggcatataggtgggtgcggcttcacatcgatctccaatacaggtcgatatatacaactagttatcatggacaaaaaatatcatgtagtatgaaccataattttattatgtagaaatttgaaaagaacattcgataaaggtattttaaaaatataaaaaacaatctcatataaaagggaatatgttattattacctttccttttaaatatatgacaccactgacttttcttcatttgaatattcgtcctttctagaaaatttgtacaaatagacaaacatacaagacacactcaaaatacttttgatcataggtctagtagtacttatttcactttgcttaactaaattattgaatagatagtagtgatgaaagtttgagaaaaaaatcaattgtgccatatatttaattaaaaccggagggagcatcatagacaagacaaccatacaaattaaattccagtatcaaactcgaccatgttagtgaaaacactattcctgatttttcagcttttgattcattgtttgtcaattttatctcactagctagccttgaaattttatatgactatacaatgtcatcttacctacatttataattttgaaagaaaatattctgtgaatgtggttttatatatgatctttccactgatgtatatatatttacccgctatcatggtctcaataactgatgaagtaccggttaacacatgattaatggcacgtaagcagaaacacatacacacgaaagatttgctcaaatatgagtttttgggaaattcatcgcaattttacatggagtagaaaatttccaccacttggttacaactgggctacacacatatacttcagctaatttaattgggttgtgagactaatagctggagtgcgtgtaaacgtacgtggggcgatcgaaagatacaaatcaagggcgtgattagccgacgatgctgactactcacgtcactaattgggtagttgcatcctaattaagcagcgctaggtactgtttaattgctcttgactcttctcgattatttatcactcgacagtccctttgcctttcagttgtggtcaccgtggtgtagcatcctggggcccctccggatttacatggatacgtacgtagaaaattaattaatgtacatgctacgtacgtgctcgtatctacgtatatatgctagctttctctatcttcttattccttttcttctcctgctgcaacggttggtaagctctcttcgaatatgtcttttaaagatgttctttttttctaaataaaaatatattatgcatgtataaaatttatatcatgatcacttaatgacattagtagccgtcatggatataaacttcttaaatatataaaataaactttttcaatatgtatagaagcaagtgatgtactcctggtcgacaatcaagctagctaattgggtgatgatctagttaaatagatacggccacctcaagttttattgtggggctaagctagccacccatacctttttattttaacggtctacacactaatagccattcccacatatctagaatcgtgattaaaaaattactccctccgtttcaaaatctttgacaccgttgactttttagcacatgtttgactgttcgtcttattcaaaataatttatgaaatatgtaaaactatatgtgtacatgaaagtatatttaacaatgaatcaaatgatataaaaagaataaataattacttaaattttttgaataagacgaatggtcaaacacgtactaacaagtcaacggtgtcaaacattttgaaatggagggagtattagattgtcctagccgctcacataaagaaaaactgaaaccaatcatatcaaggaatcaaaagggttaacccgtaaacatgagccctaacccatacaagcctgtaacatattaccaacatacattattcacttatttatatatctccttatcaccaaactaataataagtatagttgtgtccatattatcatctcacatggaaacaatgatggacatatttttttctttcccgagtgcgctactttaactatactttcttttaacctctccctctcacattgtcttggtgtattcaatttattattatctttcataagatattgtctttcaaacgtttttctctttccacaacattctttatccttggcaatactctatttaattcaatgcaaacactaacccaagttatagcattaagtgtgtcttaaacctctcttctaattgttattctttagcttatcacctcatttgaaatactcgaactcttttttttatcacgatacttcttggaagtttttgtcacctccaagtcgttatttatatgtacccaaagtaatatgcatcattgacatgagtaatacactaagaatcatccatcttattctagaaagtatatcctagtgtatctactctcttgtttggttcttaaccaccatgtggctcttcaagctcgatttgttcacctaacatcctaggccccgcaagaccttggttttcttaaccaagttcaaaccacaccactgatgaaaaagttggctccagtgccaccaagtagtcaaatctaggttctaagttcttcatacttgaccatgtccatcaaaatatgtatcatggagtccaatgtaacatatataacatatggagaaaccttaaacaaagctagatcctcaaacctaaatcctggtatataattaccaacctaaggacaacttgacaagcataatatcatttgatcaactactgatcaagccaacaccaatctaaatgacaactgatggtctccttagacgaggactatatagccaacataaatacaatgggccaacactagccaggtccgattacaacccttgccgacaaaacatggtgagaacagatctagtacaactcaaatctttggcaattgttcataaacactacatcgtccctttcaacatactatcacatccctccttctctatacaaagtgtacgcaattaattcttcatggtgataggtgtgaccatgacaacagtgaatgacaaaaagagaaaggtgaaagagaatcactacaccatgtcccaaaattggtgtcagatggctgttgaaaaagaattgacgttagcttcaaacgatctgtcatgaaaagctcagtgtcagatggtctgtcagtagttcttttttaaaagacagactgtctatcggcaatgctactgaaagcgaattcctagcacggcccctaactagttttacggaaagatttatgcaaaagtagcttgaatctcataataaaataaggttaagaagcgaattcctagcctctagccatgaagttgggaaaaccaattcccgactacatggctagttaatacgttacattgggtactctgacatgaccaattttggcatagtcaatcgaccctccagcacctaactaatccaatagtaccaagtgttcccggccaaggttataagacctggtgatagttaggcttaacgtaataggatgaaaagaaacgactgcaaccagtagcgatatgagaaaacatgatcaacagacaatattgcgcattggatatgtataaaaacttacataaattaatgcatggggatgataggatcattacaacactggtcgagaaccaggtgtatagtcataccctaaccactcgtagaggtggtaggaggatcgctactacgctagtcgaggaccaagtgtagtcgtacctcacccactcgtagaggaggtgtgaggatcgcacattggtcgagaaccaggtgtctactcgtacctcgaccactcgcaatggtggctcgaggatcgatacaatgttggtcgaggaccatgttgtagtcggacctaaccactcgtagaggcagctcgagaatcactacaacgctggtcgaggacaggttgtagttgcacccgaccactcattgaggtggctcgagtattattacaacgttggtcaaggaccaggttgtagtcgcaaccgaccactcgtagaggcagctcgagaatcgctacaacgttagtcgaggaccaggttgtagttgcacccaaccacttgtagaggtggctcgaggatcgctacaatgctggttgaggaccaggttttagtcgtacctgtacctacgcaccactattgtcgggctatacccacggatggtatttctagagtatggggatcgttggaaccagggtatacacgagattgaggtaaaaaggatggagacatggatttttatacaggttcaggccccttaactgacaggtaatagccctactccaattggctgaagccggtgttgcccttatatatcagtatcacattacaatatttgggatgacctaatctagtttttatcagcttggtgacatggagctctaacacgtagttgatagctagtgtagtcttcttccttgaacattaattcaatgagattggagatagatctagatccctcacgtcggtctctgtggctcctacattagatttatctaaatctatattggcttgtcttttgttggtatgtaccctctcatcctaagggttcttatattatagcaaagatcatcttcctctccaaatagaacttagagaaacagaacaacatacggactaaatagaccttatcttccccgaccaggactctaacaccttctattacgggaagataatttcgttctttatccgccgtatttccttagtcaaagataccttctcgtatactattaggtatatggtatttccgtattccgtgaaaacccatgtattggaggcatgccttatccttgacattgacagggataaacccattgtatcacccaaaaaatattgtgtttgtttacaaaaacacccatatcaactccaatattgtgtacaatacccctctcaactatcaaaaccattcactttaccgctggttccaaactaaggtggtatcaccatgcttatgtggtgtctagtcaacccaagaaagatttaaaataggaaacatatgttaacgcctattcatctttgtcaaactccatctctcccatcttccctcgagcctatcatgagctcataggtgttggccaccctccatgagctagccacctactcagctgtcgtctcactctaaaagctagctattgcggtgcgtatcctccttgaaaaaaaaaacatgtgccaatagtgatgatatccaagctaggggtgagagagagagaaagagcaggtcaagatcagtgctcgtggttgcctttcgaggtgattgcctaactaatacagttggattagggaatatgaggcaggtaaagtgaccttgagctcaaccacaactccaagcttgaggaacagagcccaaggcatgcagtataggtggagtggaggggccttggaagattcggtggcagagctagcgagagctctttgatttggtggcggtggaagcggaaatcttgtgcagagcactattttccatcatttgtttctctggtcacaacgatggccaagacccctgtcctctatggcagcgcgctctatatttatgtggtcttcgtcgaggcagcaacttctcgtgaccaacgagtagggagctaggtaggagagcatcaacaactcgactaatttgccatttgctgccaaattagtggagacaggttgggtttcgactttggctccatcgcatcccgagatccatgagaatgaggaaaacatcaatcttagcttgaggacgagaaggacatttattcaccgactgtggtcactatggctcaaggagacggtggagcttttgtgtcgtctctgtgttatcaccatcgaggggagaaggatagaagggatggaggaggaagatcaagtggttagtaaaaggaggggcctatagtttttactgtaagcaccaggtaggtaaaagatgaagtgaacaatttcaatagttgagggggggggtattatatccggtattggagttgaagggtgcttttaatacaaaggcaatagtgacttatcctttcacagaaattctttacgccctagatttttcgctcaatccataatatacctaaaattttcttcatcccttacgtgctctcaagtattcattttgatccttccatacctactatgttggttggccatcatatcttcttcaaataactatatttcccttggcatatagaatttgtggacaatgcatttggaattgatttaaactttgtttaaattcactaaaaaagccaaatgttatttttaaattcatgatgaaaatactgtaagttatagtgattaagatgttttcaaatcaatgttttgatattggtatgaggctttcaatttagagttgtgagccaaaggccatatggtcatttagaggaaaaatataacggtcaactaataggattgacaggaaggtgattaaaatgataactcaggaatgtacggaatgaagcaaaacttaagagtaaaagagaggactgagaaaataatagtagtgcataaggattattctctatattttaattacgctggaaccttttcaaaggatgacattttaaaacttgaagactttaagttttacattttacagtgtaaatgtcaatactattaaggtctttcttttttcataaaatttatgggaccaggtgactccacaactattacatggctccgcctctaggtacttcgtatgtgaaacaattcaattttttgtttacatgttgaatacatatattctaactttaaagttgaagtttcattttggaaatttacattttaattagtctggctaccaaactctccttatcactggatttctttatttagtttttcaagcatagtagattaggttggagcgtgctctctctctataactacatactcctccggtcataacaatattttgagtgttaaggataagatttgattacacttttgaaacattagttattaatatattctcatatgcttagtttacagaaaatggtataggaagatttatcttgaaaaatacatcctatataatatcataaacttattgatattatagctagattaaagtttatgacgaaatattgtcttaaatattaaatatttaattatgatcggaaagagtacttagggatataggtggtgagacatttttttgaatttgatatcctgttgccagctattaaatcctcacaagatgttagacaatttcacgcaaaagggattctaccaaaaaaaaggttgggtacgatggcccgctaaacaaattgttctcagctctcaaccaagctctaatacatactttccccatattttaatgtatgacgccgttgattttttattcaacgtttgactattcgtcttatccaaaaagtttatgtaattatcatttattttattgttacttgattcatcatcaaatattctttaagcatgatataaatattttcatatttgcaaaaaaagtttaaataaaatgaatggtcaaacgttggttaaaaagtcaacggtgttatacgttaaaatacggatggagtatatggcgaggacagggtgtagcaactaccaacaaaaccgtcgctcatgagaaaatgtgtatacgtgtgtgggcatgcatacgtacatatggccagctagcaatgaaaagagaacaaaaaggtgacaacgacccactatgacttatatataggtcatggacaaactaattaattaacacgtttcatctcttttttcttctccttgatctttttcttcctcgttgcaccacgtaaataattaaactcgtaaaaaatagctgcatattttcctttaattatttgcagtttaattctagagtgatagcaagatgttgatacacacaaacacacacataattcaccataagtgcacatcatatcgtgttagttggcaacttggcatgcacatcatggccccctgctaggtttcttagcttcctacctcactaattaagcatgggtgtgttaacttcactattataattaactatatggaaacctgtatgttactggctgactgcgaagaatttatacggtgaaatactacattatagctgaggtacagttcgggctccatttgaaatgcaagaatttcacaggaaaaaacttaatttccatgaaaacaagaaaaatttcctatgttctaaacgagactagatttttctagctttagacaaacaaataggttttacaattaactgtgtatacaatctgcacctatattggaacaaaacttacaaaaactaaaatggaaaaaagtctatatccccccccatcccctattttaaactcttgatataagtccgtcatactctcaactttaaaatcggatatccaaccccataaattttataatactgttcaaaatatcctgtaaggtggttttttttaatatttgggagcttaattaatgagcgggtttaaataactgatatagcatgtttacatgtcgtcaatcatcgattattaatttatattctatgatgatgtcatattagtattatattaacatatgtttataagtgagcaaaaaataggggtaaaaataaaagatttgaagattttaacatatatgtccaattcatatatcatgtaaccaaactcatccaacatatatgcaaatcagaccattctgcaaaattagcttatggtgttacataaatggtactgtcactattgggaaaacaatttttgtagacaaggtgcatcgatctttctaggcgggtaaatattgttttcaccatctgtccgcctgcaaaataggggacgggggtcgaggtggccatccgcctgcgaagatcaatcttcccaggcaatgacataaggtggggaatagctacaaacgagggagaagttgctagtgcatatatactggacggtaatactctgcacacatatttatttaaaacaatacctgcaatatataactaattccttctatgtgtatgtcatgaagtatcaccagtaacctaaaggcagtgtcctttgcggatattacacatgcgagttccttagggttaatgggagatacatgaccaacgtagagaatgtacgtctcaactcaacatataagtcctgcgaagatggaatgcacatctaatatactcatgctttcatgcatgcaattgcttagaatcgaacatcgaactagttttgacgacgaagccattataaacatacaacgtgacctctgccactttatccaccacgagtgttgtcataaagatggacttttcttcgaccccgaaggcagcttagcgatgagcgacgaatacaagtccctttaggagtggagccacatgcttgtgtaattaagggaatgacagtattgtaaataacacttttgcactaattaatgcatccaatatatgtgtattatatcctcattatatgtttgttagctgctagatgtatttatgtactaattaattaactaattgcaatattactgattaaaaattagtatttaaaaaatttacggaaatatttaattttggagtgaatattttcctaggcggccgtaatgaacgccaagctacacattatcgtaaacggcatattgtggctatgtccacatagaaagattcattttgcaggcggactatttaagaggtccgcctgcggagatggatcttcctaggcggactggccgtccgctcacgaaaatgggtgattttagcaggcatttacctacaggaggaccggccgtctgcttgagaagaccaattttaaatgcctgcaaaaatagttttcctagtagtatgtatagttcaaggggttgaatatccggttttaaagtttcaggctgttagatggactttcaatcaaaattttgggggtatttaaaatttttctaactaaaaataattaaaatgatatgggttcataagaaaatagagaacaatatcgactttgtcagctaagtttcaccaccttttttatagcaaatgtttcatatactacaatttttttaacgaatcgacgcaccgccaatttcattgaataatgtttcatatactataatggttaccgtggttatgagatgtggtacactttctttctttagtcgccagccttccctgtcatattaattctcatttctacggcgagcacaagatatatcctaccataatttctgcatacatctcataaaagtaccatggaagttttctgaaagcatatatgtgtgccctaccaacggcgtcccgttgcatatgccaatatatccggccatagtatatagtcccaagaacatgacgccaagacggaaccggccgttccgttttgttgttggcttaatttggtccagccatatgcatatatagcgtgtgcacacgcactgttgctttcaatctgtgctcccacatatatttctagagtactgcatgtagctagctcgatcagggaccatcttgttattacatgctaagtgctacaataatatagctcttaaatgcctcttaaaattttcgttatcgtacgtcagccgttgcattcagatcaagctgtgaccggttgtggcaaaggaggtagtttttagttagtttaattttttgcttgaaatgaaaattttaggttattaaaacggaacagcatgagctaacaaaaatattttcatttcagaaaactcctttcaggtctagttgatttctcccgacgccaaatatttttaactaggaggagtaacattttgggatgcaggaattttataagacttttttttgtagaaaagctcaatcaattctgataaaatttctctaaaattcttctgattcaaacaaatgtggctgaacttatgaatcaaaattgcaatttgggtttcccagagtgtacagtacaactaacaactttgattctctcaaagaaagaaaagaaaagagtgtaaaacttggaacacaagcgaccgaatgcaagttaagcaaagttaagcattgagattaatcattgcagtcaccagggaaggttgggccatgaagtgggacccacagaaaatgccttgtttgtcaaacctgctttttcccgtgacccccttccaatagaaaccttgcaaatggcctttcttttttcatcaggtccgcttctctaatccgaatgcctttaattattggggccctcgattaatgg

SEQ ID NO: 24086 - DNA, 688 bp, Oryza sativa
tttaccttatgtacattgaagtttgtgaattatgtactccataaatgttacttgtgtggagtatttgatttaattagctgattttcccagccaagtttgacattttattttagttctgttttgcaaacaaaccaaagaagtccatatttgaggtgcttgatttcatattctattagcacaaattgatcttgagatctctgtccctatgttagacagaggatttgagagatcacctattcgttctaagcttttaaacttttggatccaccaaatgaagggcttgttttaactttttatgagaatttctatcatatttattatacttttatctatcaactgtaaatcacctgcagtcaaattttattgtacacaagcaaatagacataatgtgcgttgatgccccttattgcttttacaggctgttgaaaactggttagctgacagggcagtattgccacttgagaattcattgggtggtagcatacataggaactttgaccttttacttcgtcatagattgcacattgttggagaggtccgtcttgctgttcgtcattgcctgttagccaatcccggtgtcaagattgaaaacttgaaaagtgcaatgagccatccccaggtcaaactcttgcacaagatggcctaaatattctttattttttggtgtactaaacatgcagacatatta

SEQ ID NO: 24087 - DNA, 8365 bp, Oryza sativa
taaaatgttacttgaattggtatagaaattctgcgttttgctattgaaaagttatcggttccattaattatattttttgttcaggttgatatgaacaaatattgattagttgattgggaaactgtacctgaggcttttgttatgcttgctgacaaaaaataaagcaataagatgctgttgctgtgacgctacatcgcttaactaatgcaatcagtgtgcttgaattcttcaaaaacatagcacaatttgtcaagatggcacatggtacatgccaatattatacatgaccaaagtcgcgtcaactccatggctgctttataattgtgtaattagagaatttcatcgctgcgaaattctcgtctcaatcatgggggacttgttctttcgtttgacctgtggccatgcgtttcgggttatggttgcttaattttgttttacccccacgaacatattaatcaacgtcgacatcagtgcccgaatctcggagcaaatccagcggtgaatatgtactcatccgggaaaaaataatcagttgactttaaatcctgatgagaattgccaatatatatacttgagcagctaagtcctcccatctattctctccatctcagaaattttattttttgcccatccacattgagtaaacaagcacaaaatcttttaaaaaagaaaacagagactttcagtttgaagtctgaacgcactcttctgatcaaagttacatattggacgctcatattctctctttcaatccttgtttaccctttatttatttttcatttaggatccccttgaggtaaagtggaaatgtgggctaaaagagtttaaggtttggtaaaaagtggtattcaaactgaaattaagacctgtttaattgtgagccataacttaccataatttgctacgtctaagattggataagtttgaccaacttagacagctaagcggttgtagactagtagccactgtaaattcctttccaataaaccgcacacattaataacttagaattaataacttagaaaagtgcgataagattcgcttaggtttgttaaggtgcggtaaagattttaaatatggaaattcaaataagtttgacaacttttattggcaaacgttatccctaaccctgaagaaacatacgaacaaaaagtggttatctatatagaagtacttaattagaggcaaagagttaaaaatacaatggttacttcttaatcttattgatgaacaaatatttaaaactgatatttcgagacaatgcacaactacttactgtcaaacggagtggtacctacctgctaagttcccattaaaattacaagagattcctgcacaagattattaaattgtaatataaatataaattcaaatgcaacggcaactgtatatatgtggtgcatatttgttacgaattatgcgtgtatttttttccgtaaaataagaaaaaaacaaagttactgcatgcttattgtggaaattttaaaattttgttacacataaatttggcaattatccaaatattcatttagattttttttttccaccgttaagagatggtatcttaactatatactccctccgtttcatattatatgccatttgacttttttttagtcaaaattctttaggtttgatcaattttatacgtaaacgacttttaatatttttgcccatgtggcacgtcaatgtggcaaccaagggtaaaaacagtgtggggcctactagtcagtctcacccttcctctctccctctggttcggcgtgcagcgctgagcacgcagtggcaccagtgcccggtaatcattgtcatcgccattgacgactatgagagccacataaaggcaacgacacgaaggtggttgtcccagtctagagccagcagttgtaggagcactcggggcaacaccgccgatggctgcggcggattaagcctcaccataaccgtggaggagcacggggggctggtcaatgtttggctgtgcaagtggagccgaacggtgttcatgggccatggcatgccggagatggcgaatgggtcaccattgcctggggattagcccggaaaagcgttgcaagctcgatgcccatggtgacggcggcttacgcacagttggagctcgttcgccgttgccaggcatccgggccatcgtgttgtggtcctgccatcgactgccaaatgatgccgctttagtgactccggcgattatgccgctcctccccgtccactccgtcccgttctagcgccgcctcctatgccgctgctgcttcatgtcgtccttggtagccgcggcccctatcctgagctcgggaggtctcttgagtggtgcgggcaacagatatgaccaaatgacaggctagacaatagtcgatagtgtagatcgatcaaggggaggaggataggctggagcggttgagagcgctacacgccggaccagagggagagtggaaggggacaattgtgagagtgactagcgggtctcacaccgacttttaccactagattgccgcatgggtaaaagtggtaaataataaagaaaccacctcttaacagtgaaaaaaaaatctaggaagaacatttggataattgctaagcctagtaaataattaaatttcccacttattataactattactttctccatttcttaataactgacaattttaattttcttatttaaagtttgatcattagttgctcttaaatcattacacaaggtgagttttgtgcttacgtttagggcatatacccaactttcataacatgccattatttctagtgttcataaacaataagggtagtcaaagtttgaaagtgaatagtattcttattactccctccatcccgtgcaaccataagtttccatgcctaacttggatcgttcgtcttatttaaaaaaaatttataattaatatttttgttgttatgagatgataaagcatgaataatactttacttgtgacttatgtttttaaattttttcaaaatttttagataagatggacggttaaactttggcgcggaaaaccatggctgcacttataatgggacgaagggagtataaatttaagggagtactgttaagtgaactgagtgtatgcagctcgttcatcggggtggaacatgtccagtgtccatccaaattcaaatcttaaacttgggtacgagttcaattttttttgactgatttacaactaattttctttcagcgatagacgatgtgcccataaacaagccgagtgtatgcattcacaaagataagtgtgcgtgacaacatattcatcgatatcaagacgttgcatcatgctcgtagaaacgagtgcgcgcatgtgtatataaacgtctagttcatatttcccccgttccaaaatagagtaacctatagtcagattggatacatatagtactattatggatctgaatagtaacgaaaataaatgggagtagctgtagaactgtcgacggttttttggatgaaaaacttttaaatataactactatgtaattacattataactattatgtaattacattgtaaatactttgtaactaattgatatgtaaatcgggtgtaactcagaaaagactggttagttgaacaaacctgcaagttgttggaggtgttgggttcgatccttggtgcatgcatctgattttttttctctgttttcctccaccagcacaaaaatctcaaagcatatcaaatggtttaaaatttgaaagttttcaccctgttaactgtcgacagtagtatagcaaatccgaaataaatttagagaaaactatgaaaaatccagttaaacccggaagccaagcaagcagcaacctctcatcagcatccgtcgtctatctccagccagacaacttatcccctactctcctcccaccacaggaatccttggcttcctccgccgatgcttccctcctcctcctccactcccctctgaccgatggcttccaccccctccctctccgtctccgccgccgccgccgtcttcccgtcggccgctgacccccgcaggccgccgccgccctccgtcgccatcgtcgacaaggtctttttctttttcttcctgtggcctagcttgcattctaaaaaaaagaaagagctcgaatcttgttgggacttcccattttctaggccctaagttcgaagattgttcgctaattatagatcgcattcttgccactaattagcttagcaatgtgaataatgcgaaaagaaaagaagaagcagctaggattaatttgcgctatgtcaaaattgtgttgttgtttttttttctttttctgaatgtgaataatgttgagcgtttctaggtcttaagttcgaagattacttcgctaattatcgatcgcattcttgccaccaattagcttagcaatgtgaataatgcgaaaaagaaaagaagaagaagctaggattaatttgcgctatatgaaaattgtattgttttttttttcctgttttgttttgcagaatagttcatatggcaggagcttgcaggcggctgacaatggcggcggcggcggcatggaggctccccttcgacctctggatgtccaggaagcgatgaccatgctgacggagggcaaggcggtgcagtcagcgatgtacgtgccgctgctgcaccggtgcgtcgagacggggagcctcggcgccgccagggcggtgcacgggcacatggcgaagacgggcgccagcgccgacatgttcgtggcgacgtcgctggtgaacgcctacatgcggtgcagcgcggctcgggacgcccgcaggctgttcgacggaatgcccgagaggaacgtggtcacgtggacggcgctcgtaacggggtacaccctcaactctcagccggcgctgggcctggaggtgttcgtcgagatgctggagatggggaggtacccgtcgcattacacgctcggcgcgacgctgaacgcgtgcctggcatcgtgcgatgtcgatttggggaagcaggttcatgggtatgcgattaagtacggggccgagtcgatcacgagcatggggaactcgctttgcagtctgtatgccaagttggggagcttggattctgcgttgagggcgttctggaggatccctgagaagaatgtgatcacgtggacgacgatgatatctgcgtgtgccgaggatgaggaatgcgtggagcttggaatgagcttgtttatcgatatgcttatggatggggtgatgccgaatgagttcacattgacaagtgtcatgagcttgtgtggtacaaggctggatcttaacctgggaaagcaagttcaggccttctccttcaaaattggttgtgaaacaaatcttccagtgaagaactcgacaatgtacctctatctgagaaagggtgaaactgatgaggcgatgcggttgttcgaacagatggaggatgccagcatcatcacatggaatgcaatgatctcaggctatgcccagatcatggactcagcaaaggatgatctccaggctcgatcaagagggttccaggcgctcacaattttccgcgacctcaagaggtctgtgatgaagccggatcttttcactttctcaagcatcctatctgtttgcagtgccatgatggctttggagcagggtgagcaaatccatgcgcagacgataaagagtggcttcttgtcagatgttgtggtgaacagcgcactggtgaatatgtacaataaatgtgggtgtattcaagatgcaaacaaagcctttcttgagatgccaacacgaacttttgtcacatggacttctatgatctcaggctactcgcagcatggccaacctcaggaggcgatacaactcttcgaggaaatgagattagctggggtgaggccaaatgaaatcacatttgtaagtttgctctcagcttgcagctatgcgggtttggttgaggaagctgagcattacttcgacatgatgaagaaagagtattgtattgaacctgttgtggatcactatgggtgcatgatcgacatgtttgtgcggttggggcgggtagaggatgcattttcctttatcaaaaggacaggttttgagccgaatgaggccatctggtcaagtttggttgctggatgccggagccatggaaacatggaacttgccttctacgctgccgataagctgcttgagctcaagccaaaagggattgaaacctatatcctgctgttgaacatgtacatttccacagagagatggcaggatgtggcgagagtacgaaagctgatgaaacaggaagatgttgggattcttagggaccgcagctggattacgataaaagacaaggtgtatttcttcagagctaatgatagaactcatcctcaagcaactgagttgtatcaactattggagaatctgttggagaaagctaaagccattgggtatgaaccatatcagaatgcagagttatctgatagcgaggatgatgagaaacctgccgctggatcactaaagcaccacagtgagaggttagctgtcgcgctagggctgctgcaaacacctccaggtgccacggttcgcgtcacgaagaacatcaccatgtgcagggactgccacagctccattaagctattttcgctacttgaaaacagagaaatcattgtccgggacagcaaacggcttcacaagttcaaggatggccggtgctcctgtggagattttggtgctctattgtgagaaggatggaaatcttaccccccacatgctactctaggaactcaacagttttgtagtggaagcagggttacaagttacaggttgcacagaattcttttgatgaactgatcaccctttgtgatttttgtagatctttgtatgaaatcgaaatttataaactcaggcagtgtccccaaatgatctgtacacaaggttagcattataggacagtgaatacttgtgaatctgctgtaaatgctaaaatgctagcttcttaggatcagatctaagattttattgtttaaactcacaatgcaatatggcagtaacccccattctttgatcttatactaggagatcagtgtagcatacaaaaatatagatgctgtataaatgatagagttgtttaataaaaagcatagtgttactcgaaatatatacattagtgaggagactttgtgcagtttgttcatagaactggtttctgaagatggttgcatgcacttgtacgctattgctggtatttgaatatccaaactcaaagaacaaggaatttctactatgttttgaaccttttaactttaaaaacgaattctgtaaaaacttattttcaaatattaatcttttgaccacaccatctactcagtgaatacggaatgcgtggctgcgttgtttcaccacaccagtcaaactagcctaagtttgtcgagagtatatttttaaaataaacaaattaaaaggtccaaactatattaaaaaaagaaatcaagaacaagctcaacaaaacatcaatttggcaataactggtaagtctttttatgggctgaagggattgatgcttgaaggaataagtctacctaaagtgaagttattccatacttgaatgaatgattgcaacttaggccctctttgtttaggtttagacttattgtcttagacttttaagttaacttattggcttatatgatttataagccggtggatttaatgtcctaagtttagtagtggagtcatacatctacttcacataagccaaaaaagcttctccaacataatttttggcttaatagtgttagagtggcttacggcttcaaaaaaaaaaaaaccaaacgaataagctgcttgtttgtttagccttatacttttcggcttataagcctaaataaagagggccttaatgggccaagatcccattggccatgttttggagggctttttataatgtcaggctcttttgtgggagtctaccaatcatgaagcctttgtagtcgacatttgggcaagtaaacaaccatatccaaatgtgagagtaaggacatatttggcagagctgtctctcaaatccgatttacttgtttggtaaccaaattgtccaaaataaacaaaaactaaaacgaaacaaggtgaagcgctctaaaaaaaattgcactagagaggtggaacgggttaggccagctcaccgtgaggtaaaatacaacgctagtcatccactttcttagaaattttttttgaggtaccactttcttagaaattatagcaacttgctacggcactaccctcccctcttccatacagattgagattctctgccttaaatcaagtaaatttacagtcactgaaatgtgggtacatagaaaagagggtctacatatcagtgacttaaagttatgtgacttaggctttgttcgggagtgaggg

SEQ ID NO: 24088 - DNA, 1858 bp, Oryza sativa
acgcagaagagaaaatgaagtttgatatttcgattcaatcacaaatttacaccttcctctgtaacatcgaaaatagcctacacatcagccacgttctccgtaccaagaaagaacgataaaacttaaagtgttctacacaccaaggaaaatctacaatcttacaagatggtgacacacaatgtgctctaaaactaagatattagaatgcgcatggcacaatggccaggttatttaatccattatctaaaaaaagaattgctgcacagcctgcactgataggtaagctaagattgctttggcggtcatgagcctgctttcttcttcatgttcctccatttcaccctcaggtcggatgcgaggcgtgtcctgtggaacacatccctgccgtaatccagtatctggacccacggaattggcccgttgtcacttggggtgaattttgccattgcttcctgaatgaaaaccccgcgaattgtgtaagcatacaagagacacatgtatgcgcattacttactagctgggccacagaagatggcgcaggatatcggtgaaggtaaaagggattatacagaccaagtgtgcttaccctcaaagttgcctcctcttgttctgtccagcagagctttgtgcgccttccagctggtccgacagggttagagctgaaagaaaaaggcatgcttaaattcttgatactactaccaaagtgtcacactttcaagtgaaaaaaaaatacaacaaatgaagcatccgaattggtatctgtgctaagcaaacactgaagtcctgtaaggaaaatgagtcaaaatttccattgatgattccctttttgttgtatatacttgtgttttcacgcatcagagaataataagaaaaaaccattatctatgtcaggaccacaagtagagtctaatttcaatatcctaaatatgatttcttggatcaatggttcctaagaatttgctttccatcttacaatactattacatgataaagctaatgtcctcttaaaccatatggaagctattgcatgatgctgtctatcagtctatgacattgaaccatgaatattcatggaaacttggttgcaacttgcaagagcgctgatactcaatgttctatcccaccaactctcacagtacagttttatttgtcacatgtctaaatcagagtgttcaatttcatttggtccattgaaccacaattcatagacatgtctaaatcagagtgttcaactaccatttcttttggctatatgcaaactggcagtaaatgggagtacaacaggagaaagaagtttcctcaaaaaaaaaaaaggagaaagaagtgcttatgaagcttattagttattgatatcacttactaacgcttgggtggatatgcatagttccttttccttgatggtgaagccatatgttgatcatggtgccccagtgttttcttagaattaattggaattgctgtattattatcctgatatcttgctttgcggtgtctcaacttgcgccaatgaggcgatggttgcttgctagggtcactagaagatgtagcttcgatttcatcagaatcttctgactgttgagaacttgcaaggacatcttctttgtcagcatcaatattctgacttgcagcaggactgcacttgttctgagatgaatgtgctgttttgtgcgatgaatttgtattaccagactctccactagcttctgcattttcctctggctgctcctgctctgcaacctgagcttgttttctgttattctggagtacaagaattctttttcatggatacaacatcagagttatgaacagtgggcgcctttttagtgactactttctgagtgcaagcatccctagcatt

SEQ ID NO: 24089 - DNA, 23625 bp, Oryza sativa
  unsure (1)..(23625): unsure at all n locations
gatcctcactgttggcagctttttgccgcactgcagcttgttgatattgctcagccaattgctttctaccaaggaaagctgataggttcttccttgcttcagaatatgttttctttgccttttgatatgcttcagttgctttagtatagaagcatacaggacagtagaactgaccagaatcatcaaatgtcactgatgagccaaaacatgtatcatgaacggctaaaaaacagccactgcatttcagcaactgaccatctttgccacattttatgcacaactcttgttctgacaagccctcaacagtaccattagcatattgatcctgagtacagaacggtagtttttcagccattgacagaagaccaccagctgcgaagccactgaaactaccatctgaagaatgcacatgcaatgtttctgccacagtattcgccatggtttccttgtttgaagcttgctttgctcgcttgtcattaacatcattaggagaggttggaatactgcagcaatcattctgaacttcagttctgttccttccaatattctgctcagagaaatggttggcctctgaatttctgttatgcaaggtcatgctgcagccatgagactctagagcagtttgcttattcagcccaccaaagaccatattattttttatgatgttgccatcatcatatagagcttgattaactttgtcggaacaaccaacttccaaatgagccttgtcactattttcttgttcaaaagtttcagtatgctgtgtagtattccctgctggatctttaatttcagatttgtctccttgaacatccccattaaagccttcagatggtaaagcagcagctgtctgaataccagtactgccacaacccacatcttgatttgctttatcaccagtatcatgttgccctgaatttggatgagttttgctgaagtgtggttctgaagtcattattttatcctctacagcaataaactcaggcaagtgggtcatgttggatgccggtaaagcatcattgcttctgtcaacagctggagaaacagttgtctgcatggttgatccttcatggatggaatcctttggtgactgaatgctggcaacaagtggcatgtctccattattactgtgatgtttattaggatatctgaccccacaagattgtgattgaactatggttgtatgatctatcgtgtcctgctcagacattcttcctgtattacttcccagcaaatctgcagaactagctaaagaaggctcagctgcaactgacatgtgtctatttacattagttggactgtcttctggagacctgatgttgacaccaacagtattaatagaatcttcttgtcgctgatcaaaacacctattgtctgatgtacatggttgttgaaaatcagaagttgccattgcatccttctgaagattttctgtgtttctttcatcgactaaatttgctagatcatcctgctgaagttgagcaccatctgtagtgaatccggtcttctctgtattcacaagatcatggctgatattgtcgtgttggtcatttccattctgctccactggggatggtggaaccacaggtgtaatctctgggtaaacttttctgagctgaacataaaacaagcagcacactaattttaacagaagtcctttcttcagatgtgaaagacagcattttaacataccaactcaaaagaagtttctggtaatgtaggtctctttatgcatataaacttctggatatcttgtctaaagggcggaagcatatccttctccaagctccctgagctaccaacctgaaaattttacattatgtaaagtaaacctcaaaattatctggacaccaggaaggtattacagacaaattgcagcacactagcttcgaaacttgaataaaccatatgcataatattgtttcacagagaaaaaacaggtttaatcacaagcaaacaacaaaaaaattaaaagggtgacagtagatacatgcataatcatgtgaggaacaatatttaacacagctagcaatatatttatatcaatcccacagttcttttcttaaaaaaaaattagcacagcctccccttttccctgcacaaattaaagcattcatggagcactcaggccaccaataatcatgtgaaaaataacatttaccacagtataccccctttcccagcaacaatgatcttttgagacttcataagcatatgctatatataactagagcaaaggtaccaaaatcaattgggaatacgtaagacaaaaaatgctagaggtaatatcatgttcatatcaccagaatgcttgagctcagaaaacatctgggtcttgcctagcaatgttgcacataataaacatgcatcagtgaacaactcattggttagagatctgaaggttcatctaagcacatattcttcaaaaggtgctgagcagattacaagtcaaagggtgaaaatgccgtttcatatcactggaatggatgagctcaaaacatagaaagggtgtctgaaccaagctaccaataaccctattattcaagaaatgtacccaaccatgcgaatggggatcaccttgtcttcacgaatagtttgaaacgaattgcagagttttccagtaaacgaatacttaatacttgatcgaatgaggcaaatatgtcaatgcgttgcgccgaatacctcacctcccggatgagttgaagcagcaaatcctcgcaggtgcgggatgcgtcctccaccccaagcatcccctcccccggcgccgctatggccgaggccgtggcgccgcgctcgccatcggaggaggcgagggagacgacctcctggaggcaccgcagcgccacgcgctcccgcaccgcctcaggggcggccctgacggaatccggggagacgcccaccatcgctgcgggggcaaggcgggcaaggcaaaccctaggtgagagtgtgagacaaggaagaagaagaagaagaagaaacggacgcaaacgagagcgcgcgcgagagaggagggggggggggtggatctacccttggtgacggcgaagtcgagggcgtcgtcgccggcgagcgcgtcggcggcccaaaaggcggcgaagcgggaggcggtggcggaggcggaggtggaggggcgcggcatttgcggttacgcggtggtgggggtggtgggcggcgagtttggtgggcgggtggagcaaccggacgccgacgaggtggccgccgtggaggcggcgcgccggtgagccgccggcgaggagggtgggggtggggatggtggtgcgccgccgctgacgaggcggatgggccgggatgcgagtaccggaaaggcccatttgttttagattttggatccacaccctatgaggcccatcggggagtatttgtggatagctttagttggtgtttatttcttttttcgccataaatatagctacaccctattattttatctcgattttcgtaaacgatgtgttctgtgcgaatttattttttagaattttcctaaaatatgtcaaataaatatattttgcgtatagtagtgtattcaggtcatttataagagatcgacaaataggtcagagtcattgattagccaccttgagcattgttttaggaggcgaagaaggctttagagatgtttcatactccctccttcccataatatgatacccaaaatcccttttattataggacggagggagtatatcgctattgtgatttgaatgttttgtaatctacggtaatctaggatatgaagttgtgatatgggctaaggacaaggctaatgtatactctccgttccataataagtttatttgtgtctctcctatttatcataaggttctttttacgtaaccattgtattggagtttgtgaaagtaaggaataaatgtgctaggagtagataaagtataaaataattatattgagatttgataaagggtattttagtctttttgttgttgtattggtatgtgtgggatgggtgaaaaataaacttattttagatagtgggagtatgtctcaatggataataagagtgggcccatgtgtatatagtaatatctatggctctctctacaatggttaatatgtgtgtgggaggagtttaaaagtgagtcctgttggatctcactaagtctaaaaaatggatacctagtcctttgaatgaaaaataaatcagtatctatctatacctaattaaaaaatacgcgaggcttccggaaaaaaaaatcgtccatcttttttttcggtttttcctttctttctgtccgttttctccgtccgtccattttctccctgttttttctcttttttttttttgtccttttttactgtttctctccatccgtctattttttcgctatttttttcgtccatctttttctccgcctttttccgtccgctttttgttacctttttttagttttttccatccgctttttttttggtaggatttatttttttatctgccatatttatttcgtcgtcgggccaaaccctagcgccgccgtcacatcgatctgcctccccatgcctgattaactgcaaaaattgatgttgcactactccctcgtcattttcctcatgattttccctttcaattccgctttaattcactgaatttaatctccatttgaaagtcattttttatcgtgaattttaggattcactccgattttaataaaaacagattttggagatcgagtgtatcaaaactctaaaccaattaaaaacagaaagatgagatcgagtgtataaaaaatccctcaaccaattttagaatatcgagaaagattcgatcggatttgatgaggaggatcggttttggcatcatatggacatgagacagtctttcggcggttgaagagggccggctatccagctccacttgtgagttgggtcaaagagagacaaccaagtagagggagagaggtagtgggctgggcggagactgaaaaggaaggggctgggctggtctaaaacctaagagtaaaatgtatagccgatccaaaaatattttttagcatgaagcttgttctgtaactccagaatggtaagatttttgtactattctgatattaaaggcctaatgctatcttttctataacgttgtggatgccctaatcattttgttttctgttgtcttggcctgatctttatctgttttctttcaagactaaatgttcccatcagttctatgcgtgtttttttttccgggctaattaagcctatgatccaataagatcaggacataggctagtacaaaatgggctatcagatccgatccaataggaacaacgggacagaggctcgagcagtgcccacgggaggcggcaccctgcgagggcgaggtactccctccgtatttttgatctatgatatagtctacgaaatactaatttgaccaaccatacatttctatctctactattataaaaattaaagatgtttttaccggtattttggtacgtcattcatgtttgaatcggttttaattttatgcttccattttaatctatatctctacttaaaaaaagaaatttctgtcgttgtagaaaagaaagaaaaaggtctgactaaaaaggtaaaaaaaaagtccgactcaacaagcgataaataaaaaagcttctgttgtaagtataaaaaaagaaaaaaaaacatctcatcgtaaaagaacaattgtccgactcccatgaaaaaggaaaaaaaaaagtctcccagtaaaaaaaagtccgcttggttttttaaggaaaaaaaaatatcccagtaaaaaaagtccgcttggtttttttggcactaggtttttttttctgatttttttgcacgctaaggcttttggttttttttcctggcctttttaatccgatctgttcaccgcgcgcatcccgggcgcctttggtttttttttgtcaatttttttcgccggttttttttctcctatgcgccttttgtttttctcatccggttttttaatctgatctgttcgccgcatgccttcccactttaacctagcgccacgtcgccgccatattgatcgtgcgttttctccaatttgattgaaaaatcgattcctcattcatctctcatcatttcctccatgattttccttcggctttaatttgctagatttaatctccgtttaacactttccaatgatgacggcgatcttctctggtcatttttatcctgagttttacgctctgattttgggggaaaacggaaagagtagattgagtggatcaaaaaccctcaatcaattctggctgatcgagaaagattcggccggatttgatgtagtctagggctgaaaagcaaggaaggccttctgccgaaaaccctggaaagtttttcattaacttttttaattataatctatagcgatcccaatgttaggatttttattaactttttcaattataatgtatatagtgatcccaatatttcttaatatatcactaaaaaacgtctttacccgttgcaacgcacgagcatgttttctagtaaaagtaaaatgttttatataaaaaggttgcatattatgatagtttatttaatgataaatctaataacatcaatttaattgattgatattttttatttttttttctattaatagtcaaagttaaaaatattaacttgtcactatgctaaaaatgcttataagtaacatattgttcccttcgcgaaactcaatcataacatttagctctaactagcccataaacgaaagcttgccctgctagtttatttgtttgtttttctttaaccattgtgatactaacattatgtctatttcatattgtctaacacgtttgacttttttttaagttaaacttattaagtttataaaaaaaatatactaacattttcaatacaaaacaaacatattatcaaaatatattcaatactaaatttaatggaactaatttggtgatgtaaatgttactaattattttcaataaactgggtcaaatataacataatttgatagaaaaaaagtccaatgacttataatatgaaacttagggagtaactacttggatacttgcaattggatgctttgttctactttaaagtaataatgagtaagaatgtcgctatcatctatccaatcatcctgcctttgagaaacctgcacattgtccccttgtctcacttgcagttctgctgatgactatcccttgaccaatacaatagcatccaacacagcaatgaaagctacaagaactattttcgctaccatccaagaagttactcacaatgatgataggaatgcggctaatttatccacatgttacgatgaacaaattgcaaccaacatccattaaacaaatcatagtcgattgaaagaaggcaaatgagaaataagaaccgcaataacgtgcatggtctctcttgcactaaatacctctccaatagggtcaagaagaaagtattctcgcaacacgcaagattgagagacatgcaccataagtatctcttgctattggtaccacctcctcttggacaaaatctggcctgaggggcaccaatgagggcatctagcaagatttccatagcactgtagggcgatgacacgagacaaaccgagagagtgaggatcattacccttggtaatggataagttaggggtcttatctctgccgagggtgtcggcaacatagtagaaggcaactggatggcaatgtgtgtggggtgggggggggagggggcaaaggagtaccttgcaacatgaaaaggaggggggcaaaccaaaaaaaggcatgatgcatatgttgcatttaaacactccataattgtctctaagatatatcacaaacattgtggtggtagagagaggcattacaatggccgaaggagtttgagtgggcaaactgcaaaaaagtactccctccgacctaaaatatagtaaactagcactggattaaacataacctaatactatgaatctgaacagaagctagtttatctaaattcgcagtactaggtcacatctaatatagtactagattgccatattttggaatggaggaagcatgatgctagctttgtattcaaatatgtatctgcatgattacctccaactcacatcatggttagtttagtgatatgtttgggattctaatttttcggcccatcaatagtatagaaatgcatcaccggtgatgtaggaggtagttaagaaatgcccatcaatatgtatcaaacatgttagctagacttcactcttttctctctttttatcatggggatgtaggaggctctcatgaggaaagacattatccagcaaaaaatagacatggaaatatatcaggaaaaagaaatggtgcaacactgtttctccctaacttgtgggtatcgacgaagcggaggcaaaaatatcggtacgttagttggtgggcggtttagggggtgttacatgcaaatagctatagtaaacacgagtatagctagcactacaaatctacaatgatttcacccataagtcaacattatcatatattaaaaataattaatatatgtttttcttatatggtaacacttgtttggttataatcaataaactcttgtttagttaacccattacatgcagtagccacgttaaatgcaaatggcccaaacacatttctgcaaatggttgcacggcctgcttgtctcgaggtatctgcaaaaattggtattttttcaagtgggggacacaaccgtgtgtgaaaatcaatgttcacgggaggccagttaagctaaccgcctaataaataaaaattccaaaaattgaaacactcattcccatccaccccagccccatcgttgttgtcgccacaattgttgttgccattgtcattgttattgcccccgtagttcgccatcgccgccgaagtttgctgccaccgtcgtcaaaggccccaccattcctgaggctgtcaccggcggatccgaccctcccggagccgggggcggtgcatccgcccttcctgaggccagacaacaccagatccgccaccacatggcttactgcttcagaggctgcccctcctgaggccagcggcactggattcgccaccattgaggttgccgtcgtcgcggccctagcctccgtcatcatggtagccctagtctccatcacccctccggccacgtgtagattcggcgcatccaacactacccctctccacccctttgctgtcagtgccagatccacgctcatggtggcaccagctcccattgggtgcccatctgccgcgtgcaccttctgcaggcctctagcggcgaaccgcccctcccattgctgctcactgactgctcctattgccagccgtcaaggagagccgatggaggagaggagaaaagacggcgaaggagaggaccgaagagatgtggaggagaggaaaaaacttaacgggtggaagaaaaggagatggatttgactatgtgtaaaaattcgtaggtgtgcatcttaagaaatccacatgtaaaaaatgaatttttcacatacggccgggtctatgctgggtactttttaaatctttatatatagtagaaaaaacgtccgtgcattacaacgggtaaatgctattttaatttattgttgtcataaggtttagctatggtaaaaatttactgtgggaattcacttggatattttctttagaatatcataagctataattaggagtctgtatttcatctcaagttggcatgtgagttttttttaaagagattttttataaaactccttttgtatttccaaaaacaaatgagcttaaaatcctactcaaacacatgtctgaatttgtaaaagcgaacgaacttaaaaaccgactcaaacacggatgacgtaccaaaataccggcaaaaacattttcaaaagcgaacacacttaaaacccgactcaaatacgaatctttacttccaaaagcgaacgaatttaaaaaccgactcatacacggataacgtaccaaataaccagcaaaaatatcttcgatttttataataggaaagatatattttttttcggggtgcataaaaaaggtgtgttcgtaaaagtcgtcgattatcatgttcgtacacacgacacatcgatcgatcgtcgacacttgtcgatgtgagcttttgctgctttttatacgtataataatcgtacatacagaacgctaggtcgatcgatctgaattttctcgtgtgatctgaattatattttctcgcgcgtgtgtggattgaatgtattaaacgacaggtcagtcaaaaagatatcaggttcgctttgtgtgttttctgcgactacgagaattttgagtacagtcgttctttggactgtacctatatatgcttaagattggatctttcgaaatcattgtacagtcgtacgtacgctaattagattattcgtttcgatcgagagatgtgagtagtttgactcatgattatatcgaataaaataacatgattttttttctgcatctaacataaataaagttggccaaaatcagttgccacttgccaaacaaatgcagttaaaattattagtactgtgttttctgtgactttagccacccaagaacagacgaattttttattttattttttgagaactcttttaatttaaaatttaaaaaataaaccctcttaaaacttatttccaagatctataatgaaaatatagctaactgtaaagttctagaactcgtcaaagctaactgtcatatgaagttcgctaacagctagccctatctcttaaaaggaaaagtgctggctatatatccagccagtcatccgagttcccacttctgctaacttcaaacttcttgaccgagatattttaatatttaccactatttgtcactttgaatggcactcacagtgtatggcatgttaaccctcatgtgtctatgatatgtgggtccaatagtaaattcttaattaccacttataatagtggcaaagacttagaccctatttgtttcagcttaagattattgtaatctagattattgagacagattactataagctggattataataagccgacgtagaataagttgttagctgtttgtttttctgaattattagctggttgttaggtgttagcaaaccaataatctaaaagaagtacctttagagtggataactagattatagtaatctagcttatagattgtaataatctatcataataaactatctgtttgtttaagcttactcctaataatctagattataataatcctaagctgaaacaaacaggggcttaaatatatgtcaactcctcgcatctataccctttatattgttgatacccactaataattattagaagttaaaactcaatatgtaagcatatcacattatcacccgctagtcattactattctaggatatcatctcatgcaaatatgacatatccttattttactcacctcattttgtcaaaacatgtcaatattcatcatttttataatatttaacttatatccatttatgtattccatagcaaagtacgaggtatcacttaacttagtttagttgatgttagtaacattcatcttcgtctgaatttgtatgaaaaagtatagaatttctaaagatgaggtgacctacaattattaatttaagtttatgtgaactacaatgattaatttctagaatttaaaattttcagtgtaaattaaagcccttaatactgtcggtttgaaaagagaatctgtagtgatataaggatttagattattacttattagtgtttgcatagtggtgacagtaagtcatttaaccgatcgagtgtgtttgttagtttcctattcagtatatatcaaacatcaacaaataaaaatatctttatttcagtatcaaacatcagtggataaaaatagcctaggcaatcaaatggtcccaaaacgaaacaaaacatgcctaatcagtcatacggtccccaagataaagacataaaaatgactgctccctccgattccaaaatatatgtcgttttagacataccctaccgctttcaataaatataagttgttttggaactttcgacgtagcactttttcatcatttccctcttttgtgctctcaccaaaataaacactacccctcgcacaaataaataacccatcttctataatataatataaacaaaagacaacaaagttatttgagcactttttctttattctcacgctcgtcaaaacaaacactaccccttgaacaaataagtaagtcatcttcttattgtaatactctcttcattttttaatatatgattttttaatatatgacgctgtaagcttttttagatatgtttgaccattcgttttattcaaaaattttatgtaattattttttttattgtggcttaatttatcatgaaatgtcctttaaacataacttaattttttttatttgctcaaaattttgaataagataaatggtcaaacttttatcaaaaaaaaattaatagcgacatatattagaaaatagaggtagtataatataaatagaagtcaataaagtcatgtgagcacttttctttactcttgcgagaaaaagtctaaaaacgacttatatatttggaaggaatcaaaggaaaatacctgttgatacgatgaacttgatggacacttggcccaaggcccccccgaccgggccggcccacgctgtccttgtcaaagcaggctgctttcatgtcctatacgatggatttggacatataccgattaacaaaagagagagagagagtattctattcttccgtgatgatcgagcacactccttttccaaacacgtgtgtatatatgtgtgccccgatcagacggtcttgcaagtgcccatgtgttccttcctttgtggcttcacatcgtcttcaacctgcttggttagcatttaaattacattattttctccgtctcaaaataagagtgtgggtgtgtttttcaaatttaagtaacacagctgtacttattttgaaaaagaggagtataaatttgagttaattttgctttttatactatttaaatttcggatcggctttagggttttctgccactttaatttattgctagctctacttaattttataagatgctatgagcataaggaaaaaaaattattcttaaaaacaagctccaaaattaaagaaaatcatcttggattataatcaagcgcgtgtatagacttaattaggctccatttgagtttgcacgataaagattgagtacacaacacgcaaaataagaatgccattagcatacgactagttgagttttaattattttaaactttaaaaaaatatttgataattttaaataacttctgcataaaatatttttacactaaatataagagggttactacaaaacaggatcccattgcaacgggatagacatattagctattctctttcacgagtatcacagggattaggttctagatattacagttaccgggtaacatgtatcttaggtatcgggtaccatgcaactggtaccacaacatgtatcaggtatcaggtactgtctccgttgtctaggttttctgaaatataaatgtaatgtttagtagctcaaaaatacactaccagaaaccaatgtgaaatcaatgtgaaatctgtatcttaacatggaaagaaaacggagctaattatcgcggagacgagtcgtcgattggagggtctttaattaggatccatacatccctctcacagtgggccaagcctagctggcttcggctgccttcctccaattgccttctgctgcgatttcatggagatttcataaataggccacattgagcatgtgtggttttactccaagacagattctctctctctctcatctctctctgtgagagataggcatgttgatttattattattattgttattatttccagtaaaaatctcccctgacagagacgcatcctccaccctacgccacctttgattatgttattaactgctaattaattagtgtgaattgcaaccacgagctatagctaattaagctaagggcacccacaatggttatctatagactctctacaagagatccatgtcagcatattttcctactttaaaggtattaaataaatagagagagcaaagctatctactaacttagagatagtctatagagaaaaacgaggcaatgcatgagagagctatagataccaatgtagacatactattaaggtggtttactattaatcgagtctattgctgagatgtacatattttatagagaacaccttactttaccattgcgggtgctctaagtatatatagctaggtcgtcaccgatcactacacatgctgattaatcaaagtcatgggaagctaattaatacgacgtgatcatgttgaagaaattaattaacagtactacttcacgagagcatcaactaattaaacgtgttgggagttaattatatttaattattgtctggaaatatattccagctcgtgccagtgatcatcaacttggggtttattgtagcaaaaatggaggttacaaccacttttaatttctttaatatatatatatatatatatatatatatatatatatatatatataattaatcatggccatcagggtcagagagcctacacattaattgtttttttttcttggttagaccatccttctcacgtatttaatcgtcaggctcaggcaagagatgatggcaaaaaggatacatatgtggccaattaagcaatagggggccaggtttgacctttgatgataattaattatgatggatgctgccgtagttgtgtgtggttttcagacacgcagcatatttcggttttaatttaattgattgattatcacattgatgccttctctcttctttttaatatatgtggttgtaaggacatcataatttggctgtcattgtaaaggggcctgcaggttctctacttggtttgattcccatcgtgatcaactctagtctccaaaatggaagaaagtactttttcctttgaacaataatgtgtacattttggttttagagacgacctttagcacttgagagaatattgtgggaaaacataattatccaacggctaaattaattaaatattaagtgtgaaaatagtcgttgtcttgctaattcaaaaaggcatttcaattaataatagtgaaaagttcctttcctatgtcctaattaagctttttgtgagttttgttcggtttgggataatccttggaggataatccaaactcaaaacctgagattagcaacaattcttgcaactggcaagcatagagaaataggggtgaagattctctatatgtgggtctcacccacctattgatccacgcatcaatgtttattatatcaatgtttataatgatagtgctattatgatagatgatgagaaatggatattaaaataactgttctgctacaattctgtggacacatattttttgaccggttacagtcgatttttcggctgttcgatcctatcaaaagggtcacgcagtacaaactaactaagtaaacataatggatcttatcacagtcgtccgttaagttcttcatgcagttaggagtataatccatagcattaagttggctaataattgaagattgagttttctttctttctactagaaaaaatacctgtgcgttgcaatgggtaaagactattttaatcatatttttgttaggttttttttatctaaaaagtatatgcgatttttattttgatagtattgatatctaatttggaaatcttattgagataatggccatatcctgtgcgttgttttcttatggtttggcaaaaattctgaagcaattaggagtccgactctcgtcttaagttaacatgcgagttttttaaaataattttttatacgactccttatatattttcaaaagtgaataaacttaaaaaccgacgcaaatataaacgatatatcaaagtatcagtggaaacatcttcaatttttataatagtagagataacgcttttgcttacttttctatttggttccaactaaaatctatatatagtgcaaggcttaaaatttatagtgtaaaatttgatttttttttccttttacaatgtaaagaacttattacaggattaacatctactcttgtacaacttctccctccatcctagaacctccatcctagaaggaggagtacaattctatagcgacgaccatataaaattcactcctataaaattactgggtgtctctatttaaaggtattggtatttctggtacttagtactctctccctcccaccttggtactctccttaagctagaattgttttttttgggaggggggacaaattttaaaaggtagaattacactgcttttgagacagattgagtagaacttatggcgtaaattatatgtttgaaaaaatgacttttttttacctggaaaaatgactgttttacaatgaaaaatatgggaacataaatctagctaatccatcaaaacaatatagtaaaaacttctattattgaaatcaggatttaaaaaaaattagatttttctacttgtgatttgaaaactacaaacactaataacataatgaatttaatagtctaaaccacaagaaactttgatcgtcggaaatcacatttccaactgcaaaaccccacatatcttggtttcagttttttgggggaaaaaataaaagctgatgtttatattcttgaatttagaaactttcaaataacaacaattaaaatttataagacaatacattggagttattgatttgagttgagcattaaatgttttttaaaatataatgagatacatttgatcccctctccaccaggagctagtaactatgtcaatttataacctaattgaaaaaaaatactttcaagtcaatatgcagtacaatttaaaattaaaatttattttttataacatgaaagatttttatttagttctttgttttccccaagtatatatatatagttctgtgaaacttgctagttcaatttttcaaatataaattttgcatactcaccaatattaattttaattcccacatatgttttgtaatatctggcagagacatctgctatatttagacactgacaggtgctacaaattttagccatttttgtcttttacatgtattgtcataatacaagggcagtggggtttctctcgtgcctgcacgtacggtagtagggcgaggagaactcctgtggctcttatagttcatctgcagtactgtaggtcgagcccataccggtcatgcatttctaagtatttaatttctctctttaattatgcaagacaacaacatgcaaccctgacaataagcccttcaaatactatatgacagacaagagacacagctcgctagctatgtggtgcatggatagataccaaaatgtcctacaagaggacaattatagaatctcaaatttttaaaacactttttatttttaattttaaaaataaatatttctaaaacttattttcaaagatcttaaccttttggcggcgtcagctcgaactgatgtatgctgccacgccgctagcgtaacagcgttatttggccacgtcggtctcggcggcgtggcaacgttattcggccatgcctctctcgtcggtgtgacaggataaatatggattgcgccccctgcagatggtgtatcagtgttgttttgctacgccagacggactggcgtggccaaaaggatcggataagattttggaaatatgttttgaaatgttttatttttgaaattaaaaatttaaaaagttcaaaaagaaaaaagaaaaatctagaatctccgcatatcatatttcattaagtgtgagtgcatttttcaaataattagaaagaaagactaacactagactatacgtttagattatcagggtgatgcccggctgtttgcgagtgcttctccgtcaacacccccactcactcttcccagttttagaaattttagatctattaggtggattagggtttgtcttctagattgtccatggacatgcaattgcctagagtattttagtttttctagcttactctttgttgatgggtactgcattcatggggtttttgataaatatctaaaatggtttgtatgtcgtgtgatttgccaatatgtttgttgatgatggcttcaaactagacgcgccttaccaacacaagggtaaatgtgtactttcatcactatttctccctctatttgcattagttataataaaaaaatgtgtttggtgtttagcagataattatcatgtttttgcggtgtcctttagcacatacacattatttgagtgttttgcggctaaaatcataaactttagatgtcctctgataaattttgccaggatgatatcctcgttcatatgcctttacgtgtcatagtttgtaagcattgtagctatgctcctcatctcacagctcttgcaacattccaatatggagagcacctttgttctcgattgaaaggtttcgatgtgttttttttacaaccaggttgtaattgtttgttgtatttaatactccctctgttatataaaaaaaagtacatttttcagtttttataaaacatttgacttttcatcttattgaaaaaaatattataattactacttttgttgttattagatgataaaatatgaatagtattttatttgtaactaatttttatttttttataaattttataataagaaggatggtcgaattggaaaagaaaccaaaaatgcgttgcttactctgtcccaaaatataagaagtttttagagttggacacggttattaagaaagtagatagaagtgaatggtggagggttgtgatcactactagaaaaactatttgtgtagccaaaactcgttttcgcaggcggccaaaccatccgcctgtatctaaacgactgtgaaaatcattaatttttttcagacggaccaagcatccgccagcgaaaatcatttacacaggcgaaaagtcaaatttcccaggagatagcagcacctcttgcaaaaatagtttcggcgccaaaaaaactttttcgccaccaaaccagcccgccctcacgtttcacccaaaaataaaaaattgttcatcgattcaacaaaatacaatcacaagcatccatttatcaacacaatctatacatgaacacaaatacattggatttaattccacatcaccgtcttgtattgcagcatcaatcaaaataaaaacaaataaagaaacacaaaaaaatcacagctccgtcgccgccggcctcctccctgccgccctctactgctccagaggggaggaccacgccacgaccgccaccggcctccacccatccctcctccgggccgatctgagtggaagagggagggatggaggggacgaccacaccagggaggggatatgccgctggacctcatcgtcggcgccgtccctcgtcgccgagcagctgcctccggccctccttgcctcgccgagccgcctccatcgacctccttgtcggcgccgacccttgtcaccgagcctcgccgagctgccaccggacctccccgccgaaccgccaccaccgccggccctccccgccgagccgccgccggatctgggagaggaggggtcgcggagaggggcagcgacgtggccggcggtagtcgtcgtagtggcgcagtagttgtcgtcgtcgtcgctcgtaggctccatcaccgatgccctccgccctgcgccgctgacggccccctccgcccgcgccgccgccgaacccctccgccggcaccctccacccgttcctccgccggccccctccgcccgcaccggccctccgcagtaggaaggaaggaaggggaggggagggaggagagaaggaaggaaggcaggggaggaaggaaggggatgggaaggggagagagagaagggtatagcggtggagagaagaggataaggatgactagaatttatttggataggtagcatttttgcaggcggaccacataaggtgcgtctgcgaaaatagcgcaggcgaactgtgaactttacctcgatttatatttttgtatgcggttatttgctgtaagagtcatgtctgctgcgaaaaaaagacccacacgtcaggaaaaatgctttttctagtagtggattggttgggaagagaatgtttatgaaaaagctgttatattttgggataaatcctaaagactaaaagttgttatattttaagatggatggagtacagtctgaatcaacctcgtttctcgaggaaaataaaagactgaagtggtacgtacagcgtcatgtcaatattaatttagctcatgatatcatttcttgcagcagcagttgaaccacgtcccgttgcctttactcctaaatgcaacattgcatatatgcatgtgacacatgtgtacatatatatatacctatcctagatcaggccgcccctagggggcggaaccctagcctccgccgccgcccctcctcctccctcctccatgcttcaaagccaccggagctcgtcgccggcaaagccgggcgacgcgttgggatggcggcagcggggccatcctcctcggctccacctcgccccggcgcgggcgtggcgacgatggcggcaggacggcgaggtcgtggcgacggggacagcgtggcgacggcgcggcggtggggcgctcggtgtcggctctccgcggctccagcgacgggcaacggcgtcgccagatctggactccccacttggccggggtgaccggcgatgggctcggtcaacgccagcgccgctccgcggacctggcaggggggtggctagcggcggcgatggtggcggatatggaggcgacgaagttggcgacgacggcagcgcactgcggcacgtgccgtgacgccggccctcgtcaagaacctcgccaccacgagggaggcgcgacaccctcgtcaatgctccggctgtgaacgccgtgcccttgacgccttcctccatgatgccaacgacccgcgcttcgcactgcacctccgatccgcgccaccccggtcagatatggacggctggcgtctggcggcgctggctagcgacggtgcggctggacggtggtggctggactgggggtgtccgtggcagtggcgatggcggtggtgatggtggctgacggtggcggctggcgacggtggtggctgtggcagtggcggtggcggctgtcgacgatggtacctatggcagcgatggttgaaggccatcatccggctgacggtgcgtcgtcgtcgacggcggtatgtggaggcggagaaggggtctagcggcggggaaggagtccgggtgcgggcgcgccgtcgacggcgggaacaattgtgggcggtggccttgaccgaatcgctgaagggataatgttgttgaccgacgacgatccttcttgtgcggattggtggtgtgggtttggacagggaatcgcgggcgaaagccttgccaagccatttggccggctgacaacggcgacgccgtttggcgtcgttcctctccttggaggcgttgttttagcatacccctttcctttccctactatattctccgggtgaaaaccttgcttcggttccgaacgagcggtggcggcgatccacgtcgcatcctccttgggggcaccgctttggagaaatctcttcgtgcaaggatattgtcattggtctatgcattggcttcgaatttcagtcctaggcctggacgaggccttctagctccacattttattttacttttctcagtttgggtcctctcttctcttgtttggtgtgttcaacttgtcttgaactacactctcttcttgagtggatctttgtaataattggctgtagttctttttgagcaaagaccggaatattatattccattatctaaaaaaaatatacctatcctagctatatattctatctctcgatgccaatgctctcatcaccccaaaacggcccaaaaccgcaccgatttcgcccccacgaaacaacatcatttgcacatacagaaactccggccaaaccacaaccagagagagacacacatatatacagagagaaaaaaacatagagatgtgtacatgtgtacacatgtaggggatcagagagagaaagaaaacattgataattatacaaagggataaaattaagaacatggtgggggatcattgaaatctgaacttggacagtgctgaggggcagggggacatgctggtacatgttgctttcagggtgtttgtttgcatttgcattgcattgcatgatagcaaatgtgcatgaatgcagtacgcgtatggtgaattaccctttcgagggttgcgtccatggggaggcatgtgaaagggcagcttggccactggccctgctgatctatctcatatatatatatatgtatatatatatatgtatatatatatatatatatgtatatatatacatatacatatatgtatatatatacatatacatatatgtatgtatgtatacatgtacatatatgtatgtatgtatgtatgtatgtatatatatgtatgtatgtatgtatgtatgtatgtatatatatgtatgtatgtatgtatgtatatatatgtatgtatgtatgtatgtatatatatatgtatgtatgtatgtatgtatatatatatgtatgtatgtatgtatgtatatatacatacatgtatgtatgtatatatacatacatgtatatatatatatatatacatacatgtatatatatatatatacatatatatatatatatgtagtaaatttgtttggtgcccgggcaccatcgttgaaattgagtatatacccaattcaaatgagtatgaatctttttcaattacttagatattaacattaaccactttactaactaactagttcaaagcaagtttgaactgaatttaaacttgtttttgttagattttgattctaggtatatagcatccatatatataattagttaggtatgtaatcatggattgtgaaataaaattaaatttgagttgttttgttgataggtataggtatgaatcgaattattaaactgggtatatactcataatttaaaaattttgagtgattttgtgcaatatataccatggtgcccgggcaccatggtgccccatatgagtgtcctatatatgtatgtatgtatgtatgtatgtatgtatgtatgtatgtatgtatgtatgtatgtatgtatgtatatatatctatctatatgtatatatatatatatatatatatatatatatatatatatatatatatatatatatgtgtgtgtgtgtgtgtgtgtgtgtgtgtgtgagaataatgctaganagtcttgtaacctaaaacggagggagtattgtggtttggggacaaatttcagactaagcgacaaattaagggacctaaattgaacttattccaaagaaaaaccgtagtaatacccaagcagtcccagcatactgtcattgcttttcacgagtccccaagcacgaacctagtctcctgcgtctacgtggtccatgactatagatggccataagggccgagacccgacggcctggcccacggcacgacgttttggcccgacccaagcacggcacagcctgacaggggtcgggcccatgccggtcccgccgacgggggtcggggcca

SEQ ID NO: 24090 - DNA, 23678 bp, Oryza sativa
aaatttactatataatatatacatatgtatatatatatatatagacacacacaaacgtgtcttgtgcaattgtgaatatgcatggtatgtgcccatatggccagttgggggctccggttttggaaggtggtttctgctctttcccctcctgaggttcgtgcccttgcccttatgcgcaaagccagtgccgttcctgttccgcgaccgcaactttgcgaggaaatgtgtgtagaatgggatcgcgagatggtcaagtacgattgagatactcttttttccgtgtgattgaggactagcgtgcataaaacttagtacgtaacaaattttacgtactaagttggtcagaatcttatatactggcataaattatgtgcttctattatacatatttaattaaatcctttttctgattgttttagatggaattatcattaaaatggtaggttcttagtaaggtcaatgtatctagctttaattaacaatagttatgttgagaggaacaaatatatgtggaaacttaagatgccgcttaagattaaaatctttatgtggtacttgcttaagggggttgtgttgtccaaggataatttggcgagacgaaattagaatggtagcttaaggtgttgcttttgtatgaaaaatgaaactattaaacatctcttcatagattgtcattatgcaaaattcatatggagagcagttcagttttcttttggttttaatcttccaactagtatatctcatatatttgatgggtggcttttgggggttgacaagaaaaagagtaaactgatactggttggagtttctgccatttgttgggctctatggttgagtaaaaatgatttggtttttaataaatcaccatctatttcatatatgcaggtaattttcaaggcaacgcactggctccggttttgggcacagctacaaaggtatgaggatgatggggagttcctaaaggttgcatgccgcaagttggagttgatagttatgcaattatttgctaattatggatggaggttcacgaatagacttcaataaatatgttctccttattttggcttggttttctctgtttttgtttggtgtgtcctatttagctgaactacgctcttttctgaattgttacaatgtaataattggctgtagctctttttgagtaaaggctgggatgttaaattccatcataaaaaaaaattacaatgatacctctcggtttctctcgagaactataattaattaattttactctgttttacaatcggattcgtatagatgctactcgggtttttataaaattcatcatctttgggttcagagtacacatgtttgcacgttctctcgtggagatgttgaaatgaacctcaaataattgagaatgtcccacattttcccttgaagttgaagaagctgatgtttttagctcagcttgacaaggcttgaaaagatccctgtttgacttactatagctagctataataacaaattacaaggtcaataactatatataagaaatatgtgccaatttaaccaagatgaatatgtatctcaagattgatccatcttaggtgccgagggtgtgcgcccatgcatccgaaaccagttaaccctcctttggaatgcatgatttttcaattggaattaaactgattgtcgtgaagaataaaatcctagcgttccaaactagccaggcttaaggaattctttacaaatacaaatccttttggtttgtaaccagctgttttttaagggaaaaatccaaattacaccccataactattgggtgaacgaattatctccctaagcctgaaaaccatatatctttcactttcaactatcaatgccggacaaattaccccctgacttgaactggagtagttttggccctacgtgacaatccactcaataattcttctattttaaaatcgatgggtcccacctatcagtctcatcctctctatctctttcccctcacctctatatatctctctctttcccaatcctctctctctcttctcttctcggctccactctctctctatcaccgagcagtcggccgagaggaagccgaggacaacagcggtggcgcggggacagcggaggcagctcgaagcggcgaagggagagccgaggacaatggcaacgggcagggacgagggaggcgcctcggagcggtggtggcgggtggggatgacggaggcaactcggagcagtggagggggagccgaggacagcgggagcactggtgctattgtgcgtgctcgccgcagtggcggccatgtggggtgtgctcaccgccgaagctcatgccagcctgctgttgcgcgccgccgctctccagtgtggagctcccgatgaacatcgccgacccatacatcgttcccggattccccagccggccatcgcctctagctatagtgatgctgcgtcgtgagccacgacgacacgaactgctgctgctccctcttgaggcacaactcttgccccccccccccaaaaaaaaaaaatcgccaccaccaccaccactgttgccgccggggctcctcatctacatttgacgtgcgcgcgagagagtgggtgtgagagggaaagagataaggaggagagagatatgtcaggtgcccatcagttttttttaaaaaataattgttgactgggctgccacataggattaaaaccacttgcaaagttgcttggggggttttcatccgatataatagttgaggatgaaagatttctgtttttttggtttatataagggggtaattcgtactcacccaataattcatgtctaatttggacttttcccttttttttaatcgatgagtacacacaaaatgtgtaacgcgtgtaagagaatcaaagattctgcaacatagagtatgaaaaagagtacatttggtgttcagctgctctactgctttatcaaacgtatagagcctgagagaggcgtaggtagggcacgaggagtgaaatgacaatagttgctggatggaaaagacaacagttgctgcctcaagtaaagtacccaaaaaaaaaaagaagaaaaaactatagctaggtcctcaacagctcaactcatggtactataggcttcataggttctgtttctaggattatatttattaattatttatatttaggatatggctgtagctatcacagtcctaacagtaggttgtcctgcctttgtgtaacctttttaaattgttgcattaaatatttgtttgtactcacagacaaattaatgcaaatttacttatatactaaaagtctaaaatatgtacccctccgtcccaaaagaaacccgtatccagattcgtagttagggtttgtatttttgggacggagtagtacaaatagtcacaaatcacatggttgtaaaataatcatggatcactccaaggctttccaagctatactagctaacaaatttaccatagaaaatatatatctgattctgcaattgatcatacctgtgtggttcagtgcatcttctcaccccgcgctttgctgcgggattaacggatgagtatatgttaaatattgtcgaataataaaagttgaaatgttgagaaaataatgtgaggaagatgatttgacacatacttatcaatctctataatataatatctattatctatctatctttatctattatatactaaaagtctattaatcttcctacaaacgctctcaagtaaccacgtggcttcctaaaaacactctcaagccgccacgtggcactctaataaattagataaaatcctacaaattctaagaaaaaagcaaaacatctagcccttgattttacttaaattggtggacccgatatttcaagccattagattaaatctattaaaaccattccttctaatatggatctgatccatatgatgaagaggaaggtacgatgtagtattcgtaaacagaaaaaaaaacaaaaaagatctttcctatccgatgcatatggatggagaggaacgtacatatgtactaccaaaaacacaaaaaaaattacatgtaacgtaacgtacgatcgtatgatcggaaattaaaaagataaagccgaaaaaactagattatacataaaaatccactgaactttcgagaaacgctcttaagccgccacgtgactcctacaaatgctacttagccatcacgtggcgctctaataaattagagaaatctaaaaaaattccgggaaaaaaaaggaaaacatcatataattgattttcacttaatatggtggacccatcattttatctcctattatctcacctcctcacttttttatccaaattttctagctagcataagccattaacacataattaattgagtattaactattttaaacttcaaaaatggattaatatgattttttaaagcaactttactatagaaaatttttgcaaaaatcgtaccgtttagtagtttgggaatcgtgcgcgtggaaaaagaatcaaacaaactccctttcatctccaaacgaacacactacataaacaataagaaatgctatattaactatctattatatcgtaaaaatcaaataaacttcctacaaatgctctcaatcactgcaacaaaaatctcatctagaggcacttttgtagaggcgttttacaaattgcttataagatcagaagtttcatagtgtagagacactttataaaggcactttaaaaattgcctaggaaacttttagtctagagacatttttagctcagtttattatagtttatcttgtagaggcattctttcggtactgtaaaatgcgcctgataggtataggcattttcttgagacattaaactatgtagagacactttttggaatgataatgtgtactaaaggactaaatataagtaaataaaggcataaatgttcaagtagtggcatggagttgagttggttagtgcattgaagataaaaatgatttgtccaagagatcattagttcaagacttgataaaagcaataaaactattttattctccttttttgactggttttatatgtttgtgatacaatttaatgtctcttaaaaatacctctaccatcttatagatattttataaaatgtctcttcgtttatagagacaactcaccataagacacttatgagatattttttaaaatgccttctaccatattgtaaagacatttgaaaagtgcgtctacagtactagaaaaatgtctccataaaatatttttcttgtagtgaacctgtcacatgcgtggtgtactacaaacactcctaagatgccatatggctctcaaataaattaaaaatcctaaaaattatgataaaaaaataaaccattgattttcctttaaataggtgaacctaataattataactattataataaatactttttaaaagattttttctatttatattgattcacatgcataactaattgcacatatatgagaagtaattaaagagagggctagcaggatggtaaaaaaccaatgaaagtttgttgagatttatttacgaaagagagatataaagacacttaattcaaaatagaaaatatattactttaattttaatttgttttgttagaactattttagaaataaactaatgcgcatgcccgtgcaaatgcgcgggctattttcctagttgtaaatgatgtgtcatacttgcatgtgatttaaaataggctcgaataatattttttttgacaccaggctagaatagtaattgctagtgagtgaagatgtggcatgcttccatgggattttaaatgggttagaataataatggctagtgggtgatgatgtggcatgcttgcatgttgagttttagcttctaataattgttagtaggtaccaactatatagaaagtatagatagattggcgcacacacacatggaaatgcaaaaagtttgacaatactaaatcaagtaattaatcctgcaataaactctaataactaaatctgttacatagactcagaaaaaaatgacaaaccctttgaaaaagaaatcaaaaaaggaaaatgataaaggtagaattcatagttgcattgtttctgtttctcctaacatactacagtatatatgttgcaatatttttttgtcttaagtttgattacattacgatgtgtgcaagtttttacttatatattgtgctatctgaggtggggatatacacgaacaaggaacaccctcatcactaacctacagtcatactctctcttcgtcccacaatatagtaaactaatactcgattagacataatatagtactacctccgacccaatttaaatacagttgtgggcttctgtatccgacgtttgaccgtctatcttatttaaaaaaaatatgaagaatttttttaaaaaaatagtcacatataaagtactattcatggtttatcactaaacaataaaaatactaatcattaaaattttttaaataaaacaaacgaccaaatgttggatataaacagtacaaaactatagtctttttggacggagatagtactacaaatttgtactaatatatttattttaggatggagtagcaccatagtattattattagcacaatacaagtcactctgtgatgtgatctcaaatattttactactagctctaatattataatatttactcatatataatttttaggcacgcatgaggtgatgagatcagaagaaaaatctttagacatgaggtgagatcagaatatattttaaagaaacaagtacatatgcgtgcgtggaagatgaagttgagctgcccaagccatgaatttaaaacagaaagatgccctgacaggcacctcctccctgcagctggaatctgatgatgcagtcaccgttggcactgaaattaatccaatccaatccaacccaatcaccattgtgcatgagagcctccccccataaggacagttgaagaatggcattaaaagaagaaagctgtagtagtactccctcagtgtcacaaaactctatttttcagtttttgaatataggagtacaacgtttggctcttcgtcttatttaaaaattttcttaatatttttattattattagatgataaaatataaataggattttatgcataactaatttttaaaataaaattatatattttttaaataagacgaatggccaaacattgggaaaaaaataaaaatgggaaaaaaataaaaatgaagttttgtgtaacggagagagtagtagtagctgctgatcaaggaaggacagctacctaatgatcagaaaacagaagggagactattcattcattcattcattgattcatgagcacaacacacctaaattttgggtcaagcaaaaaaaggtaaacaaattgttggggctctgcttcttagaaggtgacttttaatgatattgtttaattctttgttatgggacaaagatgaagtcatatcaaaagatttacccactggtgttgcaatttacttcctgtttagtagtccttgtgatggcattttgctctgtaggatctccacatcaataagcaatcatcagaagatatcgtggaaaatgacacgataaaaacaaaaaaacaacatgtatttaataactaaaataaattaccagaacatcacatctatctaaagcatggtaaaagatgtcctactccagttatcattgataggcaagcaccaaaaaacgaaggtttggatggagcactcctccccttctctccacatgctcagatgttctttcaagagttttttctagagaacatttgaaaacaactaatattaaatgtagaaaaagatgtttcaggaccatggaaatcttaatataaacttgattgatgaaatgtggaaaacaaacttgatctctttgtgttttatacatcttgcaaatatatttgaagattttgaatttatttgtagacttttatattagtatcattcattcatcaacgtctctacaactatacatttttatgaaatatacttgagaaagtttgcaaactttacttgagtttattccttgaaatgggttggcacggcactaatcttccttgtatatagtactccctccgtccaaaaaaattaaagctagaaggggatgtgacattttctagtataacgaatctgaataaagggctatccaaattcattgtactaggagatgtcacatccttgtctaggttatgttttttgggacagagagagtagtattagctttgaattctataaaatttgttccccagagtttcactccatggtcaatttgatatcatacatagtacttatggatcaatttgatgtctgaaagattttattattttgttcaacagtctcttccaagtttgtcgatcccgttacctgatatatataaggcatccacaatatgtatagaaaatttagatcttaaacaatgaaatatccattatgacttggtcacagagacattatgagggtggatcaagctcatgacacaaaaacaaacccacaaacttgacaattttaaaacaatatttttcagtatggttcttctatttttttttcaaactgtatggcctagcttaatacccatctgaggtatgaaaattgtgaaagatgtcactatacttttaccaacataactgaacagaaccttatgacctccttgggccatatacatttcatgatataaaagggtgccttacatagaagtttgttgtgaccgatatgtatttatttatgtaagtcaagtagtgtatgaataaattagaaacggtataaccatgttgtgcacacatgagaataaggtacacaacctcatgagtggcatgtctactggacttggtcaactttaaggtaataagacgcccttttctctatgtatctgattttcatgtgttattgtacacataagagtaaatatagacaatttcccatgaatcttgtcgtaaaggctagtagtttactatggtagcaagtccactatatggtgtttcaagtaggggtgggtgttcagtttttccggttttatcggttcggtttgttcggtttagtagaagattggtttcacataattactagccaaaattcctcccagaaaaattaaaaccgaacctttttaaaccgaattaattcggtgcggttctttcgggttcggtttataccgaacttgattttgaccactccatcagttcatcccactaccaacaataatcaggaatcaacaacatataaaaaagagtaaatttcataaaactacacatactttgactaaattatcacaaaactacagatttaaggtcatatatcccagaactacagatttagtaacaaatttaacacaaaactacatgtttaagactaattatcacaaaactacatatttaataataaaactatcacaaaactacatattttggggtttaaatcctttgcactaatgttatgttttgagttgtaaatgtccaagttttataattaattgatattaaacctatagtttgtgataactttgttattaaatttataattttatgatattttaccttaaatatgtagttttgtgataaaattagttttaaatctatagttttgtgatacatcatgttaaatctatagttttgtgataatttgatcgaagtatatgtagttttgtgaaatttactctataaaaagaagttccatcatccatcttaggggaaattaagagtattcgtgtacatgggcttaatcaccataggccattgaaccagaacaacagcaagatggcagcaagatgttagagaatcgaagactaaccaggaatccaagattagcacctgctggcctatgaaggaggaactgatcgatatctcggaattgactgccactgccatggttggctgcgccgtctggctggtcgtctgcgagggtcgaggagcctaggacgagctcactgggtggcgctagggttggataaagttatgctatctcttgggctagatggaaggggtgagttgggccttgtattaccttggactgtcccttcctcggttttctcggtggaccgatttattcttttgaagaaaccgacgcgatgactgaacaccgaactacgaaaaccgatggaaaaaccatagaccgcaataaccgccacttcggtgcggttcggttcggtgtccggttttcggtaatttcttgcccaaccctagtttcaagtaggccggaggaccatatttgaaccacaagacgaacttggagaacaaatttagataaaaatgaaacatcagggaccaaattgattccaaagcgaaacctagaggaccaaaataaaaacataagtaattaacagttaacagaaaataccaggtgctcgtacgagcctaaatgtaagtctttcttggctcatgcttctcacttgtctcccacatgttaaattttacaatggaacaccacaagaccaattctcaatccatggtactacgcaaatgaaagaaaaagaagtttatactgcatcgcaaaaaccccgatcatcgcccctaaggccctgttttaacttgattaagatacatactttttctcaatttccgttagcacgcttttcaaattatgcaaaaactttctataaaaaggttattttaaaatatcagttaaatcaaatttcgagcatataatagttaaaactcaattaatcacacgtttatgaatcacttaatcatattcatcatattcaaacgggacctaagggcctattcggcacagctctagctccagctccacttctcctaggcctggagctcagtcaaacagtttcagctcagctctatctaaaatggaaacagagctaggtggagcaatatcacaaaatgaattagagaggttgagctgggtttaggctgctccacaactctacttcaaaactcaactcctgaaattaaatttagaagttatagctctaccaaacaggcccgaaatcaaaacacaaaaggcgcggaaattaaagcggtttgtcaaaacgccccgatggagaaaccacaccacatcaaacacagagccttataatttgcccatgactgactaggccccttccccctccctcctcatcagcaaataaaacgtgcattaacaatgaccctcccaagatgagcagccgcaggcatggagagcctccaatggcgccctccctgccgaccttccccatatatgcacacactcacatatatatatacacacaaacacacaagcatatatgcatcccaacagtccatacctccatctccccccatgcttcgccttcgccttcgtcttcgtctacctcatcttcgaaattctaacaccaaaattaatttcattattagtaatatagtatattagagtagtagagggatcgagagagaggagaagcatgatttgcttcatggcgtggttcgtcgcggcttggagctgcctccttgtggtggtgatggtgagctcgatgaggcttagtaggtcagcttcatcgtcctgtggatcttcttgcggccatggcgggtgggggccgaggagctacccggtgatcgggtgcctggtggcgttctaccgcaaccggcggcggctgctggactggtacacggagatgctggcggcgtcgccgtcgcagacgatcgtcgttgaccggctgggcgcgcggcgcacggtggtgacggcgaacccggcgaacgtcgagcacatcctccgggcgaggttcgccaactaccccaaggggaagccgttcaccgacgtgctcggcgacctgctcggcatgggcatcttcaacgtcgacggcgagctctggcacgcccagcgcaagcttttaaccaccaattcttcgcgcgcgcccttccggaacttgaaggcaccctgcctcaaggccaaggcccggaaccgcttcttcccgcgctcgcggggctcccccgcgcggggtggtggacatgcaggacgtgctccggcggttcgcgttcgacgtcatctgccgggtctcgctcggcgttgacccgggatgcctcgacccggcattgccggcgccgaggctggccgcggcgttcgacacggcggcggggatcatcgcccggcgaggcgcggcgcccgtggccgccgtgtggaaggtgaagcgcgcgctcgacgccgggtcggagcggcggctgagggaggaggtcggggtgatccatgaggccgtgatggggctcatccggagccggaggaaggagcgcgcgctcctcctggtcaacggcaatggcgtcggcggcggcggcggcgcgaggagcgacctgctgtcgcggatgatcgaatgcgggtaccccgacgaggcgatccgcgacatggtgatcagcttcatcatggccggccgcgacaccacctcgtcggcgctcacctggttcttctggctcctcatgcgccaccgcggcgtcgaggcccaggtgctcgacgagatcgccgcgacgcgccgcgcccgcggcgcgggggaagaaggcggagacgacggcgagggcgaggggctcgacctcgacgactaccggaggatgcgcgtcctccacgcggcgctgtgcgagacgatgcggctgtacccgccggtggcgtgggactcgaagcatgcggcggcggacgacgtgctccccgacggcacggcggtggggcgcggcgaccgcgtcacctacttccagtacgggatggggaggatggaggccatctggggcgccgacgccgccgacttcagcctcgacaggtggctctccctcccgcgcggcggcggcgacggcgccgccgccgcctcgccagccgccgatgcgttcgccggcgtgtcgccgttcaagtacccggtgttccagggcgggccgaggacgtgcctcggcaaggagatggcgttcgtccagatgaagttcgtcgccagcgccgtgctccgccgtttcgagctccgccccgtcgacgagggccgcacgccggcgttcgtgccgctcatgacggctcacatggccggcggcctcaacgtgacggtgcggcggagaacgccggcgccggcgacgtcgacggcggccaatggcacaggaggggaattgaccagtagttaacccacgtgtaagtacaacaaaacaaaggattaattaattaattaattaattaatatactatacaactgtgctaagcttacactgcagcttacagctaagcactgtacacactctgtatcatatgaccatcatatgaaattaaagagatacacacaccatgtttcattgagatccttgatagatccaaggtaaacattgggtggtgcttttcaaggtatcttccctgctgcacaagcagcttcgtttgttgtgccgatccggccacgttttttttcttttcttttttttttcaattaaggatctgtttggtttgtttgcggctacggtttgccgcacatcaattaattgtcagacgagatgccgtagcttgttaaataagtgtctggttgatcactgtaactatgatccgaaaccatgttagcgacaccacaccggtcgtgctgctctacccctatgccaacttataaacccctttatgcggctctttcggcatttttacgcccgattcatcttattatcaaattgtactataatgcctcatctcgactcgcatacatatgcattgttatcacctgcttgaaactaatcacgaaaaacacatcatacacatactacattaactggaattcacacacattccggacggttaaatcatgaacggatagagatgttcaccgatttactgaaaatcaaagttggcatcaccttttaacgcacacaccccactacacacaccgttaggtgggatttgatgcttagctttttgctgcctgaaatattgcagtcagcctctctctgatgtgagctccatttccatcatcaatcaattggaaagttcatgggttcagtttctagttatatgaccactactagtactagcaatgcatatgcgtagacaaacaaacagacagacagacatgttgaatgataaaagagcatgtggggattttgctctaatggggttaggtgaagggatgagcccaagtgcaggtgcctatcacagttgcatagaggggaattaaacgttgtggaaatatatatatcaaagagagagagagagagaaaaaaataaagatttggtaaaactgagactagaatatatgcatatatttatgtgtgtgtatggagtatggttgaagtgaagaggaggagaaaaagaaattccatgtgttgccacaccacgtgctgaatatatatacacctgccccatcatatcctttgctttcacacttggaatattttttttttcttagctagatcgatggacaagagagagatgttaattacattattgttgtgtagtactaattatgctacttaattagaagggcaattaaagttgaaagccacatttgtgtgatgaatttggatgcagagttatgttatgtagtgttggttattgggatcttgtattttacaactagattttataattaatttaaggaagtttttactgctaagagtaagtttttctatataattgttttccgatgcatcggtactgtgccttcggacttcaattcagcttataatccgcagccaaaatgccttccagctagctatttggatgaaattaattacgtcactctttggagagttttcgagcctttgaatcttgacccagcatctatctatcgttgtcttgtgttgtttccatcacgatggataaagattgggcgtagaatattctaacttgttgatttcctaaaaaaaaaagttaaattcaatgaacttatacaaattttaaagacaaactaactataatgtcaatcaagaggcataccactaaatatacaaagaaagatgtacggtaattaaggtttgaagcaaagataataagccataatgtggaaaattaaaccacctccacaaccatttgtttgaacttgttttcatacttaattaatgaaagtaatatacgtggttttcatatttcatcaggaagttaactagacttttctctttttttttcctattgcagtctactgcaattgctgacacattaataattacttaatcgatctcttcttagcgtgtgaagagtgtaaaacattaattaatttttttaccaggaatactgctagggctttgcccagcaatttaaattttataggtaaaacagtagttaattattagaagtaataaaaataaccaaagtactaatttgttctcacagtttagagaggtcatattgggtaaaaaaaaatagcacccttaatcaattatatgtagatgaaaagaaaatgtgcgtaaacaatcaatcatattttagcacatggaagattgcttaattaattaatcccaagacacatacatgtatggtcagtatcactgtttggtggttggtagttttcgctgatgtgcatggcttgtctgctcgcttcttaattatgtaaatcctactcttaatttcctgtggaacttgggctgaataaataacgataatgaagtcaacttttgtagtttatcggatgcatgtacgtactttattagagcaattaataaagaacaaaacatgtttaagaaagaagtcgtgttgtcctgttcaaccaacattatactactatattatattaatcttccatgtgttttctttcgttattctgggcaaattaataatcctcaattattcatagactgatattaagcataataccaattgatgtcattaattcgactttttgttgtggatatatattaactccatgtaaacacaacagggagtaattaataattaattcagctagcaccacgtgagagctggactaatgggattctagaggtagactattacggccaataaatctttaaaataatgctaatagatatccttaattcgactattcttttgtggatatgttaaccccttctagaggaattccatctacattgacccttttctaatcgtaattgtaggaaatgaaaactcctaatgtcttcctttcgcggatctccctatatatacaccaccattttttcattagaaaggtttttttccttttacacctcccgccattatatgtattcctattatattaatatattcccttgtctcaaaatataagtgtttgggttggatagggcacatcctagtattatgtgtgtttcgtactactagaatgtgtcccatccaatccaaatctcttaatatattttaagacaaaggaagtattagaaaagacagcacagttactatgactccataggagagatttttagcgtgtagaaaatcttaacgtggttatttagtcctaattatatgaaaaagtcataatttagtcctagttcttttctaaatagttatccgaagtatatattagagtcctcttgttttcctactgcgtatttctttaaaatatttcactactggggaaagcctctttagtgttaggttgcaaactgggactccgaatccgggactaaatatgggtatctttagtctcggttaaaataatcgggactaaagagctctaccatctttagtcttggttggagttaccaactgggactaaaggttttattttttactgcttgcatattgatttcttcaaatcaaaaattcatagataagatcacatattaatatgcagatcaaatacatcacaaattctcaaaaacaaatacattgtagatcacagattcacgtaccatcatccattcatccaagaacacattaatcatcacttcacccatgagatatcatccatgaacacaatcatgaaaaacaaatcaaaatcataaatcataaacacaatcgcctcatgaacacaatcacaaatcatgagcagcaacatctactccgccaccaccacagccggccgccccttcgcctcatcctctccaccacttctcctcctcctcctcctcctcctcctcctcttcttcttctccctaccgtgcgccaccatctgcttgctgcggctgctggtacccgccgcggcccggatccggccggatccgcccgcagccgccaccgtcaccaccgccgccaaatccaccgcgggaggaaggcgagagggagaggtagagggggcaagcgccgccggtgagggaggcggagggggcggagggagaggaggagggttgggggaggaagaaaatggacattttgccactttgaaaacatggtttcgctagaatgccatcccgaaaacatgtttcgctaaaataccaatatggagcgtgccatcacagctactttgccattttctccattttcaccattttggatatcattttctctggaaagtggcttgaagagacgagaatgcccctccttctccgatgacgagttctcccgtcgagctgtccgacgatgccaccccgatcgacgacgcgttcgacaccgcccccacctcctcctccacgaagaacccgttcacctcctcctcctccaccgccgtcgccttccctttcctgaacccgtgccacgccggcatcatcccgccgcacgccaccaccgtggacacacacaccccaaatcctcctcctcctcctcctccggcaagcgcacggatcgacggatcagagcccagccaccacggcaagcgaaatcaatctcagcgagaaagagagagaggagagaggagagagagcacacggatcgtagtatgcctccaccaccggcagcgacaacgacgaggagcgggagatctgcaactgcgacggcttcgtctacaagcactgtcgggtcctccacccgcccgacctcgaggatgccgccgccgccgcttcatctacaagcgccgccgggtcctccacctcgacgacctcgtctctgcctcgttgagcatcccggccatcgacatcggcacgctggtgggggtgggggttcggcatcccggccgtcgccgtcgtcagcttcttcgtcggcggtggcgtggaggccgtgcatctcccttcgctgcggcatcgccatgcccacgtcaccgtcattgccaccgccgccatgcgttcgctcgccacctcctccatttcggccacgcggaccacctcgccgcgctcgtcctcttcctcccatgaactggatcgatcccctcttagccggtgagcaagggcaatttggtcccatcaagccacattccagcgaaaatgcaattgaaaatgcacaaaatggccaaaatggcaaagtggtggtgagtgcacgcttcatattggcattttagcgaaacgcgttttcggaatggcattctagcgaaaccgctttttgaaagtggctaaatgtccattttctcgtgggggatgtgagagggagggggcgggagagagcacgtgagagataggggggttccgcgtgtgcgcctcgaggagataaggatgagggatgggtggcgtgcggctgcatttttcttttcagtctttaagcccgatttaaaaagtcgtcaggtcatgtcaggctcccattatcattagtcctggttgctaacatggcctgacgattttttaaactgggactaaaaatgatctttagttctagttagtaacaaaagtttcgtgctgcttttttcaccatccagcaaagattagttttctagtagtgtttttattggacagagaagagagtttttttcatcttactctctttccttttatatgaaagaaacatgttgttggttttgcttatgtgagacggcaccaatcatcactcacaagttccaaaattctaactcatatatgatcgcaactaaagtgacatttgctctaattaatttctctctagaaagaaaatttaattatgacttgtcagcaaggaaacaaaaagtgagattaaggaaccgcacgttgtccataatctctctagcaccgggtatataaaatagtcacaacaaatgctggtcaaaatctaaaccacatggctgtaccttgggtggaataacaaattaaatttgcatctagggaagtgcctgttaaatatattgtaaactgctatgtgcaccgagcaacgcatgctacaagcaaaatggtggttaattaattgtggatgcatcatagctcaagttttgatttttgattactctttccacttaaaagattgaaaactagtttagagtacgcccaagttcgagctaaatactataaaaagccatttttcattgtaaatataagtatttttatgtcttattattatgtcgaagcggtctcttcgctactggagaacctatctttgttgggtcggccgaaaactacattagcttcggttccaataagaaccggaactaaaaatgtttcctagtcctggtttaaaacactaacagaactatgtgatctttagtttcggatggtgttacaaaccaggactaaagattatcttgacatttagtcccggttcatcccctggcctgtcaagggcctgtcaggaggccggagatctttagtcccagttggtaacacaaaccgggactaaagatccccactttagtcccagttggtaatattacacgggactaaatattatttagatctttaatcccggttgatgttaccaactgggactaaagattgccacctttttatacttcttcttcctcctccagcctgagccattgctataaattgaaggtgtaagggagggaggtgctgccaaaatttttggtgaaagtgttttagtgataatatacaaattgtagggatcgaaaaggttagcaactccattatctaatgatgtattcttggcatattacatttatagctttgtttctaaacaatattgtctccaacaaggtttatggtggaaaatgataagagagaaaatttgttatttcaaccgagactaaagatgagatctttagtcctagattttttttttgtcccggtttgcaatccgggactgtagggggttgcaaaccgggacaaataagggtttctccaccagtgcatcatatattgagttgagtttcaaggcgtttcttttcaacgaagatttgtttgatttgattttggtaggtcttcggtttaattgttaggagatatccatctcttgggcatatgttgaagataggcattgattctgagtgtgcgtgtgagtgtggtgtgtgcgcgtgaaagtttttctgtgtatttgaaagtggaataaattaaagttaaagaacatgtgtagcatcgtctggtgtgctgctccattatatatatcattaggccatcattgaatatatgctgatttatactgctcccttgccaaagaagacgaccttgactaggagctaagagaaaaaagagagaaccttagcattttctagtgcaaattaggttggtggctgtatgccctgtatgttgtatgtgacaagtttgatgagcccacgtttccatgtgtttctcccaattctaaatagagcactcgcgtgttgtgatggatctcggatacgtgcagatgaccttttttttcctcaaaatagtacaatatgatgcttatataaacatgcatatactcatctttataaaccccacacgcataccgtctctctataaaccccttcaaatgttagacctatataaaattgacgatatcactacagacgtatttcactgtctaaggaccaggtataccgcttagcactgaaagaaaaattaacctaaatgcatgagatacgttgagatacactcattttcgttgatgatttttttataaagacactattgagtgtcatttttagagaaatattgctctgatttctatcaagaaacatgcgctgagctattatcgtgtgactggagataccccatttagtgtaatttgttataaatatccttatgtatctgattttggggcaaaaatgtaaaaaaaaggagaaagaataaaaaaaaaatttctgcttatgcttgtcctttttcattcgactccgcctgagatatataacaaactgggtgaaagagcacaaattaaaggtaaaaatctatttgtgttctcacatggactagattttccttcgctttgctaactaacacgtttagcacatttggatccatcttgaggaagcttcctcgatcacacctacatccagttgcataataggttactgatagatgggaaaatatatggaaaacctgaaaactggcgtcgcattgtaaaaatcactcctggaaaagtgattttcgctgggtcggctgttttccacaatagtcccggttcttattttgatctttagatcatttttagtcctgttggtaatcctaattggtattaccaaccgagactaaaaatctatctttagtcccgattggagttaccaaccgggagtaaatatttctctcccatctctgatcggttaagtcccaaacgaaacttcctcctcacgagatacttagataagatcggatcatcccctctcttcctatccctcagatcttcttcctccttctcccctcccctctcctccccttcctcctcctcccctctcttcctcacatgcggcggcgtggcagcatgcgcagcgcgcggcggcggccggcggggccgcgcacggggcggtaggcgccggccgtggcgagcggcggcaggcggcggccatggaaggcagcagcgcgccagttctcctctccggttttttttataatttgtgattgagagatgtataatttttttttagaatttgtgatttattacatggatctgagatgtataatcgatctgtgatgcatttgatttgtgtgtaattttgtaagatttatgatgtatttgatttatgtgtaagtaatttaggatttgtatttgtgatgtgaatgatttgggatggtagtttgatttggggatttgggggttaatttgggtttatgcatggcacttgatttgggcatttggggttggatttgggtatatacatcccactcgaattgggagaaaataaaaagaaaatggactaaagatccctctctttagtcccggaaggaaacaccaaccgggactaaagatcgatctttactcccggttatttcacacgggactaaagatagcgatatttagtcttggattcgtagtcctggttggaaaacttggactacagggggttacaaactgggagtaaagatggtttctccaccagtgaataggcgtatgagatttgtccacgtcatcacgaacaaaaattatttttactcgtagttttactcatgacagtaaaacttttactcatggtgatgtggacaaatttcaaacatccatttttcgatctaacagtagtttttaggtttccataaaatatgtggttttcactccatattttttctagatagatagttaaggggttcttcttacaattttagtatcaattggttatctggattgaatccacagcttaggggggatattgaaattagtaatatgcccgtgctaaatgctactgtacaattctattgtctttaataattttaaattttcacattagcaaaaaaaatattttctataatctgtgcaccatgtcggcttaccttccttttttttttcctcactgtcagctcatctttaattttttttcttcctaatattttcctccctatctgttcggcttccattttttctccggtatatttaggctgttctctagatcgtgttctccaaaagaaacccctcccctccacgtacaaaacagaacaatgaatttacacattaattaagtataacctaaaaaacttacaaatagattaatatgattttaaagcaacttatatatatatatatatatatatatatatatatatattgttaaaaaaatgtcacgtataatagtttgggaaatgtagcggaaaatgagacactggaggttcggaacctcaataaacgaacacagccttactgatatttgacctcaaatgaaatttataaataaaacacaatacaatactacctcaggaaaaattaatagcatcgattttcattattcagatgtgccatcatctttcacaagtacaatacatagaaaattgagtatattcccgcaactataaagagtccaagaaaatataatttctgcatgttacgaatttggatgttctcttaggtcaattatattgatttttcatttggcttatgtatataaaaaaacttgatttttctatttgtcacacaaggcatacgtcggccactgctcactgagcacatagtatgagggcgtgaatattaagccaaataattagtagttgatatgaagcagatgtcaaatgaatagtttcaccatatataacaagatagcaattgttggttatctcgttaacgtcttctttcaagatctacatgatacgactactaaaaattatcgattataaaagtccatatttagatagacgtacgtgttaacatacagtcttgttatcaactcggtgcaaactgacgtatgtagcacaagatggtatctagaagataatcacacaatatttcacctgaaaggtgatgacttgctatctaaaataagaggatgttggtgagtaaaataagaggatgttggtgaacctgcctttgctcatggtcatgaacgtttttataaacgatattcctagtgctcttccctgtggggtatacttgtttctttggcttcgccaaaattcttaatggttgccttcccacacctcttgacaatgtgacagacaactgaccatgtgaaaacacgggatttagaagatagatcgcaacatttggaatggtttatccttatgattaattaatgacc

SEQ ID NO: 24091 - DNA, 8129 bp, Oryza sativa
caaaaatttaaaaaaaaattaagataatctttcgtcatagagcacttgagcttgcaagaagaaatatttaatgtctatgctattattgagataaaatgaataaaaaaggcgttgaatacgagaaagatcgatttgataatcctaaagatctgattatagtatagggtataaatatcttatttctgatcttctgtgtatgcttgtctttttgcacaaattaaaaggtaaaaatctatttgtgatttcatatggactagattttccttcgctttgctaactaacacatttagcacatttcaatccatcttgaggaagcttcgtcgatcacacttacatccagttgcataataggttactggtgatagatgggaaaatatatggaaaaatcctagaaactaacgttggattgaatagatggacatcgtaaattcgtccacgtcatcacgagtaaaaaattttctcgtagcacaagtaaaaaatattctcataggtttactcataaatagaaattttattggaagtaaaatttttactcatgatgatgtggacgaatttcagacatctatttttcgatccagcggtagtttctagatttccactaaatatgtggtttgtactacatattttcatattttcatagtttaagaggtatttcttacaattttactatcaatgggttatgtggattgaatccacagcttagggggcattattgaaataatggtttttatttacttcctaacacgccataatcacaaaattaatgttgtaaggcataatattcgaaggcccaaaatcatggcccatcctcgtgaataggcgggcctctgaaacaaagccgagtgcccatgtgcatttcacatctaaccattttgtctccaaatcatcatacggacctcctttttttttgccacttatcacaaaaaaaacgtccaaattggttcggtgtcgtccttatcaaccgagaaatttgtatatatatatatgccatcggaaaaaaaaaaaaacgttgatttcactaccataccatgtcaaatgtgcttcgataaatattctcgatcaaacgaagggtattcgctagcttgaaatgccattgtggacagtattgcccttgtatatgcttcctcccccctccaacgctagctggccattggtcgccgtcggctccggctgcagctcacgccgcccaccaccatctccgatgaacacccactgcacgggctccagcaacaaggctagctagctagctacctcacaacttcagccaggagctaggacaggaagaagcaagccggccagctgggccagaagcttctgcccgtacctcgtcctcgtcctgtaggctgtacctccacgggtgcctcgtcgtcgcctcagccgcggacaagctcgatcgggaacgaattctcctaccccacatattatgtgtgtgtgtgtgtgtgtgtgtgtgtgtgtgtgtatatatatatatatatatatatatatatatatatatatgcaggggcgaagtcaggatttttatatcagggatgctaagattttccgcaccattcatcgccgtggcatgatgatgaagttaagactgtgttacctcgacgtggttggaaactaatccctctaactcgcaaaacggagcgactcattagcgtataattaattatcagctattttttataaaagggattaatatgatttttttaaagcaactttcatattaaaatattttacaaaaaaacacaccgtttaaccgttcgaaaaacatgcacgcgaaaaacgagggaggtgaattgggaaagggagagaattgaataacacagcctaatggcatcggcagtgaataatgcccactagtgccataaggtgggcccacgtgggtccagtctttgtagctaataacactttctataatgtgtacagagcaaaggaggcattacggttggtcccatctaaataaaaaatcgtaccacttttcaactgccacttcctttcttctccccctcctcctcctcctcatctgatccctttcttctctcacatcctgggcggtggactcacgggcgaggtcggctccggtggtggcggcgctcgtgggcgtggctggatccggcggcgggactcggcactcacgggcatggtggatccggcaacagcagcgacgcccgtgggaggaagaggaggttcgcggcggcgcccacgggtggaggcggaggtagcgaccgcgggaggaggcagcggcagcggcgcccacaccaatggctcatgggcagaactcccctcgcgggagaaggcgacggcggcgtcgacctgcgcgaggaggctgtggcagcggctcgcacgaatccacgacagtggctgcggactgcgatggcgctatccagtagtcctccggtggcatgggagactgtggctattgtgggcggatctctggcggtctcctcccgtgggtgccctcctctcattcccggtggcacggcaagcaatagattggttagagagagagaaagaggagagttccatgagagagaaataatgagtttgttattccatatgggcaggcattagctataaggatgactcatccaaacaatacctatgatgactacttgcacaatgtgtaaagactacttgataagcttaataccctctatattttcacattgtagatgccttaagaggtttccggtttgtaagagctattttatatagaaaaattattacatgtataaaaatatattacaagtttccggcgacgggcctccgcttcactccggcaaaagctaacctttaaagatgtgcaaatgaatttggatcacaactcaacaaactccaccttgagacaaattccttcttgtagtataaatcaatccttcaccctgaacacaacaaagaaaaaacacttccggcgtcaaatagcctcttgggctaaaccactatacaaactaagcttgagcaaagctcaaccttagcaacaggaactggctttgtcatcatatcagcaggattatcttgagtgcttatcttatacctttagcttaccttgtgcgactacatcacgaacattgttgtcgaatgacaactgcgtcacgtcgaagaacgtggaatttggatggaaaagtagtattgacttaataaaatttttgggatcccccgttacatggccctagggggctatttatagccctagtacaagctgttaccctctagggtttattgtttaccggggatattacataaatgcccttatgatgatgacatttacaggggtaaccaattcctattgagttgtggacctcctaacagtcttcttgggccggaccatgaaagtggcgaacaacctttttgggccaggctcgtgcgaagctgcatccctgcttcgccatgggcttggccattgtaccccgccaatgggcttcaccatgggctatgctttgccatgggttccgccttcatgcttcgccacgggctctgccttcatccaaacttggcttctggccgctttgccgttccttaatagtttcggcaggtttgggcaaaggccctcgcgacatgcctccaacgaacataatggtacttgatatcaatgtgctttttcctctcatggaacatctgatctttagtgaggtatatggactttgactgtcacaaaacaggttaatgcaagaatcaactccacaaagctcagcaaacaatcctttcagccaaactgattccttacatgcttcagcaataaccatgtattttgcttcagtggtagactgggcaacaacaggctgcaatgttgccttccaactcacagcacaactaccaatagtaaacacattacctgtgagtgatcttcgcttatccaaatcagaaagaaaatttgaatccacatagccaacaagtcccttatcagtcctgccaaacttcaagcaagccgctgtcgtgcctccaaggtacctgaaaatccactaaacagccttccagtgttctttgctaggatgagccatgtatctactaaccaaactcatagcatgagataaatctggacgagagcaaaccatagcatacatcaaagaaccaacagcactagaatatggaacccttggcatgtattctacctccttatcagtactagcacattataaggctgataatttaaaataaggtgcaataggggtactaacaggctttgcatcatgcatgttgaaaggttgaagaactttcttaatgtaactttgctaactaagaaataacaaaccagaatatcgggttctagtaatttccatacctaaaattttgttcacagtgccaagatctttcaattcaaattcattattcaactgtttttccaaggaagtaattttttcctggtttttgacagcaatcagcatatcttcaacatatgccagtaagtatataggtgatccattaataaatttaatgtacacccaggtatcatattcagacttcttaaagccatgtgccaacataaatgaatcaacccttttataccattaacgagaaaactgtttcaaaccatataaggatattttcaaattgcaaatataatcctccttaccaggtactatgaaccctcttggctggtctatgtatatctgctccgcaagctctccatgtaaaaattatgtcttcatatctaactgctcaagctcaagatcatgcatagtaacaatactgaagaatgtacaaattgaattatgctttacaactggagagaacacattactataatcacactagtaatctaactgaagccttttgctactaaccttgccttaaaccttggaggctcactgagagataaaccctcctttctcttgaagatccatttgcaacggacagtcttcttctgttttggcaagcgcacaagctcccatgtgtcattcttctcgagagattgcatctcctcctgcatagttgagatccacttttcacgatcaccagaaacaacagcttcagtgtatgcagccggctcatgagtgttcttcacctgcttagcacaattaaaagcataataaaccatatcacattcctcaatcagacggactagagctccacaactcctctttgttctacgatgtgcaataggttgatcttgtggctgcaaaacagggggtgagtgctgaacagtatcatgaacatcattatcaacaatttcagtttcctgatcatccatgtgctccacctgcacgttgacatattgctgctcctcattagaaccacctggtataacatctgtggacaagctatcattaaacataacatattcattgaaaacaacactcctactcaagaaagtccttttattttcaggattccataacttatatccttttactcttgaaccagtggcggatccagcatgggggtggcggggtctcgaacccccactactggcgtgaagactatgagagaccccacgaagaccccactaaaattttttaccatatgtaaatgggagggtggactgtaactttatttaatttgctcagaccccactgctatttatttctagatccgccactgttttgaaccataaccaagaaacaaacacttaatagttttaggctctaattttccattatcaacatgagcataagcagtggcagccaaaaactctcaactgtgaataatcagcaggcataccagaccatactttaatgggagttttcttattaagtgggatagaaggcaacctgttgatcaagtagcaggcggtgttagcagcctctgcccaaaaacacttgttcatatgagcattggacagcatacaacgagccatcgagatgatggttctattcatgcactcggccacaccattctgttgcggagtgtacgggatggtgtgatgcctaacgatgccttctttcctgcagtaatcatcaaaagcatccgaacagaattcaccaccattgtcaatgcgaagtacttttacctccttttcaatttgtctttttatcataactttccactctttaaaagcaacaaaagtatcatctttatttttcaggaaataagtccacacttttctagagtaatcatcgataatggtaagcatataacgagcacaaccattagagggcttacgagaaggcccccacaaatcagcatgcaaataatcaagtatacctttggtgcgatgaacagaggtattgaattttaccctcttgtccttaccaaaaacacagtgctcacataacttcatgttaccctgagtacaaccatccagcaggttcctcttcatcaattttgccataccaaattcactcatatgtccaagacgcatatgccataggttagtattactaggttcattattagaaacaatagcagcggaaacagaaccatgtaatgtacttcctctaaggacatataactttgcagaattcagatcacctatcatataaacaagagaaccttttgatacctttacaactccacctgaaccggagtatttgtatccttctgcatcaagtctggtaagagagatgagatttctcgccatccctagtatgtgtctcacaactttcatcatgtgtgccatgccatcatgcgtccacgatctaacgcgggttgtcatctcccatatgcacgacatctccattctgcacagatgttggtatttcttaacgatattactagaaatataattcccagcaatggcgcagaaaaacttctggtatattgcggttacagagttcatccgcaagcgcacggatataccattgtagcatttcacccgagagtattccaagggtatcatatttgtttaatcccgtgggaagattataatagagataatcgtactaaagtctaatttatatattacttgttacaaccaaagtctaagcaggggttaatgtaattcagagagtatagtgacactaagcagaagcattcatacactcattcacaattatataagttaagtggaaaaaatatagaaatatcttattcctatacttcatattatacatacatattatacatacatcctagttatagcattacttagctaataccctctttccgatgccctcctggtgcttcgagaagccacccctgattgccgagtttcttacgacaatccgtcatgaacatccaaccggggctaaatacggaggagtaccctccccaggaaattaacttaggactatatacacgcgcggaggaatacccgtactaagctgtcaccatcagcggcccacctcgcttccatagcatataaccctaaataatgatatccagtaatctaaacaccacgcttaaattaccaaatactactctaatatcatcgtcatgacatagagtcatcgtaaatacgatcattatacccacaccattgcatctcccagataagctagcatcgtaataaatataacttggacatataataaagttggtattcatatactcggaaagtaatataataccgcaatagtataaaaaagaatattctaataaaagtacaagtcttacaaaagaagtaaaagctactagagccatacccgaattcttcctaagactccgaggactgaagattctatttctatttctattccactatactctacagactatactaaacttaagaaatgtatgaagcttcttgcttgaggtgtgtggagaaatggagagagtgaagtccttttatagcctcctaatgacggttgtgatagttggaatggtcggaaatgccttccaaccgtcattgggatgcaatcctggatgtacacgccgaactctggcctcaacgatggagatgggggttcggccgaaccatgggctggtccaatctagcccatttttggccggcggccacctggacttcttctctttgcagacttgtgaattttggcccaattgatcatgtcatttatgagttcttgtcccatttattgataagtctgattctcgacatcgttcgattgattgatcgcctgttttgatgtcgattcccctccattttatgtttattccctgcaagaggttagtaatcctagtgctagtggaatatttattattaaacataaatatgcattgcaagcattactagttctcctttattttggtagtattgacggtcaaaactaatcgctaacgaccgtcaacaacagacttgtaag

SEQ ID NO: 24092 - DNA, 32239 bp, Oryza sativa
gtccacagataaatccgcaagcgcacggaataccgctgtagcacttcactttcgggtgaccccaaaaggatatcaaactcagggaacgtgtgtaatttagctaaggctaagactatccaaggacaacaactgatgataggcaggctagagaggtcttcctatgtgttttatttacctaagctaagttgaaggtaatttcctatctgttgcttcgggcaccgacccctgctggtctgccagcgtggttccggctatagctctatgatgtatccgtacgtggaggattactgggatgagattcagggctgtcaccacctgccgcctacctctgacaaatccgtgggatacacaacaaacaaaggtaatctctaacctagacaccacatctaagttattaattactactctaatatttgctcaggaacttccttttctatccagagtcctagaactagagcgcttagtacgaatactaaacaatgaactcgcaaagatggaaatatatcttactcagaccaaataattaaataacataagaaaggatcacgaatgcttacttaacagaagaagttctccgaacccggagcagagtgtaccgacagctccggtactcctccagaattcctcctaggaagctacactcgtcgaggtagaagtcggatgagcgccaaacttccgggcactcctctagagcttcccctcactctataccttattctagtgtacaaaagatacaatagagcctcttgtaattcatctcaaaattgtgtgttggaaatgagagtgagctcctccttttataggcaggtatgacggttacagcctatgcgaaatgaccaaactaccccggaaccgccatcaggaagtaatcagggccgtccacatcaaatttggcgatcaacggccaccaaaagggttcggccgaaccagggacggctccgttcggcccgttttttgtcgtggacactaattttgaggccctcagcccattggcatgatagttgggcccatttggagttgtttaattgacttacgaggcctccaatccgtgtaaatgtgtcctgaatgcgcggaggtgcagtttgtcacttgacggatgtgttttcttctcaaaatacctgcatacacatatttcaccaacactagtggaaatcattagtaataatacctaccactaagttggataccatgttttatttcattatatgtaggtattgacggtcagatattatgatttaaggaccgtcaacaacaaccagcaaaaacgacaagacagtcccttgaatcagagttttcagcacccgagacgacagaggccttatcatcggatttccttttctccttattctgcagtttccaatattcttcagtgaagtgatttttcttcttgcagtacttacagaacttcttacctctggactttgaatgacctctatcattctagctcttgtcatgatcgttgatgtcgttgtaggttctctgctcagatctgcctctgacctgcaatgcttcgcccttggaggacaacacgtcagactgaaccatacctttcatcttttccctattctagagtgccttataaacttccgaaagggttagttcgtcacggcttaatagtatggtgtcacagaaatttgcatataaactaggcagttagcataacaggagaagacctaaatcttcatcatcaaactgtacctccatcgacactaggttggcaacaatctccttgaagaccgatatgtggttcaacactaaaccagtcttctgtaacttctgcgagaataacttcatcttcatatgcctcttactggttagatccttagatccatagatcgattctagtttgagccaaagttctacagcagttcgttcctgcaacacttcttgcaaaatatcattacatagatgaagttgaatcaacgacagaaccttacaatctttccgcttcttctcagcggtccattcatccttcttcttcttcccgaagctttccagcgcctcatcaagatccgaagattgcaccagaacagcccgcatcttaacttgccacagtgagaatcttgtcttgtagtctagcagcggtagatcatacttcatcgatgccatcgcggaaccctcgtgtgagaacaagctctgataccacttgttaggaaacgataggcaaataaacgataaagaaaatagatcaatcacagaagacatgagatttaacgtggaaaaccctcccaaagcaggagagaaaaaatcacgggcgccagctagaaaaatatcttcactatatcggggtgaggttacaacaccgaacagcggcttacaagaagtatatatgaaggtgaaaccctccggcgacaggcctccacttcgctccggcagaagctggcctttatatatgtgaaaatgaatttggatcacaactcaacaggaacgagttctggacttctagtcgcctcgtcgacgatgagctaaaggtttagggcaaggcgtattacaaatgggttgatggagagcaggttggcaggggacgctggctcgtcctatgcttgacggaggacggcggcggtggcggccaagatggcgggctccgtcatcggacgatgacatgacatagagaggaatggtcaacgttggaaggaagtggaagaaggaagatgaagatccaagggcaataccatccacgatgcattctagcaagaacaccctccgttcaaccatggcacttatcgaagcattttagcgaagccagctatttttgatggcacatataccgatttctccctctcaaccccctccatgaagacttaaatagttaattcatttgtaataaatcaattccattactgtaatgggcagtgtagcctagtggttgcagtgacttgagtagcacctaaaagtcttgagttcaaatctccataggagcgaatttcagattgggttcctaatttaaaaaggttgcatatatccagttgatgctctctatcacaccatcttagagcaattgctataaaacctttaaactgtcatataaactcaaacaataagttagaggagagagaagaaatcgtccattatgtaaagggtaatctcaatatataaacttcaaaaaagatcaaagaagaaggtcaataaattgaaagataaagaaggaaaaaaatattgtagtctattaggacaaattgcttgagataatatgttgagcgtgtcacttcttaattaactaatgagtagataatgtggataaaactggagatgattatattacctttacttataaaacttgttcttagatgtcagcggtgagcctattttgtatcttggcacatatcagtagcatcacttttaccatctttacataatccctctcaaaagattcaccgtttaccacatgctatgcataaattaaaactgcacattaaaaataatctgttatatatgcgtggcattttaatgaattttatcaatggactgataacagaaaacacagtcaaatctcgtaaattttggaccattcgattgatttaagatttacgcacactccctagccctaacctcctccctcttatccttcttcctccctctacgccgccaatgcacgacgataagcacacactccctgcctccagttccaccgccagctgccgaaacgcacaaacagtgtcatttggcccctccccccttcctccttcccctttcctccctcttctcctcctcaagccgacggcagcgaggtactcccatccttagcgtctttcttgtctccgacgagggtcatcggatctatcacctacaaccgttatcaacatcagtccaccacctgctaccaaccttgtggctttggcgccgacacctgtgcctcgcagtccgcctactccgccgcccatcatcaagccaccacctctcactcttgtgtccatctaaaggctgcgaactcattctctttccttcttcttactccgatctctaaatcaggaccataatccatatgtccttcttcggaattcatggtgtctccggagaagaagaagagaaggttgttggagttgaacaacaagggtttagagtacgagccacaaaactcatccgatggcctaaattaggtaatatttggggatggattttttatcgacgaaaggttagtaattccgttccataaacatccatacgaataaattaaatggaaatcattccctaaatctttcatatagcattaacttctcttttctcttttagacgcaaaatttaaaagcttattaatttctaccacgattttattataaataaaaggagactccaactctcgaaggaacgaaccgagaaaagaaaacagaagaaaatcaaagaagcggtgcgagaaaggggaaagaaaggaggtgcctttccatggcggccgagggttccagccgcggcggcggcggcggccggaaagcctcctggctggggatgtcatcggagggcggcgcggccaagttcctgtctggcttgccgtcgcgcggcaatttctcctcgatctccgcctcttccactctcgtacgcacgcccaatccctgactaaaacccccacaaatgatgtactttttttttaatttcccttttggcgttaagattcttgttgaattctcatggagggtgagaggattctgagatgaatttctttggctgtgatctgcgcagggacggctcagggtttacgtctgcgagcatgacacggatcctccaggtcagtgggagattcattcttgtagagattttgtagtagtatgttgtatttctgttaactcagaatgctctattttgctagcttcttaggttaatgttttaggtttttcatgtagtggttgtggtgttttgtgtgtggaggcttcgattgatggaagctgtctttaggattccacatgtccactagtatctgtggaattataagttttttttcttcttcttcttctagggtttatgtgtattttgcttaaagtataaagtaagaccgatgagtaaattctagtgtgctaaaaagcatgtacaagtgttgttttcactgtttaggatttgtagcgaatctagtgtcgctgtttatttaaaatgtctgcactgagaatctgtgctgagttgctcttagattatgtgcctcaatgcacatgaattttagtttttcatcgcgattcgttgcactcaatgcagccagtatgacggaactttggttcttggagttaatgcagtttcttcctttcaattttcattcattcttttaggttaagttttggtaatttagttgtaaatctatgatgtttctagatgaaactacagtagatggttactgcagaaatttcttccatagaaaaggttcttcccaagggactgttgtttctgttatacgctgtaccaatgcacaatttaggctttaatgttagaaatcatggaaactcgcagctctcctattttactgtgttctagtcaaaacaaattgaaatggagctctgcattggcagtaggtcttggggataggagttggtggagaatatcaccttgatgggttgttcacctgcttcatatgttttgtggctataatttgctggcagattcattaaaattttaactgtttaatctcttttctgtttagagggacaagttatagagaccgatacaacaaatattttgatcagacatctccagctaaagaaaaaggagatggatgccaaagaagccaaagaggccagagatgcaggttctaggaaccaaggggaaaccgtcaaatggaaaaggtaaatctgccaaattgacagtatgtgttttacagtgccttattggagcatccttttattactaattaccatgtcattccatgctttatatggactatggtactcttgttacatatgagatggctcatcccttgcagcacctttctattttattttgttctggtctttttctatgggtattatgtgattcattaatttttaggccatgtatttaggggtcttacaacacccatttgatcttgaagcataatgtaacatccttgccctaattcctgggtaagtcccatggagtttcagtaaattaatgagcagttgctgttggaattttctgtgcttaagaaagctctatggattttcagcataccatgctttattagtttagttggtttgcatacctacatcagttttcaactaagtctcatatttgtgaatgactttaccattggtggagattgaagagcagctgccataattattgaatggccaaatttgacctgtctagcttgaccctacttcaatgtcatgtgcttattggggcaaagcaggctctactattctacatttctagtcatatatgaaaaaaaaagtttatgagaccgagccttttcccctgacaatttcacttgttttttacattatcggcattgactggatttgaattccataaatctgattagttcacaatgatttgaatccactgccaaaagtaatatatggatttatgaacatggtatttttcttaccgggttacatatgattggtgagcatggcactaaattaggttgttcagcctttatggtgtaaccatacaatttggctccattctgggtactaataattctttatggaatgttttaggcctagcaccctttaaaaataccaagtctaaactcaaattgtttaaaaggaaaagatgagataagttcctattaacagtaagtagaagcacctgccactttttttgctttttccttttgatcctttttgcagagaatttctcattttgttattataggatgaattgtaacttggttttattcatttctgatgtatatacaaatatgtagttttatttggaatctgtcatgtcaacttggtgcacaaacaatactagattacaagtttacaaataaaggaagagttacagctggtgaattgttgctcttcactaacaagttatatgttgcgttccacgacttagaaagctggctagattaggttaatccatatagtgtttaatttagttgaattataacattcttttccacagcctcttgaattatcctgaaaaaccacacaaagagcaaattatccaaactcttctagtatatctattgatctttttttttctcgaaaaattaggaggaataggcttcatttcattaagaagaaaaggaaatttacacaggagagagacggaaaggatcctccacccaaacacgtcacacaaaagacaccaccaaaaccccaactaagcacctggggcagcgacctcacaaccccaactattttgtcattttgaataaattagtatcttgtacatttgtgagaagaacaacagatagtttttatttcttcagactctttacaggattaaatcctttagtagaaggtacccactgtagtggcctacagaacaaccaagtacaaccctaaccatagaggtaatctcccaccatgcagcattaaatttgtgggaacctaataaaacatatgaatcttccatttatccattacagatcatgttactgtttgtatcatgctatgaagccacatacgctctaagcgatttattggagtgatttctttcatacttctatgctgatgctgacgaatagcttggccattcagtgatccaggattaatacaagttctttgagtcatacctacttgtcctcatgaaactgtttatccttcttggttgcttattacttgggatgatatgactatataaattaggtctggaagtaattatttttccttttttgtttgactagagttgctcccagaagtttggatggccaaagttcatctaaaaggcccaatttgggtagctcctctgggctgtcttctgctggtaagttgtctaagtcttagtcttccagtttgggcatttgtgaatgtctgatacttgataatgctaagatacgaatagagagaataatgtttcatttattagcattttgttgaggaaaaagagagtaaaggatatcaattgtccagatttacctgaagccaaccctttttcaagcttctacccaaaaagaaaaaagaaagaaagtggccagagttaccaccttccattgaactttttgccacgactgtccacttgaatttgtgaagtgcccaaccaggaggaatgctttgccttgttctaggtttacaactttacatgttaagccactaactgtctttctattttaaggccccattcgtttgcttagtttggaggagcttttcagccgctgtgaaatgagaaagcccattagcacatgattaattaagtattaactattataaacttgaaaaatggatttatttgattttttttaaaaaaaacttttctataaaaagtttttgcaaaaacgcgccatttaatagtttgaaaagtgtgctgatggaaaacaaggaagttgtagtttggagttgaagaaaagaactaggcctgaatttaagatcagtaatatgctgatgcatgctttagcattttaaaagaagacaaaaacatgctcatgtacagtctcacaattcctctaataactttaataaactttcatattgcagaagaagcggcacctggattttcaggtcacacactacagacattcacagttgagaggttgcgtgcacttctgcgacagaggggcctcatgaccaaagggaaaaaggcaagcaaaaattgtcgttccaagttctcttgttctaaatttaagtggtttcatgcttttaattctgtcactagtatatgtatttgaatttttgcttgtagaatttattttagtagaatgtcagctaagatgactggatatccaccatttttgaacgtttggatgattctgtagtgtctgacacctgatattttcctaggaagcttagtcagttacagaatttgtccattagtattccaaatgttccctcaggacttattcgttgcatggcatatggtaggattttgtttctgtagaagcttcataattttttagtgaaagttggctttacaaaataaaatgaatgggatgataagagcctgagctttgtcatgtaactgcagtattgtgcctaatagattattttaagaacaaaatatagaagttcccaaaacaagcttcttctagagatgcttgtgttgtcagtaggctgttgcttttttctttcagtggcagcacattatggtttttgttatatttacactatttgattttgacgccgcggatgtggcattagtaaatgaactttcttgttaataaagcattgacagtcttcattcttgcacattagaaaataacacaggttcccaaataagaattattttcacataattgatcatgcctacattgatctacctaggccataatcttttgtgcgagaagtgtattcaattttttgatgtatgatgtccttcctactgcaggatgaactcatcgctcgcttaagagaatcacaggactgatctagagaaagctcgtgccgtactctctttgtaggttgatgcaatgtgtttcctgatttgctatgtcaagctttgctgggagcagaatgagaaccaggcttcatctgttggctggatgttaaggctctaggagatgtagtcacttaggttgggccttgagaacttgtgcctaattgcattagcttgtcagaaatttgggcttgggttccctgtttgttagggcttatccagtgctttacttggtacatgtagaaggctaatctggcagtgtttgtaaccttttgtctcatactggaggagttaccatgctaatttacaagcatagttaaaagctaatcgtaccatgtttgaccaattgagctatggaagaaagcataggcgtgaacccagctcagaagtgaatggcagatagcaaaaaagaatagacttggaaatggaaaaaaatggagcgaaacaaaggcatacaaattggaaaatcagcaggaaatgtgctgattactcgtatcgattgctttaggaaatatcgcagtcttgagcagataaattctttttgtgtgtgtgatctcaattctacattgtgttaggtgcaaacatcacttctttaacctaatgcttcctgcaactcgagctgttttattgggtggctgcaaattgcaatttactacttatcttccaacttataaccctgaaagaacagcattacagaggccgtttcttcctatgtttgcccctttatttcttactccctccgtttcacaatgtaagtcattctagtatttttcacattcatatatatctatctagattcattaatatcaatattaatgtataaaatgctagaatgacttaaattgtgaaacgaaggaagtatatgctttgctgcgagatagaaaatatggaatacaaaggagcctcagtaaactagaagcaaacagtcgtagagatggtccaaagtagtggtcatctgtcaattgtcatcctctcagattttaaattttttgctgatattttttttctgattttaaatgtcatctgtcaattgtcatcacttataaatcttttgctgattatctttgtattttttttctatgacaaatggaatagtttcaacagaaaattagacaaaagacagtacaatcaaaataaaattgggttttactccctctatcccatattaagttcacttttggttactctcattcttagtaatcatcgcattggagtttgtgaaagtagggaataattaaattgaatgtaaataaagtggggaataattatattgggatttgataaagtaggagcattatagtttttttagtgtttgtattggtatgtgtgagaccgttgaaagatttaacttattttaggatggagatagttgtaattataaactagcatattatcagtaaatgacagttgggaataaaaggtctccttctcattggtggtgtatagcttttggcattatcaactgttcaactccctgtcagtcaagtttgtcacctttttcttttgtgttgtgattattgattacttcttatatttgttatctatgcaaacgctttgcacaaacataaagctgtcgcagttggcagaatttgtgttgcttctgtgccattgaaagtttcaatcaattggcatcactgactgctacactgcagctgtgcctgttcttttccatctagatctagaatcggatgtaacatatcctaatattataaatcggtactgtgttggttttttatgggacgaagggagtacacttcttctagctactaaatgctatatttttcttaaaaaactttctacatatatatttcttaaagttattattttaaatctattttttaactttataatagttaatttatccgtttgtacctctcgaatcattcatctattaagtattccattcaggtcaaaagaagacacccaattgaagtaaaacatgctagctgtatgatactttataatatatgattagtgtattttgcttgcacttggatgaaggggctattttaatattagaaaagattttgactaatggtgatgcctcgcttcgggatctgctcaaaatatgtttcttcttttctaaaaattgtttttgggtacagatggaccgtgtaaacagatcattgttcaaagccaactaggaaagtaaaataaaaattatttacatgttaaatgttaatgactagttattgactgctgatgaatgtgtttaacatgtgaattatatattatgaaaatatttctaataataaatctaaaagtataaattttatgatgttaaactatataagtttatagaaatctatggtcaaagattaaaatgttacttaaaataaaaacaatcctaggacgataaataatttgaaattgagggagtaccgtgtttgtactctagcagtctgactctaaataattgaacaatcatgaaaacttggccagagaacacaatccaataagtaaggcccccaagcttaaagttattccaaataatgtatttgactgatcattctgcaagcagtgaatatatatatatatatatatatatatatatatatatatatatatatatatatatatatatatatatatatatatatatatatatatatatatataatttatttggtgctctatggtgcccgggctacatgattcaaattgggtatatactcaattcaaatgagtatgaaatttttaaaatgtttaggtattaacattaactactttactaactagttcaaaacaagtttaaactaaatttaaacttgtttttgttagattttgattctaggtatataggatccaatcatataattagttgggtatgtaatcatggattgtgaaataaagttaaatttgagttgctttgtttataggtataggtatgaatcgaattcttataactaggtatatactcataatttaaaaattttgaaaaatttaagtgaatttttatattttataccatggtgccccatatgggtgtcctatatatatatatatacatacgtatatacgtatatatacgtatatacgtatatatatacgtatatatatacatacgtatatatatatacgtatatatatatatacatatatacgtatatacgtatatatatatatatatatatgaatctcaagtgaagtcaatataagaaaacgttttagaatcaaaaaaagaagaagaaagagaacatttcaatctgcaaatttccctcatgtacttcttgtttcatgcattccattccatgttactccgtgaacattcctgatcatccacactatttggcattgtatttctctgaccaatgagatcacgacaagtgcaaacgaaaaaactggcaacatctacatatgctctcccatgtgcattttgcagttttgactgcatcaatccatccaacacaaacactgtatatcttcatcttgtgctgccatttcagtttttaggagtggtcagtcctggcttgcacagaaaaaaaaaaagaccgtgaatggtcactcacaggtggggcctagccgcctaggaccaaccagccaaacccagcatgaggaaagccacccatagatatagcagcctacttacacataaaaataagagcttatcataataagataagacatgactagaaattacatattcagcttaccagggtttaagtcctaaattcagtgcatttttcaaaagaaattctaacactttccgaacgaatcatctgaaacaacacacctagaactctcatctcgagctggctcaagcgagattataaaccctcattggtactcgtgagcttccatttcagtttttaggagtggtcagtccttacttgcacaggcgaaaaaaaaaaaggccgtgaacagtcactcacaggtggggcctaggacgatccagccaaacccagcgggagaaaagccacccatacacatagcaacctacttacacataataaaaataagagcttatcataataaatgagccattggttatatattcagcttatcaggatttaagtcctaaatttgatgtatttttccaaagaaattgtaacacattccgaacgaaccatccgaaacacctgaaactctcatctcgaactggctggggacgtccaaaatccacgagactcgagtgagatctcgcgacatcataaaccctcgttggtaacagtttacaccaatttcaagacacgtgtataaaaatatgcacgcggctactacgaacacggtgcgtgtgtggttgtgtgcgcgcatcgtccagagcgaaaagtacactccataagagaggctggggattagatgataaaactaaaactaaacaaacagagcctgggctgtgggccattcttggcttggatttactgggacagttcttccctcttggatcaggaattcaggaggggggagcttttggccgaattgatcaggaaagatgcagctagctgcagcgttgcggtggaccaccggacggccggcgacgaccactggttgtaccgtggtgatggcatgtcccggcatgggaagctagcaagtgcatttcagatttttccaggtcccctcttctgctctgttgctgttgctgtgtgtgtctctttgttttttatgcttgttcatcggtcatatgctaagggaatcttttaatgctgatatatgaaggcccatgtgttagagcaggtacaatagcaggctataagcaagttataaacatattttaaagagataaaagaagatagagaagagcagcgggctacaaatctgtagccaactgcagcacggactccaaaacgtaatgcgtgtatgacaggtaggaccagacattaataatatagtaagaactattgtatgaattggctatagataaattggagctagtagttggctatactattaaacttgctcttagtgtgggtgggtgggggtggaagagtcttctctccaagagtaggactatcatttttctagtggttttatagggtttttcaccaatttattttttcacaggtttggaaaatagtttttcgaaatctaaaataggcctgagattcaagatactggggataaatacgaacttcattataggttgctaagtgtcatgtgtaagatagtatatgagttggcagctcttaaccacaacataccatgttgtaagctaaaagatttgtaaaataagattgttcacttttttttttagtattatcaaaagttcacacttagtaagataaatcaggtggctatacaggcatagatgccacacgaacaaacggagaaaatttttgtacattatatctagaagaggcagtatgttgaaccacatcttggattaggagggtggccggctgactcagcaccaacgagtgccattgttcgttgctgtaaaccgctcttacatgcttcatcttggtttgatggccacacaaatttaaatgaagatcaggaactgaattttctctttttatatataggtgtatgatgttgtgccctgttttatctaatcaaaagggtttcttaccactatgaaaataaactgtaaggcgcgttgatatcactatcaaatgcacaacctttttttttttaagagtgaacttcataaaactataactattttatcaaaaatgttagtatgctgaaaatttagctagacattttagagaacgacaataatattatataattttattagaaaacctcatctttacatctttgacaagtttgggtctcctgaaatacttgtgctcttgcatcccacatgacatacacacataggagataaaattatagttttgtaataaaatcgtccactattgttgcggttttgtaaaatacattcccttaaaattatagcaaaatgatagttttcatcaaacaattatagttttgtaaagtccacttttttaaaaaaaataatgaaactagtacatgcatgtacatctcgatggccagtgcattgtgtagtatttcctttaggctgataatccttgtcgttttagacaaggctattgttaaactaaaaaactttgactataaataatatttaaaacatttgtcaaataaatatggctcccatatgtataggttgatcttaaaaagtgctctgataaaattatatacttattgatatttctatatatatatatatatatatatatagagtaataaaaaatagttatcaaatttattttttgaaactgtgtccttgttcaaaatgataagtattattagtccggagggagtagtataatccaaagttcaaactctttgtttaatatagaaaaaccttgctttttgactgacatatttcctccgtcctaaaataaatcatcttatagagtttattttttttcaaaataaatcaacttctacattcttacctaccattggtctacaaataaaaaaaattatttcttcaataccctttacctatccacccatgcattaatataagtttataattaattaggggtatttgggtcgtccattttgggaatttaggtttgaagtatttgtggaacagatcgagggattatttctctagctatctagctaattaattcgattcattcatcagtttttatttgtagggataaatgagccatgtctgtactgcaaactgcaaacatggataggtcaaaaaccaaagtccacaatagctgaacagctagcggcgacaaggttccttccacgctatgaataagggtgctgcatggcacggcaaaatcatagtacgtaagtacatgctacatgcatattatgattgcatgctggttcacatgcggccattatatactccctccatcacataatataaaggattttaagttttttttacattgtttgatcagtcatattattcaaaaagattgtgcaaatataaaaaaacgaacagttgtgcttaaaatactttggataataaagtaagtcaaaaaaataataataattccaaaattttttgaataagacgagtggtcaaacagtgtaagcaaaaactcaaaaccccttatattatgagacggacggagtatatccgagtgcaacaagaaaccatcatatgattttttttttctttgtgatgaacaagcctgccattttttagtgctactttatttggggacaaaaaggttccaagaaaaaaaaaacatgagggaactaattatacctagtaccccaacaaagttagggtatgtctaataatagagtcaattatcattatttatcaataagttatgaaaaaaaaccatcgcatcgttatttacctttatttctaaaaaatgaaaactattttttaattagcacccgctggctaggcaatagcaatatgtaggaaggtccttatattgtttttccataaagctcctagcatattacagatttatggtaagtttatcgtacatgttggggtttttttttatagagacaattagacaaacatttatatgttatactcaaccatcattttttcattgtgtttcaactgtttctaagattaatttgaaggttaccactcatctagtttgccagagtactccaaattctttcgaacagtgagcctatatcttgcaaaaaaaaaaaaaaaaaaaggaaaagaaaagaggaccgctctttccagccttggacacataggatccacagtaaagtttgcaccccgagatggatctagcatagaggcggcgggatctcgagcttccactactggcgtgaggatagatgattgatgctattaacttcttgatacacatttgatcattcatcttattaaaaattacataactattagtatttattttgtcgtgatttgatttatcattaaagaaaatatgacttacattttcaataaaaaaattaaataaaacgaaatgaccaacttatgtaaagaaatcaacagtatcatctatcaaaacagctattgcattttggtcatcaatatgcaactgggcattacttaggacatcaatgcaagcgaagagaaacacagctagctgccgtgctcattgcgtagtagagtaactggccattgcattttggagtaaatggattgatataattttttaaagtaattctcatataaaaaattttgtaaaaaagcattatttaataattttaaaagaaaaacaatgaaggtgaattggaaaagaaggacatgaagacacggaccattatatcttgtctcacttgagcattgcagccattgtgtagctagcaattagctaggcattcaggtttgcagagtaacaatcatggctttgatttgacacggcatctgtgtcatgcgtgcttttcttttaggactgacggatacgtgtacggtatacgcttccatcaccacaactggctacagctactactgtgtatcctacgcgtgtgccctggacagacagacacaaggcatgtctcggataggagtggctgcgttcgttgccttgaacttgagggaaattttctcgcactccaaacaaaagaaactcgttatcatatgattaattaagtattatttttttattttatattaaatttatttttagcttctttcatttatcttaaaataaatttatttttttaattattgaagaacttttaaaattacagaataattatatttggagtagataaagtgatcaatagttgtattgggatttgattaaaataggggtgttctagtctttttctgcaaatacactatccgtcctaaaatataataatttttagccctcagaatttatcccaaaatattaacaacttttccaccaacattctcttcccaaccaatcacaaccctccaccattcacttttcctatctacctccacactccccatccaatcacaaccctctaccattcacttctacctattttcttaataatcatgtccaactctaaaactttttatattctgggacagagggagtagaacataccatttcgtctctccacattttatactcgtattgcttatatactacttgcagagagtaacttttgccggtctttcaattgatgttcttgaattaatacacggatcactctggtttaacactttcaggagaagaatatgtgtccatctcaggaggtcgtgcccatgttaggatggcaatttccctattggaggtaggtacccgcccctacggggacgggacggggctggttttccacccgtgggttggctggggacaggacccaccacatttgcgggggcggggccggataaagggttccacccaccccgctagtccctgtggggcccgaaattaagataaggccaaccagaaaagcccatctagtccatgtaggggatgataaacgcgaattcccaatcccatccagcccccacacatgcaaacgcgagcactcgttcagacttctaaacgcatgaaggttgtggtgttgactcacagaggtcctcttctcgcgattgcggcgcagcgccagatgcctgcacctcctcgcatcgccggcatcttgctcctcctcgcgctgctgatatctcactactcctcgcgtcgccgacatcccgctcctcttcgcatcaccggcctctcccttctccttgcatcgccggcctctccttcctcctcatgacgccggccaccttttcctctttgtgccacatacctcctcgctcctcttgttcctctcccaactaagtcttcttcttccaatggcagagtgagtgacctccagcggggccccggtcaggtagcattttgtacccaagttcctcttcggggctggggccgggggatgaagtcaagggttagggcagggtcgttcttgcccaacccagccccgaccgaccccattgccattcctaacccacatacggctcatctatgtattgtccttgccaaccgagcatacgcatggcctcaggcgcatgggacctctgctagtgggcctcgagaagctcaacctcctcgttgtggcaggtctcaccctccctcaccccctccccctacggcacagatccactagcagcagcgatggatgggcggatccggcggcccctactcctcctgcatggatccaacgacttcgagcgaccatgacgacaacgacagtagcctcaagtgtgatggtggtggatcctgacgtgatggcggtggcggcttcaacacgatgacgatgcaggggatccggtgtgatggtggctagggttttgggttttggatctatggtttttgtatttttgggttttgcaatttttattttttttgtcaaaattatttttgtagattgatggcttaagcacctgcctacgaaaattgtattttttttcgcaagcagttgcgccaaccacatgcaaaaatattgattttcgtaggcatcttggtgtaggcgggtcacctagccgcttgcgaaaattggttttgaccgtattaaaaatttgattcctatagtagtgtatgttcagcactctcctttcacgacctctattctcttgtttttcacgtgtacgctttgcgaactactaaatagtgtgtaaaactttctataaaaaagttattaaaatatcttattaatctttttttatgtttttagctaatacttaaataattatatggagtatcggatgtgacacattttagtactacaagtctgaacagactctaaacatattaaaacatattaagacatgtcatatccgatcaaagtaaatattttgagacagatagagtattatttatctattgtgcatatatgtattttatatatgttgatgacttagcaagttgacaacatttgtgtccacttgtatagaaacgctatacatgcataattaaggctgtgtgtttggtatttcggtttggtaactacttgaggcacataaaataacttactattgttagtgtataattaattaatattagcctaaaatataaaaaaagattaatataatacataaataatttctctatagaaaattcttgaacacgcttagtagttcgcgaagcatgtgtatataaaaaaaaggagaaagtagatgttgataaaggagagtgccaaacatctcgcctacgtgtccaatgacatggacgcctagtttatttcaatttgatcgtgcataatactccttccgtttttaaatatttgatgccacttttttgaacatatttgaccattcgttttattcaaaaaagttaagtaattattaattcttttcatatcatttgattcattattaaatatactttcatgtatatatatagttttacttatttcacaaaaaaattttaataatacgaacggtcaaacatatgctaaaaagttaacggtgtcaaacatttagaaacggagggagtatgcgtgaaggtcaatctactctcggagtctgattcttttactgtatactagcattgtcttttatttatatttatagtaatcattatattccgaaacctacatacgtattttatatggtagcgatgcgttttgtatttacataataattctagttctttatcggagcaaatatgttggctccagtttttattatagaaactttgtaaattgagcctttcccatacaaaagcttaatttatacacgtgaactttttcgaaataagatttcaggccacgcgagcatcgacgtgtgtgattccgattcagcttcaaactttcggtgtcaaaaaattgtatataaaacctttgcagaaagtttgcatatatatagaaacatagattgcgcatacacacaaaccacgctaaacacgtcctcacgcaaaaaaaaaaaaaaaaaaaaaaaaaaaaaaaaaaaaaaaaaccctcaaaaagaccgcaaaaaaaaaaaaacacgtcctcacgcgccacgtctgtcgtctgagcaaaggttgacacattaaaactgctccatgtacattaattcattcccaggagaaaaagaaaagagatactccctccgtattttaatgtatgacaccgttgacttttcgaccaatatttaaccatttgttttgttcaaaaaattttttgccaatatgaaaatatttatgtcatgcttaaagaatatttgatgacaaatcaagtcataataaaataaatgataattacataatttttttaataagacgaatggtcaaacgttggacaaaaagtcaacggcgtcatatatatatatatatatatataagttttttagctaatacagtaaattatcacttaatctattatataaggaaggagtacatcctaatgtgcccagctctcagcattcaaacacgaaataaataaataaaactagtcatgacaaatataaagctgccagatataagccatagcttacgctagatccataccaaaaataaataaataaataaatactcctatactccttacaaacatttataaaaaggtatggaaaaaaaatagagagagacaagagctgtgtttgtgttgtgtcgtgattggtatttaaatccggaaaaagggtccagccactacggttttattagttggcgacaagccaaagccgcaaccccacccccgacgtgctcctccgccaccgccgccgccgccgacgacgaccgccgcctccgccgcgatctctcgcctctcctccctccctcctctgtacgcagtgtactactacggtactaccgccgccgtagtactcgctggtgttggggagcggccggatggaggcggcggctgcggctgctgcggcggcggaggcgcaccaccacaatctacacgggtgcctggccgtcagggcgccggtgccgaggtgctcgctcggcggcggcggcgggggcggcgcggcggcgatgggtggatcttctggtgaggctgtctctctctcctgctgcgctcgcttgtgcttccattggcttctctggttttttttttcttcggttgcgatgtagtagtacgacggttttggtcgcctcccacctgcttgtgttattgctcgtgtggctggcggttgaagtttcttagtttttttttctctctctctctctctctccgaatttttgttttttttactcagaaaagggaagtttgatgcattctaggatttctttttgggggggtttatttgtgcgtcagaattatggggagatttttgcactgttccaaatgttgtgctgttcttgctggagtttttttttttttttttttggttttaccttccattggtgctgttcttaatctactgtgctcttgaacatttttctttcgattgatgctgctttcctctgctcctgccgttctaatccagcattcttgtattttatactatacattttcctttccctttttcacctttcttagaacagttccagtatctttggccactggtgtattctgatgatttttgtgatgttacctgaatatctcaaatttttatttttttttcttttttcattgacaagaagtcagcactggagacccaagaggaatcttataaaaaaaaaagctcttggtattgtcaatttctgtacttgctaccgcttttggccacatacttgtttgtggtggctcagagagaaagttgtggcataatcacacaaggaagctaatcattgatcttgtccttttatccttttgggtgccacattgctaacttctgtgcaattactcttcttttcggtattcgctagatttcaggcgcccgaaaatgtttcgatagtatctaataatgtcgcgcttcattgataatagtatcgcaacaagggactaattatctgcttcaataattatcagcacttaagtagctggttagtagattcacttgctgtccttcacctccttttttgtgctaatttcggtactaaatgatggcacctttcctctgtgttcttatcttggctccaaaagattgatatatattgatatgatatgactaaaccacatcatcaaccgatgttgattgtacagttgcaacatcaaaaaaaatgctggaccattagcttattgatgatggtggcaacccaactgttgcttttgcttttaagctgagttttggttgggttcatatgcgcctaatcttatcggttggaggcagcttagctgctctaatttggtgagaaatattggctgtgatggcatatttgttgggcaacttgagtagtgaccgatgagaaagctgcagagagaggggcatatatgataatgatatatctctgggttaagaacgttgtcgcctaacaccatgtgggaggtatcagtttggtcggctgcaaaaatgcttttgccatgtctgtcttatcctctggtgatagatccactggcttataaatataaataaggcatttgtaagcttgtttaagatggcataagcaaaggtttgtgtgtgtcagagtcactaggcctagctagctccatcagttttggctctgggatggtgctggggcagcttgcactgtggtccaagattgccagttcagtaatccttgttttttttcaatggtttaatcttgcctctcttttttttctttttgttgcattcggaatgcagatgttaattatggtttggtagtgtatattaatattattatattggtgatttttgccttgatagttttgaaaagtttgccattctcttctcttctttggtgaatatgtgtggtgtaatctgatacataaaagggattttttttttggtgaatcttatgagggaatgtacctgttcttgtgcagatgaagcatcctgtgggtcaccaagatggatagggaagagcctctcttgcgtatgcatcaagagaaaaggagcctatgagagaatatgcatgaaccttacaccagtgcaggtatgggcttgcgagatatctttactgtgcaaagatttgcaatgcttttatgccaatgtgcacagacagggcctttttctgctgtcagaaaaggatttatctgcagatcaaatcaatcaatagataagcgggcctgcttttgagtaaagatcacatcgcttaatcgcagactcgcagtgaccactcaaaagggattgtttaagctttggctttaagttattgtttttctttattcatggatattagtttttttttcaatttcagtatgtggtctgaccactgacatcagaaaatttacatttcagaacttcctttgaaactttatctcttcatatatatcactaatacagatagttaaaacaatcatctcttccaatttacaggaagagaggcttcagaggctgaggcaccgtatgaaggtttattttgatccttctagacgagatcatcaggtaaatcttgtactagcaataagccaataaatgaattcatacaatatgttacatttccctctgtctaactgcagtgtagatgtagacttgctatcacacactatccaatgctgtagctgtagataattattttggcactgaacatgatcagcagataaaatcatgcataacaatcagtgaactcctcagttttggtattgatgacactgatttgactagagtaccacagagttacatggtagtaacatgtactcgtatactttgatgtaagtttctttgtattgatatcacctgaatcctgataaatagcaaattatgatgataggaagcattgaaagctctttggcatgcaacatatcctgaccaagaactacaaggtttgatttctgaacagtggaaggacatgggatggcaaggaagagacccatcaactgacttcaggtactccaaactaaaacttgccacctgacagattagctccaaaaatatgttcagctggtgtgaagttaagtgaaaatgcactacatggtgcagaggcgcaggattcatatctctggagaatcttctattcttcgcgaagacattctctgtaagcaattcttcatcattgctttcattatctgaaacactgtagactgaagatcgccctcttgtttaatactgatcttctttggttggttaatccctgtaggcctcatttcagaggctgctaaagaaacaatgtggcaatcgagctacttgggagtacccatttgcagttgctggtgtaaatatcacattcatgatcatgcagatgctggatctccaatctagtaagcactgacccaattctgccagtaaatccagtctgtggaccgcagttgtactaattagacaataatattgtatgcagctaagccaagaacgtttgttcgagctgtttttatccaaatgctgtcaggtagggccagttaagtaaatacctttcctgcatcatacaatataccaacattttgaaacgaatttgtccttgctttgttcccccagaggatgagtgggcatttgatctcctctactgcgtcgcgttcgttgttatggacaagcagtggctcgacaagaacgcctcctacatggacttcaatgtaattttcctgtcaatgtacatgccatattttctccgtaactcatcagattgcattgttttgaccgatcttgcgattctgttgtgattcaggagatactgaagtcgacacggacacagctggagagggagcttctgctggatgatgtgatgcggatcgaagacatgccgtcatacagcctgctctgctagtagtggccatactggttgaacaatcatgattgagtcaatggttctgacctctgagtgtatagccccctcccttttgttgattccagggaagggaatttttgatggcatgtagagcaatggcctcctattgtcatgctgaacttgtcccactgtaaacaactcatctgggcatcaccacaatgaattagaattgctagcatccaatgtcaaagctggtgttaatctgtcatattttaccccatggatgtaacaacagaatcaacgagtgggtaaaatcaacttgcaacctctggtgaatggtgttcaatgaatcctcatttccttacttaacttgtcaaacttttccgatatgatgtcagccttgtcaacaatcctctgttcatgaacagaaaatcagctactatgaaattgccaaatgctgatcagttctgacatgctatgaaattgtcgtttattcttccaatgccgacgtcagctgtcgtcgccggccaccgtgctggagccggggatcttggaaagccgcgcccgcttcatcaccttcctcagcctgtccacgtcctgccacctcccggcctcggcgtacatgttggaaagcaccacgtagacgccatggttgccgggatccagcttgagcatctcctgcaccgccctctcggcgacgtcgatgtcgccgtggttcttgcaggcgttcagcagggctccccagatcaccgtgtcggcgtcgcaggtcgtcatgccacggatcatctcctcggcttccgtgaggaggccgctccggccgaggaggtcgaccatgcagccgtagtgctggatggtcggcgccaccgcgaagtccttctccatggacgcgaacacgcggcgggcctcgtcgagacgccccgtgcagccgtaggccgacaggacgccgacgagcgtggcaccgttcggcggcacgccgtcccgcctcatccggtggaacgtagcaagggcgacctcgccgtggccgtggtgcgccagcccggtgatcagggcgttccacgtcgccgtttgccgctcgggcatccggtcaaacaccgccgtcgcctcctccatggcgccggtcttggcgtacatgtcgaccagcgccgtcccgaggatggcccccaccacgggcgccgtcacccgcctcgacttcatgagctcgtgcacgcgccgccccatctcgagcccgcgcgaccccgaccgcgcgcacgacgacagcacggacgccagcgctgcgccgtggggctcgatcccgtcgccgaccatctcctcgaacgaccgcatggcgtcctcgtgcatcccgttttgcgcgtacccggacaccatggtggtgcacaccaccgcgctccgctcgggcaatccgtcgaacaccctgcgcgcgagggggacgaggcccgcgagcgagtacgcccggacgaggccgttggcgacgtaggcgtcgcgctccagcccgtgcctgacggcgagcgcgtggagctgctcggaggcgcggagggggaggcgggcggatgccttgaggaggaaagtgaaggtgtgcctgccgggagagtacgagccgccgccgccgccgctgccgcggcggaggagggagaagaagcggagggcggaggccgggtcgggggaggaggcgagggcgcggagcgtgatgttgagcatgaaggagtttggggcgcaggggagggaggcgaggaggcggagcacggctcccggaggggagagcgcggcgtgggcggcgaggaggcgggacgccgcgaaggcgtcgtcggcgaggcggccggagacgagcatggccgcgtggacggcggcgagcgcgcgcggggtcgcgcagcggtcggccaggagggacaggttcggccggcgccggatgccgccgcgggcgcccacggcggcggcggcggcggcggccattggcgtcgcgtgcgtcgccacactgtacacggaatcctcctctctgcgtcgccctcttcccaaaaaaatacgtatatagggcgtgtttagattaaaaaaattttcgttaaagttccaacttttccgactccgtcacatcaaatgtttggatatatgcatagaacattaaatgtggatgaaaaaaaccaattacacagtttacatataaattgcgagacgaatcttttgagcttaattacgctatgatttgacaatgtgatgctacaataaatatttgctaatgacagattaattaggcttaatgaatttgtctcggagtttacatgcagaatctgtaatttgttttgttattagtctacgtttaatacttcaagtgtatgaccgtatacttaaaaaaaaattggcacacgaactaaacacaaccatagtatcagattttaaacaacaagtaatatgattttatgaatttagatagatcatgaatattaggcatccatttataactgatggattttactgtaattttgtaaaacgtccatataaatccatttaatttgtgttcaaattgataaaatccttcatctcctagaggaagccagcaaatctagttgggtaggaggcagtatggaggttaaggcgttcctaaggtgtcgacttgatgtccttgagactgtaaagtgtcgctttaggatatactccaagttatctctgaggctctaaggcatcgcaccaaggtaagacagcttgaggcgacacctgggagtctcgcgctctatatcgctagtgaaaaaattagctttcgtgaaaagaagtttaagtgaaaacgagcccatgcactataggaaacatagagaggggcatctagcaaagcaatatgacatttggtgactttgctccctccccttcacatctgacagtagcgctctttgcatctggcaacgacgtacccatctctttcgatggtggagactctcccctcaacgagtactatctcctctcccccttcatcatctgctgagctactcctttctgttcttatttctatgctcttctcttcctcaatgctcatttcttgggccctccgttgctctggtgctctccctcgctgctcttggcttcccccctctccctaactactcttggcttcctagttcctcccgcttccttaactatttgcttcatgtgcatttgatgtagtacatagaatactgttgatgttattggttattaaaatgctaaattattatacccatctaacacttaaaatactcattatatcccaaaataaacaaatttagtactggatgtgacatattatagtactatgggtgtaacatgttataatactatgaatctggataggaggtttttcaaagacaattcatagtattaggatgtgttacatcccatactagattagtttattttgaaacagagagggtatgtactactatcagggctcaacaatttgcagcaacaaggtatataaagtgttgttaaaatgtagttatattacactatatttttgtggtcatattatattattaccattataggctgctttcggctgggctagctgccatagcggctgcggctacagctgttgtgaatggctgtagctaacagccgttttaaactatcacagtcgctgcggtagcaggagcaagtgcctccgaacaaagccttacctccgaacagacttgccaaaccactctccaagccgtattttaacaaaagtaggaaaaaatgccctccaacagcctctctaactgcctctccaagttatccaactggccaaaatacgcctctccctggccaaatctggccagcctctagctagccaccccagcttgccaaaggtgggccccaccctttttcaccgctccatcccaatttcgcagaaaatcaacgctccctgcactcgtcgtcggtcagccacctaccctcgccatccaccgtcgcgtggacgtcaccgcctcccctcgccgttagtcagccgcctgcccttgccgtccgccattgcgtggacgtcgccgccgcagcaaagggagaggggtggggaggagcttgggaatgtctcgccgtcgccgctcatgacttcagtcgatcattcccatctctgaaatatagagagggtgttgatgtccctgtcttgctttcatcacctgcttcaacccatcgaaaatcccccaaaaccaagatccccaattgctcgaaagagaagagagaaagaaacaagaagttgcttgaaagagaaaacgagaggcgcaaacaagaagggccactgccgccccgtcatcgccgtgcacggccaccgccaaccgccgcccgtcgctgcacacaaactacatctgccgcaagcaaaaacaggcttagggaatagggggagcaaggtgaggaagaaagaagtggtatagaggctgacgcgtaggtcccgctgtcatagactctgaatagagaggatgaatggagagatggttggagatgctctaaggatgaattgactagccaaattaaatggagagttaactaaatagatatttggcgtccgatttaaagagactgttggagatgctctaaggcgtgtagggccatcttacctcgccttaacgcctttacaaccattggaagcaggatttactgaaataattgttttccagtactatgcatgatgtcggtttcaggtgtttgcaaacagaaatgtagggttagtagacagtaaacaaaataagtaacaactttcgcaacaacaattttattattcctctttgctaaaaaagagctacaaaaccgtcgacggatggcacaataatgcaacaatatgcccacatttacaaatttatttattttgccaccattccggattttccatttattatttgcattgttcttacatatgctaggtagctcgccatcaaagcactcctgacattgtctttgcgtaccttcttcagatctcactaaacgacttgatagtccggaaaccatgattctcagggagcggtgcatttcccgggcgaatggagattattacctcaaaacctgaaaaagaaaatgtcgggaaagaaaaatataatatgaaatcttgacccaaggaaacgaatgatagcttgaaatgatcacatgattaggaatggcacccagagaggtcgactggttaaagctaaagcatcttatccaccaaataaaagcatgaacattcccatgaatatttgaccagaactagtcattacctgcactttttgcagcaacagcttcttggaagacatcggtgataaataagatctgagcaggactgtccaccccaagtgattgcgaaatctcaaagtagctccttgtttctcttttgttactgcggtttatgcgagatggaatcataatttcactaccatttttcagtatatgcagagaaatagaaatggaacaagaaatcatacccggttgtggtgtcaaagaaaccacagaggtattgtcgcagatcaccataggccgtattgccaaataatagcctttgcgcctcccggctgccacttgagtatatgtagacctatttgcaggtatattatttgttatcatgtcatctaatactaatacacctttttttgtattttttgcaatggatgattcaaaaatttgaaattgatattgtttagcactatctagggtcaacgttcttgacccaagttggcagctagtaataactatagtaaaccatgaaaacatattaggagccatgaaaagtttaaagttcacacttccacacgaatttgactaaagagataccttcatgccactagcatgccagtgctttagcgcctcggggacatcatcgaaaacaactccttgcagttctttactttcaaaaccagtcctccatatgtggccctggaatttgcattaaaaatgctgaaatccatcaaagaaacaggaatatgcttgcagcaccgaaaaagaatgtggactaatctacctggagttgtttcaacgacgtaatcttcctgtctgctttaatcatcgattcaacattagcaactaatgcattgataacctcttctttgtcagcatcgtcaggtggaattggaacagacccaacaattccatttttcaggtcttcttcaacctgaataatgaatgctaatatgttatatcttgcataaaacagagatgggcacattcacgtggcctagtggtaaaactcatggttctggtggtgaggactccagccactttccaccatggtggtaaaacagttaactacgtccacaaataggaagttgaggaaccaaaattggtatggtaacttagatcaaatctaacaattcaaaacaaaataattttcacagggctaatcaaatagtatgacttaaataccatcgacaaatacttagatggta

SEQ ID NO: 24093 - DNA, 1095 bp, Oryza sativa
tcagaaccccagagtccgcacatcctcaaatacaaagcacttccctagttagatgtaggttacacttcccgttcgagaaactctaccttctacctgccctcaatttatgcacgattaatgaatgccacctgggtggaagcgagaggtggaaatggaaggtcttagttcggaggtgggatctctacctgatagttgcattgccattcatgatgatcccctggcattcgtccattcagccattcaccattcacccattcaactggaattttggttgaatgccggaattgtgtccacaaattgtggatggatagttggttggctggctggatggctggctggatggctggctggatggatggtgaatggctggcggcggttcggttgctttgaagcatttgttgctatctaaattccatttaaggtcgtaccttatcgcccagcatcatcttattctctatttgtattccctccatctttcacatacggatgtagccttggatgtgcccgtgcccaatgaagaggaagagcgcaacatgaaacgtaagtacaaaagtaccggacacccacccagatcccaatagaatccgccaaatcctgcgggaaattgtaatcccattcaccagctcctacatttaattaacaagagaactattgtatttatctaacacctggattatctccacctttcatttgatccctatttatagattacgctgcgttgctaacggggccgcacctcctatttcctcaagggtgaggaaatgaagtccatgtacaccacctacaatccgcagaatgtggtggccaccgcccgtttcctgttccacaagaagaatctatactactccttctacacctcatcgcgaatcggtcgtccgcgtgccattcaattcgttgatgatgcgggtgtaatcctggaggagcatcaactggagaccacctggcgggcactttcagtgtctatcagaatgccacgggcaagatctgcggtgtctggcgacgagttccacgtgattacaagcgcatcctgcgcgacgatcgtctccatgttgtcctcctttggggcaacaaacagcaggccgagttggctctggc

SEQ ID NO: 24094 - DNA, 500 bp, Oryza sativa
tccaatggccaacaatagccgaagcccaagggacaacgccagcccgagccctagggatggaaatggtgatggtggtagccgtggcggctcacgctcgcccagagcaagcgagtcccctgaagcttgaaatttaatcccagtctctggcgttcatcttgtggatggtcgatgctatggttgtaatagttatatttccggtttaagacgagatcaaggagtcttaacacctgaaaggatttggtgcccttggggctatgctatattgctattggtgtgtaatggatcgatgaactttctattagcctgcattgtttttgcggtctggtatcaccctgagattgcaacttttgttgctttggtcgctgaacaacgttgacgacagttctctttcatctttgttgctaaatgttcctggagacagttctctttcatcttgttgctaaatgttgctggtgtagcgctcagaagctgccttgaagtttgcatatcatgttccctcg

SEQ ID NO: 24095 - DNA, 44640 bp, Oryza sativa
taccagctgttggtccagatggacaggtcaaaactgaacctgtgctgtgctgcaaaggagaatggtgcctagaggggagtagcagtaacttagtggctgattttgtggcagaatttgagtcctgctgatgcaacttgggaggatgcaacagtgaaccaaagtatgtttccaactttccatccttgaggacaagaatgctgctaagggggaagcaatgtcaggactcagcctagaaatgagatgcagcgaactgaaactctgaatactccgaactttctgaatgtttgagttatctgaagatttgaggaggagatgtagactttcgggaggattatgaagatccaacgacagacaaaccaagcaaagcgatatcacgaaatcctagccattaatcgatgtcggggaccactgttctggtcattcttttgcctttttcctacttttgagctgtctgatgcttgagagctaagactacctcactttgtataaaaacgaattgcatatgagaatgaaagagatatcaaaactcgcaattatcttatcttaggaagtaatctagatttaggaatcctagtttaggtccttgcggcgcaaaccaaatacgttttattctctgaaattgggttccatttctagtaaaatctttctctgatcttgacatgagggggatgggaagtagcttcctcgcgccgtgcaccactctgaatcgccgccgtgcgttgccgctgtgtgccggcgtcctcttctgcagcaagatctgctggaggtcaagaacccatggacaagagagagaacagacatgaggggagaagagaaaggagaggaaaggagaggggaaggaacctgcactgccgccgccaccagtgcgccacctctaccgatgcgccgctttttttcacccgcacggtccgctctcttcacggatgcgcgagtgtcggtgatatgggaccgggagtattgcgcccggaggcttgaggcagatggaatcgcccacgtggcctggcaccttcggggacgtcgggcccgagggtgaggtgtccgccctcctcctgatttccccgagggggggtcgggttgctcctgccccggccccgagggccgaggtgccccgaccccttgtggggtttgcactatgtacataggttgagtgaacacggtagggctcacctaaccgcatttattgcggtctggtcaagcgtgtcacgctgcatgcagcgcaatgcagcgcgctcctttatccggtctgtgaccagtcacagaccggtcagatcaacggttaggtggcgactggcggtctgacgcacgcctcgccccgtcccgtcaagacgagagcctctaggcacacgtctccagccggagctagcgtgttacctcttagagatggcacgttagccctggttagatgaataccaggcttcatcccaaccattacaggcaagatgctacaaaaagaagggtgatcatgcagatcgccgaactgacgcatagaggacaagaatgaccgatctgtgaccggtctgacactggtcgcgtcagcaacagacagccacgatcccacgttgcgcctgtctccgccgggagtggaggtaggtgtgggctgtcccatcgaagtgtcattcggacggcaaccataccaacctccgtccataaagagaagaaaagtgcagtttggaagggagaggggacatgtggtatccccttaagatataaaaggaggaccatgcccacaaagaggggggattttttttccagattgagagcctagaacaagggataagtcggctcacactttgtagctcctccacagacaaatccaccaaaacacaggagtagggtattacgcttcccagcggcccgaacctgtatacatcgccggtgtctcgcgtttcttcctggcacgcaatctgtccacacacagagagagcttgagatctcaccctaagcccccggccgaactggcaaaggggggcctgcgcggtctcccggtgaggagccacgagctccgtcatctggcgcgccaggtagggggctcagcgtgtgttttctgagctctcatactcttccgtgtgcgccaagtttttcttgttcagcctaatggccgagcaagcaaaggtgcacgacctctctccgagtgtgagcggcgacgacggggagccaaacccacgccgtcgagctcgtactcccccacctcctccacaccaaaatcctaagcagggggaggcactcgagagagtcgaaaaatccgcagcatcgccagtcgcgggtggtgcaggagaacggcgagatggggagcgtcgcctcctcgtctacggtgacggcagcacgcctcagggcgcgcttcaggctgttggcgcgctcctacgtcacccgcctgtcgtccctgacccggagtctccagcccagcgatggctggacgacgtggccaacttggtcatgacggcacagcagcgcctgggtgctggtggacggtccgccaccaccaagacctccggcgccgccactaccggttccgcgtcgtcaagacggagggcgcggcgagcggcggctgttgcacgccattcggctgccactccctcgtcggcacctccgactcgggaggatcagcatggagagctggatgcccgcctcgacatcgagcgtcggcgtaatagccggcgtactccccgcgcaacggagggcgcctcttcgtccagagtgtcacctcgacagggacgtgaggaccagccctccatgcccccggctggtggtgtcggctgtagagcctttgtggcgagtcttcggaatgtccgttggcccccaaggttccggcccaccatcaccgagaagtatgacgggagtgtcaaccccaccgagtttctccaggtctatacgaccgggattgaggccgctgggggtgacgacagagtcatggcgaatttctttcccatggccctgaagggacaggcacggggttggctaatgaacctgccacccgcgtcggtccactcctgggaggatctgtgccagcagttcaccatgaactttcaaggcacttatccacgcccaggtgaagaagcggacttgcacgcagtacagcgaggggatgatgaatcccttcgctcgtacattcagcgtttctgccaagtccgcaatactataccttgcatccctgcacacgcggtgatctacgcgttcagggggggtgtgcggcacaaccgcatgctcgaaaagattgcctccaaagagccccagactaccgcagagctttttcagctcgcggaccgagtggctcgtaaggaggaggcctggacctggaacccctccggttccggtgtggcagcttcggccgcccccggatccgccgctcagacagggcggcgtgacaggaggaggaagaaaaggtcggtccattccggcgacgagggtcacgtcctcgccgtcgagggcgttccgcgggccacccgaaaggggaggcctgcgagcgacaaaaagaaagaggctggtgctcccagcaaggagcgcccagccagcaagtggtgctccgtccacaacacctccctccacgatctcgcggattgtcgcgcagtcaaaaacttggctgagcgaacgaggaagtgggaggaggacaggaggcaggaacgccgtgagggcaagtccgcggcagttccctccggtaaacggcgaagtgaggccaaacagaaggcccccgccgttgacatcgatgacggtgatgatgacctaggtttccaagaacctggggccaccattgccactgtcgacgggggagcgtgtgctcacgtttctcgccggagtttcaaggccatgaggcgagagcttctcgctgcggcccctactcatgaggcgacacgtcgggcgcggtggtcggaggtggccctcacctttgaccagaccgaccacccaccgtgcgttgcccggggagggcagattgcgatggtggtttcccccaccatctgcaatgtgaagttggggcgtgtcctcatagatggaggagcggctctcaacatcctttcccccgcggcctttgatgctatcaaggccccggggatggtgctccagccgtctcaaccgatcatcggtgtgacgccggggcacacatggccgttaggtcacatcgacctaccggtcacctttggtggatcagccaacttccgcacggagcgggtgaacttcgatgtggcggacctcagtctgccctacaacgcggtcctggggaggcccgcgttggtgaagtttatggcggcggtccactacgcctacctccagatgaagatgccgggccccggtggccccatctctgtccgtggcgaccttaaagtcgcgctcgcttgcatggagcagcgcgcggaccacctcgctgctgcgaccaagcccgagggtggtgacgagaggcttggcacctccgcccccaccgccccaaggcagcggattgccacatgcgacgaggtcccggtcaaggaggttgccttgggcgacggcccatccaagaccacacggatcggtggtcttctggatggcaaataggaagacgcgctcgtctccttcctgcgggcaaacgctgacgtcttcgcatggagaccagcggacatgcccggggtccccagggaggtgattgagcaccgtctcgccgtgcggccgggcgcaaggccggtccggcagaaagtgcggcggcaggccccggaacgtcaagccttcatccgcgaggaggtggcgagacttctggaggccggattcatccgtgaagtcatccatccggagtggctggcgaacccggtggtcgttcccaaggcgaacggcaagcttcggatgtgcatcgactacaccgaccttaacaaggcatgtcctaaggatccttaccccctgcctcgtatagatcagatcgtcgactccactgcggggtgcgaccttttgtgttttctagatgcatactctggttaccatcagattcgcatggctagggaggatgaggaaaaaactgcgttcattacccccgtaggaacctattgttatacatcaatgcccttcgggttaaagaatgcaggtcctacttttcaacgtactactcgaatttccttgggtagccaaataggacataatgttgaggcttatgtcgatgacttggttgtaaaaacgcgcaaccaagaaactttactttcagatctagcggaaactttcgagaacctccgctccgcccgcataaagctgaaccccgataagtgtgtgtttggtgtacctgcgggcaagcttctcgggttcttggtctctgcccgaggcattgaggccaaccccgagaagattcgagctatcgagcggatgcgcccccccagcaaacttagggatgtgcaatgcgtcaccggttgcatggccgccctaagtcgtttcatatcaaggctgggagagaaggcgctacccttgtttaagctcctcaagcgctcggggccgtttacttggacggaggaagctgaacatgccctcactcagttaaaggcatatctcagctctcccccggttctagtcgccccggagccaaatgtgcccctgctactttacttagcggcgaccccccaagtagttagtgcagcgttggttgtggagcgcgatgaaaacaatcctcatttcgtgcacccccattctgtgctaacttggcccgggagcgagcggggaggagaggcccccgagtcggacggtggcctacggcccctgacgaccggagtcggccctctgcccgcttgtcagacggtgctaggtgcccccaaccctcaggagggccccaaggccactgcgggaaggccgcacttaacgccctttgaccccgaggctaaccctgtgctgactcgacccgggaaagagcagggagaagaggcccccgagccgaatggaggccagaggcccctgacgaccggagttggccctttgcctgcttgtccgacgatgccaggagcccccgacccccaggacggccccgaggccactgagggaaggccgcccctttcatcctccgaccccgaggtcatcggcacagaagacaagtgcgccccgaaaggccacttgaatgaagaacgccccggggatacggcccctagcaaagaggatcggccccaccgaagggtgcagcggcctgtctactttgttagtgaggccctccgggacgctaagacccgataccctcaggcccagaagatgctttacgctattctgatggcctcgaggaaactgcgccattattttcaggcacatagggtcactgtggttacgtcttatcccctcggacaaatcttgcataatcgagagggtacaggacgggtggtaaaatgggcaatcgagctttctgagttcgatctgcactttgaaccacgccacgctatcaagagccagaccctcgccgattttgtggcagagtggaccccggctccagagaccgtctcaatccccgaggccagcacgaacccctcgcagctgcctcacaccacccactgggtgatgcagttcgatggttctctgtccctccagggtgccggtgcgggggtcactttgacctccccgaccggagacgtccttagatatctggtccgcctcgactttcgagcgaccaataatatggcagagtacgagggactccttgccggactcagggtggcagccggactggggatccgccgtctcctggtgttaggcgattcccagctggtcgttaaccaggtctgtaaggagtaccggtgctctgacccgcaaatggacgcctatgtacgccaagtgcggcgtatggagcgccattttgacgggatagagcttcggcatgtgcccagacgggataacatgatagccgacgaactctcacggctcgcgtcctcgcgagcccagaccccaccgggcgcctttgaagaaaggcttacccagccgtcggcgcgacccgaccccttaggggagacggatgcgcctgaccggcccccgaggcccgtcggagtccaggcctcgggacccgaagggagcgctccaagctcccttagattgattgcttggatctctgagatccaaacatacctcacagataagactctacctgaggaccgcgaagggagtgaacgcgtacaacgcatttccaaacgctacgtgctggtagaagggaccctctatcggcgcgcggctaacggaatcctcctgaagtgcattcctcaggaacaaggcgttgagcttcttgctgacatccatgagggcgagtgcggagcccattccgcctcgcgcaccctggttggcaaggcctttcgtcaaggattttattggccgacagctctcaatgatgcagtcgatctggtccggcgatgcagagcgtgtcagttccacgccaagcaaatccatcagccggcccaggccctgcagatcataccactgtcatggccatttgctgtctgggggcttgatatcctgggaccgttcaaacgggccccgggcgggtttgagtatctgtatgttgcgatcgacaagttcactaagtggcccgaggcttatccggttgtcaagatcgataagcactctgcccttaaattcattaagggcatcacggcccgttttggagtgcctaaccgtattattacggataatggcacccaattcactagtgaactcttcggcgactactgcgaagacatgggcatcaagctctgcttcgcctcacctgcccaccccagaagcaatggccaagtggagcgcgccaatgcagaaatcctcaaaggccttaaaaccaagaccttcaatattctcaagaagcacggcgattcatggatcgaggagttaccagcggtgctctgggcaaaccgaaccacaccaagccgagcgaccggggaaacgcctttcttcctcgtctacggcgcagaagcggttctcccatccgagctcaccctgaggtctcctcgggccaccatgtactgcgaggctgatcaagatcagcttcgtagagatgacctcgactacttggaagagcgaaggcggcgcgcggccctccgagccgcgcgctaccagcagagcctgcggcgctaccatcagcgccacgtccgggcccgatcactctgcgtcgacgacctcgtcctacgccgcgtccaaacgcgtgctggactgagcaagctctcaccaatgtgggagggtccgtatcgagtgatcggtgtcccccggccgggctccgtacggctggccacgggcgacggcactgagctgccaaacccgtggaacatcgaacaccttcgtcgcttctacccctgaggggggggggtcgggtgtcaggtttcgtgctcgggctaaccccgcacccccctcgggtgtgcagggttagccgggggctaccacacatgcacagccttacttttcttatttcagcatttcaataaaagcagtttcaatttcctaagggttgtgtctgtgccgtttttccttctgaagaatcttaacttgaaataaggtcactcgtgctcaaccttgccctcgggggctcggttcggtcagctaaaatcgccaagcggggcccagaaccgagccgtgccccggggcgtggtgaactccgggggggaatcggcaaaaacccacaatcgggtcacccataaccctcggtcaccatgttcccggcctggccagtctcgacatgtggatctccccaggcactagccccgacccgagccatttgaggatcgggacttgagcacgagcccttaaatcaagctaaaatgcaaaaggaccacggcacaaatcatcctcaactcatatgcatagcaaaaagttaacatagaaattttttatcatttttgattgcagattaagttgatctatacaaaaagaagaaagaaaattggagattggcgggggcctgggggctcattccaatgcgcccgggtcgccggcctcgtcgccactgtcgtcctcaccgctggcgtcgccctcctcgtcggagctgggggcgaacgcgagccgaggggccgacccctcgaagctttggacgatgtggttggcggcatcccggacccgcgcgcgcgcatcgtcctcggtcccgggagggaactcctccagcgccatccatggggagaagccggggtccctggcctggtaactcgctaacacgagttccaccgctccttgggcgaggtccctcgaggatgacttgatggtcttctcgagctcctcggggagttcttggacagcccaggccatcctcctaaggtgcggggcgaggccttccagattggtagagcgcgaaattgtctggcctttccagaggcccgcttcccgaccggcgcgatccagccgggagactgcatcccaaagcatgccgggccctatctcacccgacaagcggagggcctcggcctccccggtggatgagtccagggcgcgctgcatgtccgcgacggtgtgttcggcagctgcgaggcgggcgactaagtcgctttcgcccgtagccgccccgccgctgcgctccctcgcgtccagctccttttctcgcgcctcgaggttagcagcccgctgctccagcgcggctctctcggcgcggatgcattccagattgcggcgcgcctgctcctcctgcgctgccttgcggagggacaggctgtccgccagccgttgtgtcgcggtctcggactcctcaagagctcgctcccgctcagcaagcgcgtcctcgcggagccggagcgcggactcctcttcggcgcaggcggcctcatgcgccgccaacgtcgcctcccggatagcggcggcggcctcgcggtccgccaagctaatctccacggcgccggcatgatcttccagcgccatggcacgggcttcaagggcctcttcgcgccgtcgggatgccgcttcagcctccgttgctcgctgctctcgggcagcggcggcgtcaaggacccgctgggcggcgtcgagctttttctttagctccgcctcccagctcccgtgttgaaggcggagggagtcctgcgcctcaatcatcgcggtggtggcgatgagggcggcctctcgctcctcctccacctctcgggcgatctccgccagcgccgccttgcgggcttcaagctccgagatatggcggcggtgagccttacggcccacctccaccatggcgtccaccgagcgccgcccctcctcgacgcgcgcccatgcggcctcgagctccgctcgttccgctcgcaaggcctccacctgggcgctgaatccatctagcaccgcggtgtttgcggcggccaaggcttgcagaaggggctcggcactcagcggggcggcagaggacgaggagaagagccgccttggagaaaatgcgacgcggctcggcccgccagaagacgcactgagctcggggatgtcccccggacccgtttggtcctgggcgtcgcccgagggagcgggcccaggcgatgcgcccgcggccttgtcgcgagccgccccggaggttgtcgcctgagcgtcacccgagggagtgggcccgagcgacgcgccggcggtcttgtcgtgaaccgcctcggaagacgccatcgcctcagcctggcgagcccgggcggtttcctcccgaatggcttcttcagcctgacgagcccgggcggcctcctcccgagcagcttcttcggcttggcgagcccgggcggcctcctcccgagcggtatcctccgcctgccaaacccgagcggcctcccgggcggcctcttcagcttcccgaaggcgatctgcggcctctcgccggtcagattctcgcctccgttcctctgcggccgccggatcttcggcctcggattggtcggacttgggatggcgggaggaacgcgacgggacatcgctgaagcagaaaaaaaaaaaaaaaaaaaaaaaaaaaaaaaaaaaaaaaaaacggaagacaaacaaggtggataagagaaaacttgctgattgggataaagggaagatggttgtgaaaggcgtgaaacgaacctgcgagggggtcggttgaacgaccaccttggaggggaaatcaggtttccccgggatggttccgtctcccccgtcttgcggagccgcttcttcttgcgctccgtctcgggctgtgatgtcggcgcggccccctccgggcgcctgcggctggcacgcaccgccccgtcccctcggggaggagatgggggaggtgttcctccctgtttcctcttcccccgggcgtcggcagggcggttgctccccgagcccccgtcgcggggcccagaagcacggccccctcctggggttgattcttcctggcggctcccgccggcgccgtcgtggcccttaggagccacctcctctgaggccccgacccccatcatgatggtcagaatggaggcgcggtctggatcgcagcagagggggaggagtccttgaggaataagagacgcctccacggagctaagattcagcaccctttggaccacgatcttgaagtcatcgggagcccaatcccatctgactccccggtgggtcctcatgtagtcctcggacccggtgtactcccatgcgctccgggcgcgccgctgaagcggcgcaatccggcgacggaggtagtcgccgtacaccatggcccctgtgagcccctgagatcgcaggcccgccaggcggtcgaggacggcgtcatagtcatcccccagatctactggcgcccgccagctggagaccggcgccgggggctggcttgggagtcggaggcgcgcttcgttggcaaggggggtgtagaaccagtcgctcttccaatcgtcccacttcttgcggagggcgcaggggatgtagcggttcaacactggcccccgcggctggaagtagcaaccaccgaccaccgacggcggcgacaccgactgcacggtgaagaaccaccggaacagccgaagagatgggcgcaccccaatgaacatctcgcacaggtgcgcgaagatggccaaagtcatcactgcgttgggggtgaggtgcgccatctggagatcgtagaactccagaacatccataaagaaagaagaaaaaggaggaaccaacccagccattgcgaaggggaggaagaagatggaccgccccgggtaatctggtgctgggcgcgcctcgcccagcatcactatctcccggccggtggcggattccggcatgaagcggcgcggcagcccagcctgcctctcgcccacaatgcgggaaggcggtagtacgctaccgtcgagcagagcggagccccgtgccatgtcgtcggagaaagagagggttgagaacgagcgtgtgtggcgaaggtgaggcgcagcaaagagagagtttagggcgcaaacggcgaaggaaaggggaatagtggcgaaaggaagggagcaagtcttttcctcgatggctttatacccttcccatcgctgagcccggctcctcgtttctcgtgcccactatctcgctccctcgttactcgctatctcgctccctcgtttctcgcgcccacgcttccactaattccattcgcccgcttgcggcgcatgaggtggatatgcggttgtggcagtcgagatagatcgtatcgtgtgcgcgttaattacgatcgccgaccgaagcgacgttaccatatctccagacgaaacgaatctgcacgcccagattcgagcgctgctcaagtgatgtggcagtcttgaagagaccgcccatgactgacggccaagacaccgttaccgatatgcgtggtttgagaccgttgggtttctgcccaatcacggagaccggtcccacctgtcaccaggctttatgagtggcgtcatgcccgaccgcttcccttgagaaggatgatcgccctgacataacgccgggggctactgtcggtgatatgggaccgggagtattgcgcccggaggcttgaggcagatggaatcgcccacgtggcctggcaccttcggggacgtcgggcccgagggtgaggtgtccgccctcctcctgatttccccgagggggggtcgggttgctcctgccccggccccgagggccgaggtgccccgaccccttgtggggtttgcactatgtacataggttgggtgaacacggtagggctcacctaaccgcatttattgcggtctggtcaagcgtgtcacgctgcatgcagcgcaatgcagcgcgctcctttatccggtctgtgaccagtcacagaccggtcagatcaacggttaggtggcgactggcggtctgacgcacgcctcgccccgtcccgtcaagacgagagcctctaggcacacgtctccagccggagctagcgtgttacctcttagagatggcacgttagccctggttagatgaataccaggcttcatcccaaccattacaggcaagatgctacaaaaagaagggtgatcatgcagatcgccgaactgacgcatagaggacaagaatgaccgatctgtgaccggtctgacactggtcgcgtcagcaacagacagccacgatcccacgttgcgcctgtctccgccgggagtggaggtaggtgtgggctgtcccatcgaagtgtcattcggacggcaaccataccaacctccgtccataaagagaagaaaagtgcagtttggaagggagaggggacatgtggtatccccttaagatataaaaggaggaccatgcccacaaagaggggggattttttttccagattgagagcctagaacaagggataagtcggctcacactttgtagctcctccacagacaaatccaccaaaacacaggagtagggtattacgcttcccagcggcccgaacctgtatacatcgccagtgtctcgcgtttcttcctggcacgcaatctgtccacacacagagagagcttgagatctcaccctaagcccccggccgaactggcaaaggggggcctgcgcggtctcccggtgaggagccacgagctccgtcagcgagacaggagagggagagggagagggggagggaagcggtatgggctgggggtgggggagagatggaggggtagttggtggcatttgctggtaattttggttcaactttcggggtacttttgaaatttggttggagttggagttgtggagcgacgggaatgccgctccacgccgctagtacaattttgtggatcgatccggcctactccgctccatttttttgtggagctggactgtttggttgtgcaccagtcagatctgaggcgaatctaggagtgggagctgcaccaaacaggccctaggtaagagaatacctgggtgttacaccctccaggatggcctcaagtatagcagctataccattttgtgtattagcttcagataaccagactttgtagaccatgaccatccatgcttctaccaattacatcaacaatagatcaatgtccttggctgaatcgaattcaagtgaacaaactatagtgaattttgaaagtttgcaccgattgtattcaactccaccatcagtacagccttgtgcacctcctctaataaatgtagcaacattatccttctgaaagaaatcgtagcatcattatacacttcagtaaccatttgccccactaatgtagttctctttgttgatcatagagggcatgtgtagtgctcaataatgtgatccaccaatcttgatattgccgtggcataagcttggattgtatttccattggtaggaagcgagcaacctgcaagagtgacactcaagatgggtatgttttctttactatgaaatttcagcaattcatgcaaccatgtcatctctggaagatctagtgcaaacattgccgtgtcaattttacaggtttgcgatggggatcgatttactgcaagaggcctagtggctggtttgaaccgtaccaagtcgggttgaagtaagttcgaccaagggcaaacttaactttaatggttatttctttctcctattacttcgaaaataataaaataataccgcaagtgtccaacacctaattaccggttttttgccatgccctaaagcagatacgcgtttttatggtgtccccaactaattacacttttttggatgtcctgtagcaaattttgtctatttttttttacttcttggttggttcttttccttattcacattttcttattgacatgtactttatccgtcccacaaaatataaatctggctatgcttctgtctaaattatactctcttcatctatttttgatagtcatatttcatcttggcacactgactaaggataagtaattctacttatcatccatttaaatatgctactccctccatttcaagttataagatgtcttgactttggtcaaagccaaagtgctttgagtttgacttattttgtagaaaaaatagtaatatttttaactcaagacaaatatattatgaaaatttattcaattatatatttaagaaaactatgctggtgttgtaaatattactacttatttctacaaagttagttaaatttagagtagtttgactttaactaaagttaaacgtcttataacctgaaaacagagggagtactagttatttctcgtaaacaagcgattcattaatatttacatttttcgatgtccatgtagccaattttgtgtggaagaatggagagacacgtattaaatccgagaaagttgttaagaggatatgattgaaatatgccaattaaaactaaatttttcagatttgaaaatagatggagggagtagggttttttttcctgacggagtgcgaagaaaatggttgacattgtctacgaaaaaattattgttcaattaatatccaactataaagctgcccataacaccatattgattcctcgtctaaaaaaagcattaagaaaataataaagaaataaaaaccaaatatactccctccatacttttgatagtcatatttcgaaatctgaaaaacaatttgtttttgataggcatatttcaattcaacaacctatcatcttacatcttaatgattttctcgaatttaatgcatgaccttctattcttccacacgagattgactacatgggcatcgagaaatgtaaacattaatgaatcgcttgtttacgaggaatgactttaaatagatgataagtagaattacttatcgttgatctatgtgtcaaaataaaatattattatcaaaagtagatggaaggagtacctcggaagcctagcctatatatatccgccgtcttttctgttctccatccgcatccccttccccaccgtatccgcgattatccaacccccgccgctgccccccacccccccccccccacccccacaggaatgccctcagcgctcaccgcctctccgtggcgctccgtcaagcttcgcggccgcaagatttggcctcagcactgctgcgcggcctccctcctcctcagctagtagtagccgcctcatcacgcgccgctcttcctcgcggtctgggcgtttcgtcgaacacctggtgggctccccccttccgccgccgcaagaactcgatcgatcggtcggtatgaccgtcgcttcctccgacgaggcgtcccggtcggtgctgcggccggcaccgcccttgaagtgggaggacgaggaggctcacggttcgtcgccgggagaaggaggcgctgctggttgggccgtggatagcggggaccaagaaaatggtgcggatttggggccggtgatcgctgtggaaggacttggtgggctcgtcccacaacccgaggtggccgtcgtggccgtcgagttgctgcctcagttggttcaagaaccgggcaaagtttccccaagaatccatgaaaaggcgaattctggggagggtgagaatggcgatggcaagtatcgtgtcgtctacacagctggccgccgcaagaggtgtctcatctcgccgggaggcagcgacggcgacaggatcacacctcgcgacctcgccgtcgcctttcacggccaagaggcaggccaggtggctccagaagctgccaccgccgcaatcgccgacggtgctggtgtcgccgtcgattccgtgctcaccaaaatgcaagaactggtgaatcatggttcatgtggcaatggcaagaacaatgtccgaaaatccaggagaatccacatgaagcaagctactgccgtgcctgtttccgatgagctcaagaatctccatagccaagaagcagaggctgcccatggcaagatcaccgatcaatctgattgcgagattaagaaggagcctcgtgagagttgcatgtcctctattgttggttctgatgacagccacatcagtggcctgtccatcaggttgcaaagcttggggatcaacatcaccagtgtgacaccgatcctttcaaagaatgtatctagtactgactgccatcccaaccaggcccggctgttgctttcgcgccacgcggtggagggctcgccgcttctggggatgctcacaccgttggaggatgcccttgtgcacagttcagggctaccaatcgaggtcgttgacagatatggctgttcctatgacatgttcctgaggtatctcgactccaccacttcctacagacttattgtacagtggaggaatttcttggaaatgagccacatgatcccaggtgatttggtgaagctgggtgcgtttcgcttcgaggggcagcttgcgctgacattgttgcattatgggaatgccggtaaggcgaagaaggtccttgacagaaaacttaaggagaagaaggtggagtcaaactccactgtgacagagaaaagcaaagagttgacttccagggagacagaggaaagcaaggaggagttgacttccaggaagacagatgcaaatgatgcggagagtgcttcaagtgtggcagaggcaatcaagaagaagtggccatccgagatgcttgaggcagcggaaaccttactaatgctgtcgtgttctggggataaaccaaaaccatcagagtgattctcaatttgtccggagcaatgtgcaagcagttcctaagcagttctattgtcagaatttattctgaaggtttcgtagttctcagctcatttttgtgacttggtgccctgatcactggtttgtgtcctgggctgtccatagaatatagatacttaagtagtgattcttagtattaggtatactgtcaatatacctcaaattagacagagtttttgcaataaagtgggcatttaagcatatgatttgtctgttgtattagtttttcaccctgacaaattttctgcctgatgcaaagtttacacttctcctaaaactgatttgaatggttatttctattgtgcatattttgttatcctgtgtggagctattctgttatgctacagttacttctccaattgcatgattgctgtgctgaatcttcagaagacgctttgcaattttctttctagcctgaattttgttcctgaggtaacacttctatgaaatgcttattaatatttaatttgtactgtaactgtgcatagtcatgagcaaagttttgtgccaatgcatgcatgtaggatgtgtcgcttttgcttcattctattactgttctctgtttgggctgtagtactctaatcatccaatgtcactgaaacatcagaataaaccattgagtcttgtctgtcaggtctaaattggtactactagcataaccatatgtaattcgattgaaccctagtttgaattcagaatgttcttagtattatattttattcattgggttatatagtctggtaaactttctagtaatcttaattgatgttgctaatatctgtttataatatagtataatatactatggtttaggatgccatgaacttagttgctttctgggtctagaattgttacaacttacatagtccctaatttgcttgaaatagttggcacacgatactttgttagttgtgatgaatttcatctgtgttgaaaagaatggacactttctcatctaaacgatgaaattttcctatccttttatttggaagagacctagtaggaaatctactgggttgatcttgttacaaaaagttgcttcaggttaccatgtcagttctgacaactacatgaaaggcccgtactttcagacatgtcaacagttttcaggatgtcttgctactgattccaggatacatgatacactgtgccacgtactttcagacatcctaaaatattgcacctttattacagttttcacttttcaggatgtcttgctactgattccaggatacattagcactagatacactgtgccacgtacattcagaacttttgaaaaatgtcacaccttcacagttttcaggatgtctcgctactgatttcaggatactttagcatcagataccctgtgtcatgtacatctagaaatcctgaagaatgttgaattctgaataatgtttgcccctttacagttttcaggatgccttgcactgatttgactttgtcgccttcacatttgttcgtaagatattgagctgttgtaattgtaaggattgcattcactgacgattatttctgtagaaaaaaagttgtgatggtaagaactgcaaaattcctggagaacactagcgacagtactaatctacaaaggtttatcatattattactttagttactgatacattagcactagatacactgtgacatgtacgtctagaacttctgaaaagtgcctggggatctaatgaagagctgatttggtagaagggagctggagaagaaacttgtgaatgggaaatattttcctacagatatttcatttatattcaacttaatgcctgaaaaggtttgaaaggtcatagagctggtgttttccagtgacatttttttcttctgcagtcgtgatgctgatgcatgctcttcgacagataaacaatcaggtctggtcaatatcgaccctttattcatttacacttctttgtactattgccagtgtttgttgtcttgctgaatttgggttttgtcactacctgatatttttattaccatgtaaatatcacagtcagtctccagtcgtggtgaccattttccacacgaggaacagatgctggaagatgacctgaagattgctctgtttgctggtgacctgaagatgaagtttttgtgctagcttgctaaattgcaattattatttcttaatggccaaacattctctcatgaattgcgtcaatcagagaggcctgacccacttccagaagattgcgtgacgtgctgtgtgaattggatcccaagatgttcttcagaggttagcagggcagtcaaaaatactggctgcttgttatcgtcagcatcaacttgttcttgccgtcgtcatgctggcacaagcctgcccatgtcaccacgatctcgtcaccggaattaattccaggtcccattttgttgttatctctgaattccaagtcaaaatcaaagctttctttcactgttaatcgtgtggatgtggaaggatgcatatacaaatatatacaatcagaagctactgctgccgttctgcaccggccccatggaggaaaaaatgaccatgatcaagacaaaacctcagtatctgttgggtcttacacggagatatattggttgcagagacatctgaacctgcaaatgcctaccattttgttgcctggtgctgacattgcaagcagctgatcatgcctttgcatgcattcccattgaatggatcagcattgacagaatgacagctctatttgcaaaatgtttatttatacattgtagagataatttcttcactttgtgagatggcaagttagatgaaccacctttgttttcaaccatatctcgtaagcagaaatgcacacctatattgactaaatctgttgcagggccttggcttttccattgcattaaaatgaactaaaatttgtgagcttatgactagcttaatactattatatcacttgtgaaccagctgtaccttgttgtagaccatgcctgaccttttgttgcatgagaacttgtgtactgaagtctgaagggacactgtactctatgtcggctggtcaggattaaaccatttcaacgcattccagcagtaagtcttcagtcacagtctctgttactgaacgtgttacccaataatcttgtgttgactggaattgttcttctgaacctactcatgagaatcattgagggataatgatgtactcctaccaccgcactctgactgacatctcactgggcatgcccctgtttgtgagccactttcatgtaggagtattacccaagaatcatattgactttgagaaactatcaatgtgaagtgtgataactcgttctccctctgtacagattcattgtattaggaggagttacatctccaagatcgagttttttttaggacggagagtagtacctccgtattaaaagaaacctcagagcaatagccaactgacgatttctgaactaaaataagaggcaattctagtgatccatactgttttgatacatgcactccctcatattataaggtgttttatgtttgttttaatttatacgtttttgagtttagcaaaatttatagaaaaaacatagtgctatctactatactaaattagttttattaaatctaccaccgactatatttttttatagtatattcgttatgttttaaaatgattttcatttttctatacacttggtcaaacttagaataaactaaaaaacacaatatggaacggagggactacttaaaaaaacatcagcacaatagcgaaatgacgttggaagtaaaataagagggaattctagtgctatacgtttttgagtttagcaaaatttatagaaaaaacatagtgctatctactatactaaattagttttattaaatctaccaccgactatatttttttatagtatattcgttatgttttaaaatgattttcatttttctatacacttggtcaaacttagaataaactaaaaaacacactatggaacggagagactacttaaaaaaacatcagcacaatagcgaaatgacgttggaagtaaaataagagggaatactagtacaaataatgttgtgacacatggtattcagtacaattctgtttatttgaggagttgttaagtacaattgtagtaaaattgtacattcggtgaactaaagacatcaacctgcgactgaaatcatggcatatatactaaacttaacactataacagatcagaacagcaacatctggcgaatcaatcctgtcatacagtacaccaagaagtttgaattttcttcacatatatccacatttgagttcctacctacacatgcaactctcttcagcacatgcaaatacacagttacacgcacaagccttatcgcccattgtttcgcttatatttatgcttatccatatagtttataagaaaagataatttatagataaaacttttatatatctgcacttagcaattcaaaaccaaatgctgtaaaataaaccataataaaaaaaaaaatcaaaaaatcaactccaaaattaagttttaaaatacaaattatagtctataggcataagcataagtgaaacgacgaataaattagagttggcagggtaccccacatctgaacccctatatatacacaaacacaagacctaggatcactcataccataagcaatccaatccgatccgatccaatccatccaacaaccaccaaatcactttcagttctcacacaaagtttcagataaaattcagctatctgaagacatcagaagaagtagctaatttaagctaagctagagaagatgaagaacaagggcagcagctgcaggtatcttcctcactcttctgcaccatgcgccaccgacggcgccagatgtttccgctgcgaccaccggccggcgatcgacgagatcgtcagggagcagtcgctggtgacccagctgcgcgccgtcgtgctgccggcgctggagacgaaggccgacgacgggcgggcggagatcgtggcgcagctgttcgggagcatactggattgctccaggaaggtgatctctgctctgaattctcgctacgtcggagaatcacctcctgacgatgatgagatcgtcgacaaaaggagggcgaagaggaagaacagtgagggcaagaagggtgatgatcaggtgaaagtgaagccacatgagcacaagagaaggtatgatttagcatttttttttccactattcatttggactaattgctgtgatttgtacaacagttgctattcatccatgttctttagcttgcttaattgttgtgtgcaataatcatagttgcatatattatagttggattaattgtcacctattaagaggatagagacattttttataagagtaatgacactagctgtactagctagctatttttttttctttttttgaaagatcactagctagctagctagctaatgttgagtgtgtgaatgacacaagtagctaaagcatatgttgctcttcatatctttatcatcccgatatattgcttgtagatacctatatatatgttgatcgatgttgctatatatgaaaggtccctttcctaataaagtgagttcgatcttgatctactttggattgtctttcctcattggcactgcacttaggactctgaattgcctcagaaaattatttgagtgtgcatgtgtagatgatttgaagttggtcttgaagctagcattatgtttctattcatgtaaatatttcctaattgaattaattttgcccctcatgtttcagcaggagatacactaactcaacatcacaaatcacagctgttccacattatgacggtcatcaatggagaaaatacggacagaagaatattaacaactcaaaccaccaaaggtatatacacatatatccacaaaacctcaattatttcatctctctctcacacacacatcaaggttccgtttttgtgcccaacatacgacgcaactaattaattaagttttggcaaagagaattcttatggcacaagcacacaactaacaatttgcaacataaattaataagcaggagctactacagatgcagctacaagcatgaacaaaactgcaaagcaaccaagacagtgcaacaactggacagtgccggcgaaaccatcatgtacaccgtggtctactacggacaacacacctgcaagactaacatgagcaatgctcctctccatgttgttgaaacaagtaccactcaaagcatctcaacaacatgctgctctgatgatcttggcgattatagccaaaagatggagaacatgcacacaccagagttggcagaagtgtgctctgatgagcttggttcttaccatgcaataataggggcagagcacagtgcactagggttggaggatgaacacatgcacaagctgctcgacacatttgcatgtggagcattagatctggacagctgggagattgatgcaattgtgagatctggtttctgctaggtgaattttgatgcatgttgctgtgatcagttttggtgcttagatggagtttttttgtattatatgtggttatatggtgcttactgaactttggtgaatgcaaaataaatagtttagtgcttgctagatagcaagttaagttaaaaaatatagttacttatattatttatatatgtaagttggtattgtaaggtacaatcaacaaccttgaagaattttgtccataaattttaagtatatatacatgcaggttgaagatatgaaacacactgtctatgatgagttgacactatatataggatgaattcagtgtaataatgggtctatttggtgtactaacaaacgaatgatgatgcacataagaccatctctcttgacccatgtatagtacaaggaacaagtagccatgcatggcaacgaaaatgaaaaaatatgtttgtgtttgacataatgtcaaaacaggcatgatttacctaaccctttttaacttgtgcgacttgtgtcagtaatatttttttaattatttctgacttttcgaaatggtctcatatgtatcagtagtgattgcttcctatatgtcatataagagtgcgttctatcctacatgttcccaacttttactcactcgttttttacatgcacgctttctgaacttataaacaatacattttttaaaaaatattcctatagaaaagttgtcttataaaatcatataatctatttttcaagtttttttatagctaatacttaattaatcatccgttaatagccaccccattttgcgtgtgtaggagagaagttcccaaccttctgtcatgaacacacctaagtagacagtaacacattaacttattactagttatcacccttacatttgttggtatatacatatttatttccatatgatgcatgctaatttctttttttttatttgtataatgacaaaatctattctataccattgagtttgttcgagttcaacgatttaccattgacattgtctctttctataatataccggcgactttatcgattgttctacaatacgccattaggctggacatttttttcaaaaatacccaaaatacccttatggatatacaaggttaacaattgatttatcatattagaagtttcaaaaaaaaattgaaaacttttatgtgacctccttacacaatatggaagttcgaatagaagtttcaagttttttttacatttatatttttttaaaaaatataacttatttgttatatgctatataaaatacttttttattgatgtttttaatataaatcatttttcatacactacataagatattatttgctagagagaatttattctataccattgagtttgtacgagttcaacaatatgtcatcgatattgtctctttctataatataccgacaaatttattaattgttctataatacactattggactgggccttcttttcaaaaacaccaaaatacctttagagacataaaagattaacaattgatttatatcattagaagtttcaaaaaagtatgaaaattgttatgtgaccttgttacacaacatggaagtttgtatatatgtttcaagttttttctggtatatttagtctttagaaaaaaatatttttatgtggtatatgagagaaaatttgcttatacgtacgatagataatagcaaaatttgcttatacgttcaattaaatccttgttctctccaagggagtcaaaattcgtgcatcaagcatgtcccaacattttctactagtatatatgttttcctccttccaacacctatacataaagcataatcaattaatatagattatttaattggtgttaattatatcgcacgactagaatgatcatatccactgaattgtcttatttttgttctcttcacgtgcataaaacctataaaaagtacactatgctaaataatagcagatacaacaatcaaacgtataataatgcatttctaaagatagaaataaacgataccacttccacagagtagagttgcacacactaatcagcatgcaggctgctactactacggtatcttttatggatattttttttgctcttaacctactttttttatatgaaatttggatatatgttttccttgattagattcaatcaccaaactagtccttcttatcaatattcccacatggatccactcttttcaattgcatcatttagctagtgtattctggttatttccttttttttttactttagcatattatggatatttttcatattctatataatatttgtgtggtactatatacctgtctggtatacacattgcgttgatttgaattattacatcatcttaaaaattgtatcctagtacagctacattacaactacttgatgagtgattgtgctttctgtttaaaataggacacacatgcaaaaatatggtcttggaccgttcatattttctaatctagtagtattcaattaggaatactagaatattttcttcactgttagttgaaatcacaaatcaacggcagatcacttctaccggtaatagtactagccatcgaatattaccggtattgccattggtggatatgaaggttttgtaaggcacatatttggtgcagaagctataatatatatatttcgtccattttaaaatataaaacgtccttgttatttattttcgactgatatttgaactaaatgttttgtgtcgtatatatagtatcattttatatttgtgttttagaatatcttcatatgaggttattaattagttctcgtacttgttgataatatattataaaaaatcaatgatcaaaggataataatgctgaagaccttgtaaaatgttaatatactcattatattttattttagaatggagagagtagttgcaagaagttaaatatgggtacaacactactactgtacaggttattttgccagaagcatgtcctgcacaccaaacagaggtgatgctgatggcgtcctaggaagactattttgtttcgattgggattaatttgtttgtccacttgctaaacaaatcatttgggtcttgtgctggcaacacaccatagtttactttatgaacaaattaaatataatccactgaaagttcgatatgaactacaatataagaaaaagaaatgtgagatggacctgagtagaaagaaacgtactcaaatgcgcacatgtgcaagcatgcatcaacacagaaagacgattggacaaactgataggagttagatatagagagatgctcttttaaatatatcgacatgcctgctccatctggcaatattaaatacaatgataatatttggttaaaatttttaaacttcgatcattttgtatgagactaagtttataaatctaataagtttgtgatattacgatagtatttttaaatacacataccatttttaaactaaacatttgagaaattataattttatcaaaaaaatattttctaaattttatcatagctgtcaaatacgtatgaccagagagatctagtaactatttatggatttagatctaaaagtagcgaacggttttaaactagctaatctcttgccgacgtcagttacattatggatctggtgagacgtagtgtattgttctgataaagttcttcacaagggttgcaaaatataatgtcgacctggccatgcacaatataatatggcctcttgcaattaatgaatgatgacataatcaagatagataggtgaaacacgatcacatagttcatgaggtgacattcatttatcttgaagtcttgaacgcttagacacttagtacaagatcgtacacggatatcagggattcgtttttaacacagcttagaatatttgataaaaagtttactattgactatggctgtgtttgaatgtgcaaattactacttttactaattcatttttttgcgcacgtttcccgagctactaaatggtatttttttaaaaaaaagactttctaaaagaaagttgttttaaaacaatcatattaatctattttttaagtttttagctaataattaattaattatgtgctaatgaattttttattttacgtgtgtggggataagttcctaaaccgaacttccaaatgcagcctaaggaatacacctaaagaaacgcgttcctagcatgcatctcaggataatttagtatggaggagaaagatcaaaatacaccttattattggaaaagtagtattggtcggtggtaagtaatgagtattgaagggataattttctttaatttgctgaccacgagtacataggagggtagagctgaacttattttggggcaatatttaaactctataattaaacttattttgggactagagggaatacactagaagagacctttaattcttcctctgtttatatgtagtggtagtttttaatattttagttttatcatctgtaaatttttttcaacatgatttgaatgttatgtattttatgagtttttaatttatcataaaaaaatgtcataacaaacagattgtgaagatgagaagggaacaaatccccctcccacccccccccccccaaaaaaaaaggaacaaatggagtgatagaaaatagataatatatatggactctttcagtggtgagagaggacattttatcttaattaattaaatttctttactttatttacggtttttgacagtcctctcttatctgacagctggaacctttttattttcgagaaacagagcaggttaaaattacatgtcctaatacaagaacagaaagaaaacaactatcagtcggcatctaaatgttgtacatctcacacaggttaattctcgtcggcagagataggcaactccatctgtgcggtacgtgtcttgaattaccatgaatcacacaggttaatcggaacttctgtttgctgctgaaatattcttctcttcctctccagccagatattcatattccatcacattgtgagaaaatgtttcatcaccatttctcattttctctaaattcctttggccgattaattgcaagcagggctccgcctttgaattttgaaagccttagtacaaagactacagatctgaattatggaacattaatagttactccatgtccccctcattccgatgaaaactagatcaacgcgccattgagttgagagaagttccgattgaatccattgcgttgagagaagttccgattgaatttcaatatgaatctttgggacttctcttgatatttatatccactatctatgtagcagttggagagataaaacttaaaagaagtttccaacgattaaagattatatttaatttcatttttttttttggaaaggatatcaattgctagaatgtgatgcatagagatctagctaccgatcatgcaaattaattaaaagcgattatattcacaactccattattgatgtgtgaaacatcaccatttgtttcagtaaagatatgggacgaattaaaggtagtacatggcaactagctagctcgatctataagcggccgccacaacattgtcctgaatggagttattataatctcggaattagcggatagataaccatagagactttattttagtttgtagtagtttattgtgcgagttggcgcttaactaatacacagcgatttaattaagaaatgtaccgtgccaagctagctagatgcatgcattaatagggtaccctgcagagtattaattaactgaaatactatcccttttgtttatccatctgacaattcaactaatatctgatgggaatctaagagggacagtgaccgggcacgcgttaattacgccaatttgcactgcaattgttctagtaatttgtctgtttttaattagtttatatatttgatggtgtggcgccagcctgaggttacttgtgacgttttgagctaggccactgatccagaaggttcaaatgatcaaatcatgcgaacgacatatatatctatatatcattctcgattgtggccctgtttagatccactgctaaaattttacaccctatcacatcgaatgtttagacacatgtatagagtattaaatatatatgaaaaaataactaattacacagattgtgtgtaagttacgagacgaatcttttaaacctacttgcgtcatgatttgacaatatgatgctacggtaaacatttgctaatgacgaattaattaggcttaataaattcatcttgcagtttacagatggattatataatttgttttattattagactatgtttaatactttaaatatgcattcgtatatcctatatgacacgctaaaactttacatcggatttaaacacagcctgaatcaacagatggcctatgcatgcagcaatcaatcatgcagttttgtatatatattcttaattattccgtacaattgagcaatgtgcatgcccggaattgcatgcagtgtacagccagctaaatcctaaaaacgtttaattttgtgtgtacggcatcgaggactggttcacttaatcaaaagaactaattaattggttctgaagagactattatgccatcgatcagctagctggcatgtgatatatatatataattaattgcattaacaccttcacttgcaatagaagttagtcgtgatgcagttcgacaggatcaggtgcatgcatatgtcagtcaggtcagcctgacggaattcagttcaacggggggattgagttgttgaaagatgatgaacaacgctgaaggatcgtatccggcgttacctacgcctgatggaccataatcttttcatttatatttatacttatacttataagctataattcgaatctttaaagctaaatttaaagttgattttaaatgttttttcattatagtttatttttttaacctttgcttttagatcgctaagaacacatataaaagttttattaagaaatcatttttcatttgtaaataagccaaacgatggagtctttagtgtactaaaatttgaattttacccttattaatttcaaagttaactttgtagttttagtttattttataacatttatttttttattgctaaggacacgtgtaaaaaattttacccataaattattttttggttactaataaatgatatataagtataaatgatgtggtactaatgtatggctgcatgtgcctaaggtctgtttgggccaccgaattgaggattgttgtcgagtcaaattatttagggaaatcaaaagcttttgcacaggtaggacaattggtctgctatcacgaatgttcttcgcttggatcattgtggaaacaaaatctttagggtggataacctagccatctaggttggtcccatctcagcttgttgatcgtatagggctacagttccaaattggcaaatcctgtcgcaatttccaggggatccaatccctttcatacagtgtttggagagctaatgacagtatgaaggaaaaggatcaaataaactttgttggaaaaacggtacggcgccgtatttctagacagggctagtgtgaattttgggagctagggtttttgtttgcaagtgttgtgtacaatgcaaaatggacattttatccaaattggtaattaaactattagtatgtgagtcgttggtctgtgtatgacaatataaaccagggtttgaactaatgtactaatggtcttggtaaacctaaatatgtacgtgtgtggtcttggacaagatatatatatatatatatatatatatatatgtgtgtgtgtgtgtgtatgtgtaagcggtcagaagaaaagtcaaatgagtatttgagactgagcaacatggttacgacttggataacactataaaaaacgatttagtacaccgttaaagacgaacaataattggtcgcatatgtaaaaatcgacctctattttcacacctatatacaaaaatctatttttgaaggcgagcatcttaagaggccgcatataaaattgagcttattttcacgggcagtcgtcttaagggactgtatacaaaaatatattttcgcatacgggccttaagtggtccgcatgcgaaaatacccccctcttctccacagttttttctcccctcccctcatgatattttcctcaccttcctctctttatctcctctcctctcctctcctttaagtgggagctggcggcggtgggcagcggcgccaatgaggaggtggccgggagcggacggtgggcggtgcccccgccgccggcgccatccccgtccccacctggcgccagcgacgaggaggcgggcggctctatccctagcaccatcgctgcagacgacggcgaggcagctcgctgtaaaaaccggatcctcgccgccgcctccattagaagctagggtttcaatttttctttttttgagatttttattttttatgcggccgacataagcactcacatgcaaaaacaacgattttccatgtggtttcgccacccgtatacgaaccacacaaaaaaaataggtttttgtcgcatggaaaaaaaagcttttttatatagtgtaaagagggtaattatagggttcagcaagatactgataaatatttaatcactcttgaaaacaagcctatttgaatagagccagaattgaggcggataggaacaatgccttaattataagggagaaattgaatgcatctgtttttattccagaatctctaatagtctactccacataagggttaacttggagataatatggctagagtgtcaacttataagctgactttcaccaaaccaagggaagggagaaattgaatacattttttttactccacagaaggttgtactctacacaggtagcccaatgagctctgcccttccccgatgctcacctctcttcctctccccatcccctccctctctatacgctttgacggcgacatgatggctgtagctgcgtgcaggcttgtcttgctctgctccggtggagagaggaggcctcgtcggcggccgagacgagagggacaagaaggaaattaaaatggaggaaggaggtggatgggaccatgaactgtggctcaggaaaaaggagtggaggtgcgtgttcccctccagggggtcacgcctccctccaaggatgctgctcggggacgggagatcgacggtgtgagtgaaggcatgagccagggctacctgttgtacatggcctaacagttagacagttcttgggctagcccatacagagtgaagcctctatcaccaatgtgttggccctcattgtgagtaaaacctacatgctcactaaattcaaatgctccccaaaagaacaaggtctaaacaaaaaagcaaaaatgttaatattctttggtaagatctgttaagtatgtaggaaagaaatctatagctagtctgtatattcttccaaggatatgcacatcatgtcatttttttttacagttgcaacgtaaacacaatttgctagttatataaaaaatacattagttctatgaatttatggctattatttgtctatcattgaaggcctcatgcataatcgataatttaggaaacatatataatcctatatacctgtacaaatcatccccactactacaattctctgcttcctggtgcttccatgtcaccctttttatccccaccgttggataagcatcgagcgcttccttccatccgcatcgctcctctcctcccctctcccgcatcgctactcgccggccccacctcctctcccgcatcgctcccctcctctcctctcccgcatcgcgctgctccgccggcccacacgcatcgactcccctctcttgcatcgctcctcccctctctcgcatctcacgccgccgcacccccccccgcatccccgccgcaccgcatccacgccacatcccgcttcgcctcctcctcttgcgccactctacaccacggttccgcttcacctccccttctatgccttgccacgtcgcacgcgaggtccgcttccccccttcccccctcagcgccacccagccctcgcttctgcgacccacaccgccccaacgacagttgcctctccttctcccgcgccgttccgattccatatccgagagaagcgaaacgaccgccgcccactaaaaccagacttcatcagcgtcatcaagacattaattttgtttgctcataatgccatggcgatatcgttgcggcccttcgcttatattgccaatgaaattctgcaatctacctccaccaactgcttcgtttcatctgaatctccattgcataggtacatattattggatttattcggagtacaatgatcttctgataggttttttcatcagtttgaatctttcatgtctacagaagggcatttgtttatgtggtaccgacggccttccttttgaatttgttctgtggctcctgtggattttcattcaggaaagataaatctggtacgtgccttttctcccttatgctttcacccggcttttgtttctttctactcttgatgatgaatgctcaatttgacctattatctttttgtaagttcaacaattgtttacaagataagttcagtttgattttattcggttatagacacctatttatttcgacttataggattcgttggtttatgctctcgggtagaatggataatacgataggttcttctcaaccaattatacgtcgtcgtggtcgaccacgccggcagccttctaatatcccgatcccacatcctaatcaaactgttgctgctgaatctcgacgtaggcgtaggcaagttatcgatgcaaataggaacagaggtttgttagaagattaacattcctacaagttgtcagtattttatgcagacaaaaaaaatgactcacattatcaatttcatcatttttccctagcatcaacctctgcagatcaacgaatattatgcccacggttaattggtgaatcttctaattctaatcatatagcacaaaatgaaccccctattcatattggttcatctacatccaatcaatcattcaatcacaggcgtaagttgtcttttctactcctaggatctaaccactttaaggtatccatttgctgtaaagattccttcacatataccatgacacacctttcaggcactatatttgaaccattgaatcttggtggtccacatcattcttgcagccactgtggtgcttttttttggtatgaggagtgaacacgtagagagagacatacttcaaatccatcaaataatttgtgttgcaaaggtgggagaatatggctgccaccctatcaacctcctccacagccattgttggatttattgacctcacaaaacagcactctttctaaccacttctttgatcatattcggcaatacaatagcatgtttgtaattacttcaatgggagctaaaattaatgagtccataaatgatggaagagcaccatatgttttcaaaattagtggtcaagtctgtcatcgaattggttctctgctcccaccacaaggtcatcgtccagaatatgcgcaattatatatttttgatacagaacatgagatctcaaaccggatcaatgttgcttcatcttcccgtgtcactttccatgctaatgaacaaattgttgcatccttgatagaaatgttgaatacaaataatcccattgttcaactattcagaacagcacatgaaagaatatccctagacgcatctgatcagttttgcataaggttatttggtaagctggatgcaaatggagatatttatagtgctccagtcgcttctgaagttgttggcctgattgttggtgatgttggatcagctgatgtagggcgagatattataatccaagatcgtgcatcacgtttgcagcgaatcaatgaaaatcactgcaagtttatggccatgcaatatccacttttgttcccatatggagaggatggttatcatgaaaacctcacatatcgtacaacagcatgcactcaatccatgcaacagaataaagttacaatgctagagtgctatgcatataggttgcatgataggccaggagacttcaatacaccgttacggtgtaaaagggtaacacaatcttatgaagtagattcttattgttgtgtcgaggggagccggatagcacattattgcacaccagccttccaaagtaaatatagatcatcaccattcaactcattgattaattctgtctcaagaggtattacatctggatcttctgttgggcaaaggataatattgccagcttcatttaccggaggacctcggtatttgtatcaaaattatcaagattctattgctatttgtagaaaatatggttgtcctgatctttttttgacattcacatcgaattctgcttagcctgaaattagagaagctttagcatcaattcctggccaacaattagcctgaaattagagaagctttagcatcaattcctggccaacaaccttccgatcgtcctgatattgtcaatagggttttcaaaatgaagctcaatattttaatggatgatataaagaagcacaatttttttggccctataaatgcaggtatcaaattttacattggtttccaaaagataaattttcctttctcttccttttgtagggttaaacatgcatgttaccaccatgcaacccttaaaacatatctttttaatgcagttatctatacaatcgaatttcagaaacgtggtttacctcatgttcacatcatcatatggttggccaaaacagaacccttagattccaagaagattgatcattatatttcagctcaattaccagatcctgcaattgaccaaataggatttgaggctgtatcttcttttatagtgcatggaccttgcggtcctcacaacacttcttcaatctgcatgtctgattgagccctgaaaaattattgtgcaacaattgatatggctagtattaagtatagcaaagaagtagaatctagtattaatatttggtggaacacataagagaatgacatacatgttcatccaataggatgccgtcaatgctgatgaggggatctgcagattttgatctcatgtttatagcatcccataatcttattagacgtccaaaaaccttgcagttttgctggccaacagatatatctttcaatgatgtagctaggttagccattgaggtaaatatgaaaaaacataataaagaaaaaatgaaacttaagtgaatatatgtactgagcaaaatatggaaattgaagtatagtaaaacattatatttacaaaactaacaacgaaaccaacctatgcatcacaatataccttatcagttcctgtttctatttattaggttgaataccttggaatatactacattgtgtgtgcaatttttataagaagtagggctgttctctattagaactttcaaaccattaggtgaagtcactctcgagaatgcatcatataattgaccatgggagaacacaggtgaaggtagatagactccaactctgctcaaggtctgtccttggctcttatttattgtcatagcatatgaaagacgtattggaaattgtcgacgccgcaatttgaagggccacttggattgagttgatgttgtaacaatgcgaggaatatatgcttttgtacctttcgcttttcctgtgattatttctccctctatcacacggcttgttagttgtgtgacaatgagcctagtcccattgcagagtcctcttgatggatctagattacacaaaagcattataggaacaccaattttcaagtgcagcacatgttctggaattccatttatagaaattgtgtttagaaactctgttggatatagtgcctctatagcagtacagttagtagaactgtcatcaattgaatctgagctataatatgacatctcactcgcttctaactgagcaatcattctattgtttatttctgaaaccacctcatttgtaggtgctaaaattgcacgctcacacatatatgatgtaagatttgatggttgacatcgtaagttgtagacaaaagaaatcaatccatctagattcctacagtctggtgatagaagaagggactgaggcatctctatgaacatgttcgttagttgctctgggacatcaacaaaaggttctgtgccatttcctattttcaaaagccaattagaaaattttcttaactcttctctatcttatgcagaaatagatgcagaggtaagcctcatattttcagttaactcaagaagtatgtgttgattccacaaataagagttaacaatgcatgatctcaaaatctgttgctttgtagcattttggatgactggtagtgtctgcttgaaatctccaccaagaactactgttataccaccaaattgtttgtctaatgaatttgggtttgtttcagacaatatatctcatagagttcgatccaatgactcaaatcaatatttatgattaacaggagcttcatcccacacaatgagagatgtttttttggatcagttcagctaaatttgtatttttctttatactgcacattgaatttttagagatttccaataggattttgaaacgggaatgaggtgttctcccacctggaagcagcaaggatgcaattcccgatgatgcaacagctaatgctatctttccctggcttcttatagaattaagcaaagttgtccataagaatgtttttttggttcctccatatccataaacaaagaaaatccgtccttcattattgatggcagaattataaatagcattaaaaacttccttctggctgttattcaaacctgaaatagcttcatctatagtggatggcatgttataaacatcgtagctgagctcatctagtataagtctattctgtgctgaaacacttccaatatcatctggtagtggcaaactaaaatgggataagtcatagccagcatctcttagcagtttatctaacttaatgagaagaacagatctaacataaggattggtgcagctgttggcctaagaagtgttgcggggcattcgatatgatatatcttcgctcatatatgattcatgttcactgaaaagtcttgtaggatttgttacctcacaaaagagtaacattgtaacaaaaagttgtcacagttgggatggtaaggcccattgagctgcatctttcaaagcatttgaccactcttggtcatcaccaaggagacctaatgcttcacatgctgcccgaaatgtaggatattcatgacctgatatagttctgatttcagcaaaggatctagggcccttaacgatgtgcagtagcattcgcagatagtaagcttctccttgtgaagggtttacataagcaatgcagccaattctacgttgagaaccacgacgatcatcccaatatttgccttgattgtgccacgtccaatgttcagggaattctatatatgtaagttgcctagcacattgatgcaaaaagaaagacctatatctaccagtgccagaactacattctccagtttaaacatgacacaagaattcaacccctggaatctagaggattaaccataccaaagttcttttttgacttctgcccatttgatgaagtcctagggaaaaatatcagttccaaacctctcataggtaatgctatctttaattccacattgaatcatacttattacacttcacattcttttggcttattcctccagattttttttgaatgaatattcctccagatttgattggagtaatcaatcatattggtccgtatgattttgcgagaattaaaattcaaaacttagagtacgtaccttttccaaacctgatcgttaaaatcaatgctctcattaattacttttgtgtaatctcagcaattgtttatatgcaacatttttgcagggaacagactcaagatgtcctactctggggacaatatggagaatcattcaacgaagatgcaacactccataaatcaaaggatggaattgtaatagccatctttgttggccttactgcaggaaaattttcaggttcattctttcacccaaacaaatgccctctcatacaaagaatgcagaacatttcaacttcactttcacctgcagctataacagaagcatcttcaagctctgctactgaaatatatattgacctggacacacctcaagttagagagtttcgcactaggtaattctctttaacccattcaaaccatttgcacttgaatattcctgttcaatatgtattatatttcacgtcaaaaaatgccaacctatctctttgcaatttgaagctactaatgggaacgtccaactcttgagcaacaactccctaaggttatacgtttaaccccgatccaagcagcaggaaaaatgtacaccttaagtgagatatcagctatgcctatttctgcctttcaggtacaactcaatacaaaagaaaaaaaaactatattgttattaccatgccatggattcctttcgccaagatttaatactttttattacataagggtggagctacatacagtgctactgcaaaaataactgccatactgtcatcaattaaatggtattacataggatgccatcgttgtgataaagggtacaacaataattctgattcaccaagatgtgcttgcgaagtttcattccgcaaaccaatgtacaatctcctactcttatacattcattcgaagaactaaaatagtttactgtaacgctaaccactctagatgtatctaactaatgtacaatgcttcaggtacaaactccttgtcacgattacagataaatcagggagtttagatgcagtagcattttcttttgttgctgaagatttggtagagcttgatgcagcccaagcttcccaaaacatgaagatagacccggccgatcatccaacagcactcaataatgccattggtaaaacaaaaatttttgctatagggatgaatactgatacatcttctaagttccctatcagctatgtgcttaagaagagtttcacaattgagcctactatgtcggtccctatgctcacagatagagaggttagtaaatactactgttccatattacttcagatatcctgttccatattacttcaaatatttcaaactaattaaattaaaatataaaactaatcaagcctttgaagaacaaagaggtactacagcttccaccacctgcaccacatacagataacccaaggtttgttgttctatcaaatgttctattcattacatttgtacaacaccataatttttttagataaaggattttcattaaaacccagcctctacatcacattggatatatagtactaactgctgatgccaaataaatttcagcacaactattcataatacaggagcatcaagcaaaagtacacctcctgaaatatctttggctgataaaactccaactgaaaaaaccaggtaaatatacaaaaaaaattatgcttaataaaatcattcatatgattattatccattactgcagctcaaccagaaagagagccattgatttcactaaagactccattgaggaaaccagaaggtatattttataaccccatttatattgccttttctgattaacaaatatcaactcacaaccaaccttggaacatttttccttttacactaccaaaaaactagatctccctgttctcaaacattacaaagaagggcatgtactactttggaaaaaacatagaataacataactcaactataatactgactacaatatttttggaactatttcatgcagcaaaaaactacaacatacagagggaaaagctgattttcctgaagactcctttgagggaaccaaaggttatacattattttataacaccacacatttcattatttttatattgatttttgtgatagataaatccactcatgacttacaatacttttgcctttaacactaactgcaatatcttatgaaccactccaaacagcatagagctacaaactgcattgcataccaatctgcctgaccaatctacataataaaaatggtacttattcttcacattcctaaagatttacttcattatcttacaagcacatccctgttgtactactaatatattctccaacacaaaatacaggtgaacacatgctgtctgacctacggtgatttcactatggggaagacttattatattttccttccatatgaagacttcattatgtcatatgcataagacttgctatattttattagggtcccattctgttctccatcttgcagctatagcattatctgtactacaattctataatatcagtactcctcgattacaaaaacatataagagatttcccatattttcagaatgtgtttgttcatattatcacccttttcgaaattacatagttcggtattactttttgcactcatatcccgtagcaacgcgcggggtatcttctagttatgaagtgttttttgctatgatgtatcaattgaaggacaaactatttttatgaaataaaagaaggcctgaatagtaggatggaacacagtaaaatgcctcattttcacccacaaggacatatcgggttctgaactgaaacatagtgtgatctctaagcagtgttgtgatggaaacaatagactataccagctatagcaacaaaaaccctacagtcacttgatgtacacaggaggttcaacgtccgatggaatggttactgacagggcctgattttagcacgatctctaacatttatatatatatatatatatatatatatatatatatatatatatatatatatatatatatatatatatatatacactagaatttatgttcaagaaggaggcagcaagcattatccatgggtatctctcaaatatcaaaaagcagaataaatattactgaaaagctaaccaattgaactactattggacttatatttccttgagcacatggcactcttcttctgaattatgtaaaaacaaaggaaaaaaatattctgccaatgagatgaaatataaccccacacaaaaggttcaatgtcttgccccttgatcttcctttaaaatggagtcttaagttcttcgttatggcaaaagatggtaccttaagttgtagaagtaaatgttaagggctaaaaacaatgactcagtccttgtccagttcatgttgattgccgagtatttatacatatggaccatatatatggtcattgacagagagtaaccaacactgcctgaattccatgttatttggtgattcttatgggaatggcagaaggagaaagtgaggaacagagtacctttttaattcacttcttttacctctctgccttcctttctcgattgaaatagacataggaggtatcagagaacatgttctgccggcagggacaatgtcaggatcagcgattgcttcgcttcatgcatgattcgcttcagtcttctcttggcatgtcagtatgactagtcctgacttaggctccgcgctgtttcagaagacggcaaaaccagattgagcaatccttgttagctttggccaaggatgcaaagaactcgcggagcagcaaacttacgcgagcagcgaactcaagcgatggcacacacgcacaagtggcaaattgtagtggacacgacaatggcgacgcacgcgcactcagcttttctctctatggctcaatggagataaacacaaagaagtgcacacacacaggtttttgtagcaattaacaaatgactgaaaccttttctctgttattacaaactgatgattacacggcttatgtagccttgcagacatgcatacacagctaacagcccggctgggtcgcccgcacgaccatgcatgagccactcattcatccgatcggcgcgtctcacgcgcaagaatcgctcctctgagctgactgaaccacgccacaacgtgctccactaatcttgcatgcaactatctaacttgccactaagacccggtttaaatgggactaaaacttttaagtccctgtcacatcggatgtttggacactaattataaatattaaacgtagactattaataaaacccatccataatcttggactaattcgcgagacgaattattgagtctaattaatccatgattagcctatgtgatgctaggctaatcatggattaattaggcttaaaaaatttgtctcgcaaattacctttcatttatataattagttttgtaagtagtctatatttaatgctctaaattagtgtctaaatacagagactaaagttaagtccgtggatacaaacaccacctaatcctcttattccctagactttcagttgctagttgtgctgcaacacatataca

SEQ ID NO: 24096 - DNA, 12345 bp, Oryza sativa
agagttcctatggattcattcactgtagcagcctttgatttgtaggaattggtcataggaaaactgaaggaaatattccttcgttgctgattctatgggagaaacacaggaaacttcctatctagtctgagctcatttttcacttgctttgcgtaggatcgaggcaatcaagctcctaatctctttcttcagagcaggagaacaagcaatgaatggataaaatttgtgttggatgcagtgtatttattagaaatggaaaatgggcctaagttcttaagtaaatatttctgtgtttttcctatacccaattcaaacgcattgtttacattcctctattttacacgtgaattcctattctatttttgtgttttttctattcctgtattttttcaatccaatgtttcaaagagaccctaaattaattaacagatggattctccagactaattaagcttctcctcaacgaaatatacaaattcactagggtggaatttagtatatctgggcctttcgtgttaactagattaaaggtcaaattacactagtccatttttgttaacaacctccttcactgaattcaaaacaatgatagttctcaatacaacttggaagtgtttaggcctgtttggggagtttctaatagctgcagcttctcctagaatctccagttgccagaagctcccccaaacagttcaagtttttactcagattctgagaatctgtagttgtaaaatctggaaaatgaactagaagtcacctaacttctcagtagctacttctcagaatcttaagttctcccaaacaggccttttagctaggacgaggtagaataaaggtgtggatacaagctactaaaaagagactagagtgttctgaaagctccagtagaggaactagcaagagaggaagatcgacgaggttcagactgaaccaggtcaccactacccactgctgccgtggccgaagccgccgatgcttgtttgattcgttcgatgccttccaatcaacgttgctgctattttttatctcccttcaaggatttttgggccgggcttggaatatggctaacatagcccatgtgtggttcaattgagtttctaacaatcctctctttttaaaatttggcttgtccacaagccgatgcaaataattgccaatgccatcaggatcccatgctatttgaagttatttggtagaagtagtgaacctgtcatcagtaataagattcaaagtctagggcatcattgcatggagtagattcactgcactatttctcttcttgtagtcactcagaccctctgtaataccccgtatattaaaagatattttgaatttttttagtttgggttgacttgttaaaatagagatgttaacataaataaataaaagaaaaatatctttagaagtgggccaacatgagaaggcccataaacccaacccattagttctctcctacaacctagagagaggggaaccgaatcccacctcccctcttggtgccaccatccctctccttggccggcctccaaggacgcctccttcctcccctcctcctatgtttgcatctctcccctctacagcaaattgccctcatagatctccaacctaagaacctggatcaagaagcgaagtgtaaaaacggaacgaggagaatagatctccagcccaagaacctggatcaagaagtgaagtgtaaaaacggaacgaggagaaggagaggagtaggaggggttagatcagagtctcccctattgtctcctcacaagttctctaacgaaaccctaggtgaggcttttctccttgttgtatagttgttctagcatggctttagtgttttaatttgtggttagagaaggctagagaaggagtttgggttgttgcagtttggtttgttacagttctgcatgtgggcagatttgcagtgcttcagttttttgatgtttcggggctctaaatgttatttcctgcaaaagtgtataactagaaagttgtagataatatttggatttatcttctaaccaaagggcgcgattttatctcaagtggtttaggagatataatatttttagtatgactattgtttttatgtcataatctggatagtagtagattgaactgtttatggaggggttaaacagcaaaatcagtcaggctgcctatagacaaagctgtagagttttccccaagctttccatattggtaaaatacacttttatcggatgattagaactccagatatagtttgttttgtatgtaccctctgaaattttggacagattctgaagcttgctttcaagcgcaaattagaccatttaaatggcagaataaaaatatgctttctacataaaagttgtaggtattgttccgtagattttcaaaatgtatatattttcagtcatagtcttttcatatttcaagatataaaggtttaaagcagcaatcttgtgtacagtccaagcggcgttccttgtattgcgttttaacgggatggggcagtaggttcacctttttattgttttatatgcatgtttgaatgtgtttgcttaggttttgtttgtgattaggttgtgatccttcagatcgtgtatgataccaacccttcattggaggtaagtgcatgacgaactaattgtgtgattcttggagtgattgctctatctatttattttcattatatttatgtgtgatatgtgattacatatgttcagattgttcatgctatttagatttcgagttcatcttatgtttacgatgttattcttgtttgatagtccggattctggttctgattaaataattcaagttccatgtttgccatggatgtgtaatatggtttcaatttggttctttgtttccggtttcaattattcatgtttcatgcgagccatgtgctatctagttttgtattcatgttcatgtgggtaagcgctgatcacgcttacttggctttgtcggcaaatgctaggatgtattcactattgtccgggatggaaactactatttcaattcatgcctacccgggatgggaactactatcttctttgacttggtgtttgaaaatgtgtttcctatcaaagaaagaaagcattctgttcatgctttattgccaatgatgtgtatatgtgttttctagtttcatattgtacttgctgagtatttttatactcactcttgtgttttatttggttttaggtacgcattgagaccgacatgcatgggcgggaagtagctcccttatatatacatttatctgcacactatcaacctatattgcctaggtccataatgacacttaaactatatcatggtccagtcttataataatcttttagatatcttttagtttctttccatggattatatgcaaagttttaaatctccggctaagcctcttagctgctgaccttctcaacagctaagcacagctatagctggagatagctgcagctaagccatttagctgtttttgcaaataaataaataaataaaagacatgatcttggcataacttcataaccattaccaattgatacataaccagttcaaatgagtacattacaagttcataggagtacattacatcacaggctaagtggttaacagaatactgaaacatcagtttcacaaaagtacagcattctggaataaagacaacagtacaacacaaaggtcatcaagaattctggatagtggatactaaattactaatatgaggcaatattgcaatcttcatttcttctagtcatcaatcatcggtctaagagacaaagggagagggagagggtgacttatcagaatcagaagtctgcattggaataccatcatcacaatcttctgagtcggatgatggagcttcaggatgcactggggcattgcgcatcaaagactgtaggcttctgactttcctcttcttagcgtgcacaggccttttccttttagctggtgctggtgcttgtggtgttgtgtgctgctgtgactcttttgcacattgttgatccatttcacttgatgaaggcacaacaccagtaatgaattcattgtcaccatctgccacaacatcatccacttccttctctataggatctctacccttgttctctctcttatttcttaacttggagttaaatttaacaaacaccagatctcgcatcctttcatgaagtagcctgttgcgcttctttgtatgaacctataagccaagtagtgaacacaacgctgcaggtcagatctaaattccataaataagcattataattcaaaatagacagcatgcacataaagctacaggtcacaaatttctttttacctgttcaaaaactgaccagttcctctcacaagctgaggagctgcaggtcaaactcaaaatccttgcagccaacttcctaagatttggtgtgcttgtgccatggttcagccaccattttgctgcataaacattacacaaattacaacaaaaatgatattcagcaataaaattaagttcacatgttgagatctgaacctggattgaaatttttgttctttcgctgccttacggcaatttcgtgtccaaaactcccatgctgatcttgatacaagttgagttcttcaattattttgtcttggatatcttcatcatcaatcaacttgtcaatacaggaaatcacacctgctctaaatgatccatcactctcgatctcttgcttatttgggaagtagtagtaggggttcaaatagtacccagccaggtgtagtggagccttgatcttgttgtcccatcttttatcaatgatatcccaaacttctatgaagcggctcttatcattatcgaatctctgagaaatttctttcttcgcctcaagcattaaaccatggaagaatcccattgatggtacatcgctgtccattcttctcaacacgttagccaatggctcaaagtaattaactgcaatgtcaacatttttccaaaaggtttcagatctgatcactttgctggctttcttccccttggcctgcttcaagtaacccaattgctccatctcatctgatttaaatagtcttactaactcttttttgttgtctaacaagctttttagattcaaataagctgtggcaaatcgtgtaaccccagagcgaaccaagtctctgttaagaaactttctcatcaaatccaacaccctagtatgagcatacaagaaaacagtcacttgtcttgcattagcaatggtttcctcaactggtccaagcttcccaatatcctcgagcatgagatccaagcaatgagcagcatatccattccaaaatattgatggtctttttgctgtcaatagacttgctgcagttgtgttgacgctagcattatcagtcaccacttggacaacatgttgttcccctatctcttctatgtacctgtccacaagttcaaagatatatttgccatctttcctgtcacctgagcattccactgaatctaagaagagtaccccatgagcactatgcacaactaaattcatcactcccctacccttcctatctgtccatgcatctgtcatgatagaacaacctgtgagctcccatgattccttgtgctccttgaatccatccatcaccttttccttccttttctgtaagaacgatccactcatctcatagggactaggccctttcagacttctaccaaattgtccaatggcctctaacatatgagcaaagctaggaagggttactgtgttgtgtggaatactagcttcatagaaccattgacatatgtactcacaagttctattcctcctctcttctcttttctgagttgtcaatgctgtttgaaccttattgcttagcttaattactctttgtgtcatactggcagattcttctatagaaggaggcttgtagtacttgtcaatagtatgaccacctgctacagatctagagctactagatcctgttgtctcctttggcttcaccacaagaacattattgccatgatctgaaccttcactgccactttcacaatctgaattttctatgtcaacttcagctctggccacttccttttctttgtttttctgttccttttcactagtcttcttggtaagcaaatcaaacatctcttgctgcactggacttggaactttctgacacttagtagtattgaaacctttaattccagcaagatggtacttaattcttgtaattccagcagtgcagaccttgtcacaatacttgcaccgtaggtgatgtttcttggttatgtctgggcagaaacagtgagcccatgcaggatcatctgagttgataccagcttgttttggtccagcttctactgagacagaggcagcactggacggattacctatacaaaaagcaaacttagcccacattaatgctagcgtcaaagctgcctaagcatcaaaataatgcaaactgatatagcacgtattatcattaccacctaaacaggcgaaacaagcaaacgagagatctcagggagtaagaaaataattcacatatagtaagatctacatcataaggcaagtatctgaaattagaggtaacaaatatggacaacttgttcacatattgtaagatctgcaacatacaagcaaaaaagagaggaggatgtgagaactgaccggattgttgtgccatgccgtcacctttggtgctgctgcttcagtgcttcggagacgttgcactgacggacctcctcgtcggacttgcgccgctgctcagctgccttcaaagccgccgccgctggttggacgcccgcttgaagcagcagccggcgccggtcgcctccacgagccgcttgcgttggtcgatccgcttgaagccaccgccgccgccggacgcctctgcgccactgccgccggccgcctccacttgtcttgcagctggagagtgagcgcttcgaagttggaatggatagtgtgctgctgggagcttacgagctagggtttgcagcactttacccacctctcgactctggtctagttgggccggtttcctcttgggccagaccggccgcgttttacaatttagctacgctaaattacggccagtttagcggctattgccggctaaattgcgctattagcgtcccgctattcttagcgctaaaaactgcatctcttagctccgtccgttcccagcagctatctccggctatagcggcagctatagccggagatttaaaactttgattatatggatggatagcgctatgggaatgatgttattattagtttaatctataattgcatgtcgtggatgttcgtatttataagagagactctttcaaaatttttaatgagtttaggacttagtggtttctgtaccgtagtgtgtagcattctaggggcctgtttggtagggctccaactacaaactcctagctctgaactccaactccagttggagctagcccctattggagctggaggtacccctgaaagtgataattaccttggggaggatggggaaagatatttatatcggttcgcaatgcattaaataacacggttgtgtcatgcattgatccaggttgtccaatagatgcatagataaatctcatatcatgatcacaaatagccatcacattttgagtggttgatttagatctaccaatatatctgatcttctcttcatctggaacaactgcaaggatatgagtaccatcaactgtcccaatgcaatctttgaaatgtggccacatacgacgatccttcctaattctatcatggacagtaggaaagtttggatcctttggatgcacaatatcatgtcccaactccacaacagcaaacaatacttcttcaaattttcttgatattgtctcaccagaatgcttaaaacgattttgtgccctttggtttgatgaaccgtcacctagaatgtacagaaaaattgcaagtgcctccattgtgtgcatgtgtacagtaggtgccctttgcagcaaattgctcaataacttcgtcatacctagaattggataaatgggtatttggacgattacccacaactacttgatcagcaaaaatctcacacacaactctagtgttgtagtcattccaatcaacagagtcaattggcattttaacactcttcgatagcacattttgagccatgcctgccatccattcacaccatagtttcaaaaatttaggtcaatgttcagaattactagtatagtttcacataatatgttcaagccaggttatactacatttatacaccaagaacttttggccaaattatatatgaatgaaccctgaagtggacaccttttttcccttagtacaattatatgcatcaatctgaaagtcatagaaccaaggaacagcttgtaataaatcaagcatacaaaccaatataggtacctacattatcctctcacactgcaagagaaatatagaacatatgaacatatttatccagtagatcagagtctacaagtccatgtaacacaagattgagcggttacgaagcaatcatcaacccaaaagataaatccatctcacaaaaattatgcataaaactgtctcacagaaaacatgcataaatccatctcacagaaaacatgcacatttgaaggaaaggtttggaaaggatttctagggtttgaggaggggataccgtgtggggctgaggtgtcaggactcagcctggaaatgagatgcaacaaactgaaactctgaatactctgaactttttgaatgtttgagttatctgaagatttgaggaggagatgtagactttcgggaggattatgaagatccaacaacaaacaaaccaagcgaagcgatatcacgaaatcctagccattaatcgatgtcggggaccactgttctggtcattcttttgtctttttcctacttttgagctgtctgatgcttgagagctaagactacctcactttgtataaaaacgaattgcatctgagaatgaaagagatatcaaaactcgcaattatcttatcttaggaagtaatctagatttaggaaccctagtttaggtccttgcggcgcacaccaaatacgttttattctctaaaattgggttccatttctagtaaaatctgtctccgatcttgacaaaggtatcagagctcagctctttccctggctctcaaatttggaaggcgcaggttggtggcgatctgtggatttgctgccgtaaaatcccgacgccggaagaattcgatctggaggcgaagaagggtctcgatctttggagaagggttggcaggaggctgtaaaatccccggatccaaatcctcgagacgggcggcggtagaccagttctatgaggcaatacagggagggagaaatcctgagctgtcctcacagatcgaaggaaactttatgtatggtaaacaagactcgatcgcacgggtcgctggtaggtatggaggagatgaacgaagtgaggttggagctggctgggatgaaggacattgctgatctgaagaatctcaagtcagaggtaagggaggtcaagaaattgttgcaggaactttgcaagcagaagggaactgatgcagggaattcagagacagaaggaggcactgttggtggaaatcctgaagcaagtgcaggtgatgctgcaggaaccagtgaactgtgagatagaggtatacccaggtccaccttcaccacttctgccgtgtttgagatagtacctcccacttcttctgtgccacagtggagccaatctataccctgttctatgcctgatccacagttggggcagcatttttctaccacacgtcccacagtgcccccacacatgtttccacagtttagtactgcaaaccatgagtcccaacaggtaaacaatcagtttttccatactaggatcccacagtttcagcctagagcagaaatgtatcatgaacagatgtaggggaaccatagagtaaggatgtttgatgagcagaggaatcagtatgtagggcaacatggagaagcaaatcattatgctgaagctatactaaaaggacccaggttggaaataccttttttcaatggtgatgaccctattgactggttgaagcagtgtgagaagttctttgagttgactggaactccaatagaccaatgggtcaatatgtctctagcacattttcagggaagagctgcaatgtggtttaggggagttggattaccttggcaagtcatatcttggccacaatggtgtgccatgatttgtacgcggttttctgcagctaatgttcatgaagcggtggagttattccaaaatgtcaagcaatatggaatgaccgtggagcagtatatagacaaatttgaggagtatgtggacttggtgaggagagatcacccttacctgcaagaacagtatatcacaagctgttttattgggggtcttagaaatgacattaagcatgatgtgtgtgggcagaagccacaggttttgcttgagtcttacaggtatgcgaaaacatatgagaaagctgctcttgctaagaaagctacttatggggttaacagaaatatgagtaaaggatttaatgctggagggcagggcagaaatcagactaacaggaatcagcccagaaatgaaggggaaagaaaggaggagaaaaactattggttctgtaaagaaccttggttgccaaaacatcaatgcaaagtaaaacaagcactacatgctttgttagttgaggggaatgaagaggaaggcaccactgaagaaactactgaacatgaatccaatgaggaagatgaagggaaaaaccaaactgatgataaaggaaaaactaaagaggtgatgtgtgtatcactgaatgctatccatggtacaactagacctgacactttttcagtgatgattcagattaatgggagtaaaatagttggtttaattgatagtgggagcaccagtactttcatggatctagatttgctattaagaaccactgtccattgataacttcagaagtcaaaagagtggtagtagcaggagggggtgagttgaaatcttaagttcaggttctagacatattgtatgagatatagggaaggcaattctgcaactctttcaacttaatttcactcaaggggtatgatatcatattaggagcagattggatttatcaacacagtcccataatacttgatctgaagcaaaggatgcttgaaattaccattggaaccaataaggtcattttacaggactttactaaacctggaaaacatctcctaattaacagcaaaaagatggagaaaacagtgagaaaaggggcagtgggatgtgtattccaactctgtgaagtcatagaggaagaagcagggccaatacctttggagattcaaaaggtcatttaccagttcccttaagtactgcaagaaccaaagggactaccacctaacaggccttgtggtcatgtcatcactttgaaggctggtgccataccaccaaatttgagaccatacagagtccctcattaccaaaaataagctatggaaaatatcatcacagagctggtggaatctaaagagatacatgagagtgatagtccatatgcctcacctgctgtaatggttaggaagaaggatggctcttggagattgggtgttgattatagagaattaaactcccaaacagtcaagaacaaatttccaatgccaatcattgaagatctgttggatgaacttcatggtgctaaaatattttcaaaactttgacttaaggtcggggtatcatcaaattaggatgaatgagaaagatgtgcacaaaactgctttcaggacgcatatgggacactatgaatatcaagttatgccttttgggttaactaatgcccctgcaacctttcaatctcttatgaaccaagtactccggccatttttgaggaaatttgtgctcgtgttcttcgatgacattctaatttacagtcagaaccaggaagaacaccttgaacacttgaaattggtgatgcaagtgttggaagaaaataacctagtaatcaggttgaagaagtgtgcttttggactgtctgaagtagcttatctagtacatattatttcaaagaaaggggtggctacagatcccaggaaggtggataaaattacagggtggtctattcctactgatgtcactgaactcagaaagtttttggggatgacagggtactataggaggtttattaaaggctatgggttgatttgtaggccaatgcatgatatgctcaagaaacagggacttcagtggggacctgagcaaactgctgcttttaatgagctgaagaacaagatggtgtccagtccagttctggctatgcctgactttaataaggagtttgttatcgaagctgatgcttgtggcacaggcataggagctgtg

SEQ ID NO: 24097 - DNA, 6228 bp, Oryza sativa
tgtgatgtttttcagttactggagtatgaacactgacaactcaaactttatgagtgtgcataaatgcattcgatgacatgcacggaccatcatagctagagaccgaactgaattatttgtcttactgtctgactgaggctgtgtttagatccaaagtttggatccaaacttcagtcctttttcatcacatcaacatgtcatacacacacaacttttcagtcacatcatctccaatttcaaccaaaatccaaactttgcactgaactaaacacagcctgactcataaagtagagtatatttgtaagagaggagcacatatctagctagtatgttattttgcatgtgttttgccacaagaccatactggatcactgaatctgaaaaaatgaaataatgaggttacctttttctatagcttcttgggtaaacgggcaaccagaaagaaatatctggcaacaaagttgaggggttttactcaagtacagaaggcgaacttgctcagcatgaaaggaaagaccggagtgatcctagatcaatgggaacagcagcggcatggggcgcgtctgctgcatcgcaagacgacatttccatcagacccaacaaccaagcaagcacatgctatgttgcgaggaattgaaagaaagactcaccccagagcgaggcctttggtgcgtgcagccatggcaagccggcaaatcgatcgcctattgcgaggaagatgacgagcaagttccccggtgattgcgtggatcatccagatgggctggctcttatgcagtgacaaagagtggaagacaagagatattgctgttaggtggtatgtccatttagcttttctgtatgtgtcccagtgtggatgtgaaaagaacagattccagtgtccacttagtctgaaacgataagaacatcttgacttgctgacttgtattgggcaaaatgcaagaaaggatttacggatggctgggctgatcaccactaacagtaacgctgtcaacttatctggttcagcttcaccaagatcaattgctcaccattcattgtctagaaaaatgatcgattctcaccattgggttgttttctggccttctgtccatcaccgtattctcctctgaactgactggtttgaacgttattttcacggttgttctatcttttcggaatgaaataatattaccttttttcaacttgtgcactcatgcacaattgcacacaacatattgctgcacttgtagtcctctcctctgccagcggaattgcagtccagccgcagctttctagccaagagatgttcagaactgcaattatatgcttcaacagattgaacatgaatatttgcctacatctacatgaatttggtcttgagtttaccctttcttgagttaaatatgcaagaacatcaaagagcaaccaacaatgtcgaaactaataaccgaatgagaagattcagatattcattattgtccattgatttaagatcaccaccttcctccttgggtgctactatttccaggttttgttggatcaacagtgcctttgttatataacatcatgcatatatattgtgcgattctgaccggctgattagtgattagtagcatttgtttgtagcgatgttattctttcatttgttggctcaaccagatccatgggtacttttatgttgaaaacatctacatagacgatgcttatgagcaatccagaaaacaaaaggtctattttgcattcggggaagtcatagtcaagtagcgtagcactgtgcccgtaaaaaatcagtccatgcacaattcacaggtttcgaaatcttagatagctatgaacacacattaagcatgtcaaaaatcaaatccatgggcacctaggttaaaaactttttaagaaaatattttttataaaaaaaatactttctcatgcgtgcagatgcagtaatactaatagaatccgtaagtaaaagtccgaactttcagatgcagacaagcagtgagtagcagtgactgaaacttgcatgtattattcatgttgtgtgttcaggcagagttggggatgctcgatcgtgcgcgcccgcacatggcggtccggccggcctcgcagcgaacatggcggtgtggtgggcaggggttcgccgtctcagacgaggaaagcgacggcggcgggcggccggcgacggcgagggcttggcgagcggccgccctggggagatcgtgggctgctacggccggatgcaacgtgcggcccatattgtatggcccatcaaggggattctctgtggaataagttcactttggttccctctatttgtcgcctagtctgattttcatcccttaattgcaaaagtgggtacgacaggtcccccaacttacgaaaccgtttaaataaggtccctcggtagtatttgacctcggttttggctgaggtggcgcctacgtggctaatttgactcggtcttcatctgacgtggcattgacgttgcgcttacgtggcaattcgatccaaaaattaataaaacctatgggacccacatgtcagtttcacacacacaataataaaaaaaaatggtggggcccacgtggaccccacctatcatcctcactaccccttctctctatcccctttctctctatcctctctctccttcttctctctatccctccctccctctctcccttgagaatggcgagcggcagcgagcggcgcagaggggcggcgatggagctgagaggcggcatgcagcacatgcagcatggcggcggcgtctgggacaatgcgcggttggtcggcggaggcggcgtgtcacgccccgaactagtaccgactggaactagcccgtgacgctccaaattaacctgttgatcgataccagtcccaggaaacagtgctggtatcacaaggagacagaatatcacagcaacagcggtctctttattatagagtagagatacggtcatgttggactacggacagaccccgagctcacaactgcattacaaaagggaaacggaagcaggacttggaccaaacaacacaggcgcgacttgggaactaggccgaaaccctaaaactcattgtagccggcttgctcctgaaagaacttctcatcagcaggatccgcttcatcttcttcagcaactggggggggaattatttatatagagcaagggtgagtacgggagtactcagcaagccaagggaaaataggtgtttaatgcaggcttcaaggagaggctgttgtttttgcaattgattttatttgaactcttttctaagaacgactaagtgagtgcttctcaaactacacggataagacagtgcgtctcgtccggtcggagtatgtgcgatgtatcagtctttagaattgaaacaaggttggcacccggccgacagcttttcaacggccactcgggccaacaacttttcaaacggccacccgggccaacaacttttccaaacggccacccgggcctagctgatcccttcagctacagatttttcaaacatcgaacccctttttcacaacagcaatttcacaagcagtagtcaaacaaaactacgctaggaatcacctcacatccgcccatgaccgtgggcacggctgttcgaatagtttgataacctctgcagagggggtacactttacccacacgacattactaacccggatcacccagcccgtggggatcagccacgtcgggagacctccaagctttcatgacaaggcatttccaaagccgacacaggtttaccatatgccgacgagaggggtcccagaccaacaacaggttaggtcccagaccatactgtgccaggaagcccaggggtcctccccgacaccaccccggcgaatccacatgtctctcggcatcaaggctcccctgataagctagttactcagccaggggtgtcccattccacctatgtggtcgtacttgtcttatgttcggatgaaattccaaggaaacgatccttaagtgcaagagcgggaaaaccgtacacccggtacgttccccggttcgcggttttggaaattcatttagttcgcaagcaccgacccaggtgtcgggttttccaagtcttttgtaaaactccagttttacccaaattgttactcagattttaagtttgaaggcgaccgtcgatactcgcacagagtgcacgaatatcgaggcgcaactggatggttacaaggggacatggtatagcaattaacaatggaaggatcaaatgcaacaagttaggtaggtccgccgatctgccttgcagacgggacaacagattaagtgcgatcctatcaatgcataatattttgcaagcaatataattgaatttcaaatataggctcaagatgttcaaaggtggcttgccttgctcgagatctggagcttgatcctcgaaatcctcgcgctgcgggtcttcgggctccgaaactacacgcgaaacgggacaactcagcaaacggcgaaaataaagccctattaatgacctctaagcgtgccattagatagatctcgagatttgaggaattttggaagttgaacggagtcaaacggatttacggttgggaagatattgaatttctaagattattggatttttggtctaaaggaaaaggatttaattaaatcctttttgaaaaagaaaagaaaagaaaagaaaagagggatggaaaatagacttccctcgggcggctagggcgtggcccgagagaaagggcggctcggccgggcttaacgggccggccggcccaagaaggcggcccagagcggcccaagacgcgcgcgcgcgggagggaggagagagagagccggtggaccgggctcaccacgcccggtcccgggtgggacccgcttgtcagcggctcggctcaccgtgcggagggagcacgcggcgcggcgctagggtgggggagggacgcggtgcacgcgcgcggttcacggtggatgcggatgcggcgggcccacgcgcagcctcacggctcgcggtggaacgcgcgcacgaggaggggctgaccggggtcggctcgacccggtcttggctgagctggcgcctacgtggctgccacgcgagccggcgggaggtagacgacgacgccggccggaacggacggcggacgacagcggcgagcggcggagcgaaccacggcgatacaggcgaaagcgagcacaccggatggttgaacaggacaaggggagacgagccaacggctcggattcgccggaggatgcccgacggcggcgaattgcggcggcggcatccggcggcggaaaaagggggaaacggcgacgaggtcacgaggggccgattcccggcggcgagagcatctacgcggccacgggaatccgatgctagcgtcgaattgggcggagctacgccgagcgaggccggcgacgagcggcgcttccgagctcgggcggcgacggcggcgagcacccggcgagaggcggcaacggccggggcggcgccggctagctacggggaggctactcgtgctactaccgaaaactaagagggagaggtggagcgaggaggaagaacggagggagcactaccgcgatgaggaggggcgctgtgacgagaggccgacggcgcgggagtaatctctccggcctcgggccggggaagaggaagaagagggcgcgcccggagtccccttccgcgtccttgctcgtgccggctcctccgacacgcgcaacgacgaacggcgatggcgaacagagcacgggggcggcggcaatggcgcggaggcgatggaaggagaagagagggagggcgcccggggctttaagggcggcaatgtcggtttggaaaccgactttgggcggtcaaggcgcgagctggcgctcggcgctcgcgtccaaatcggcgacagggcggagggaggaggatgacgccagcggtgacggaaaaaggggaaaagagggagagaaaaaggggcttgcctccttgccgcttttggaaaaggaggaggggagcgggggcgtcgcggcagagggaggaggggctctgcctccgtcccttggtggcttgcgcgcggaggcggggccgaggcgatgacgacggcgatgacggcgggacggtttggagcggcgcgacgacacgggcgacaggcgcgggctggcgcggcagagggtgacggcggcggcgaccgggcggtcggccaccacgacacgcgcgcgcgggaagcaacgggcggcgcggcggtttgagaggcgcggctcgggcacgcgcgctggctag

SEQ ID NO: 24098 - DNA, 7438 bp, Oryza sativa
ggccgagagggattcggcccatcgaccctgggggaggcaaaatagacttttgcggagggatttgatttggaaggatttggattcggaattggactcgacgatagatcggggatttgagatcttgagatggcacggacactagacaacaagcaaagaaacatatttcgcaattagggtttttaagagataattttcccgctaggcgccacgacggaacgggcgctacacggcggcggccccttcatcgtcgccaacaaggggctcgaggtcgacgccccacacgctcgtgcagaggttgtgcacgcagcgttcgtgcggtcccacgaacacaccgggcgccgcgtgcaggtacttgcccttgagccacttcagcttgtagtacaccttggcttggtcaatgtgcagggagagggagcccctgatggagtcgaagagcgcgcccatgtcgggaggcgtgggacatggacgagcgcgcgcggaaggtggcggcgccggcgaggagcacgacctcgtcggcattgccccagagcttctaaatggcacccccgtgctgccccacggcagcgggcgcggtcacctcggtggggtccgtgaaccgcgctgcctgctccaatgtaacatcctcaaattttaatctaaaatttgactgcatcatgctggcttttgacttgaattaatcttaatttagcaaaatcaaaatcctttttaaaatttcctttttaatcttcatttttggttcaagtattacccctttaaaattcctttaaacctaccctataccatcgtacccaaaaatattctaattactcccctaccctaaactctagtgagtttagcaaatttctttcaaaatttaaaatctagaaaccttctttaaattacccttatatttgttagacttagttatattacaaaaccctagcaaaaacccttcaaaaacccctagagaaattcttttctccttaggcaaatttgtcaaatttctgaatttcactgttcattgcacatgagctgctcgatgaaatgcctagcccggccctagcagcccagcatccacccaaatatttgcaaagtctagaattgatccttgggggaccacacccatccaaaactgtggcctctctttgcctttccaccccctgccatgctgccttggtgccctgcgcgtcgtgccgccgcagccgccgcgcgtaggctccacgaccgcccgcgcgtgcccggccaccttggcgcgccatccatctgtccagtgcgcctcaaccaaccgtcgtcgcacaaatcttgtcaagacaaatccgggacggccaccgccacagctcgccgccgtctgccgccatgcgcgcccacccgatgtcgacgtcgaagctgacttcgcctctaccggggatgaaaccctccaaattcgccgccgctcatttaaacacaaaaggtgtaactaactttccctctctcaactcgaaccgaacgccgccgagccggatattttaccccttgccgccgccgcgcgtcgagcccgggaggacgccagctcaccgccgctcgtcttcacccccagttaaacccaaccgtcgtcggtaaatatctgaacatgatctcccgccactcaatttgctcttcccttccctctcacagcctttgccatccctgccaccccttaactccaagctcatccatggcggcattggtttagggaaaatgaagagtttgctttagggattactttcaatttgtcaacattgatgtgcttaagggctttaatagaaaaatcaacctcagaagaattatttcccaaagagacctcaatacggtttaaagacgaacaaaaactaagttgagaagcggaacaagaacttgtaaaaggctcattaggtgtaccttgaggggaagccaacaaggccggccttgccccataaggggcaaattgatcatccagattgatggctgctttcctcttcatcgctttcaacagagagtcatcatcggccgaagcgatgccgagggctgtctcggagttggaacgatcactgcggcgtattggtgtcatgttcggcgcaagcccgacagccactgcttcattgctgccggtcactggatagtgcgaaccagcgtgtcccgaagacttaagaagcattgccgcggtcatctccttttcaggctgcgccgacaaaaccatatcaccatccgctaccgtcaccacttgctcgccagccacctgctcgctacccgatatcttcttgtcgaccaaagtcggctttgtcagcccgacagtcgcccatcctgtggcttgtgcgtgctcccaaacaggggactgggaggagaatgaattggtgcatgtgttcaattgcttttacttgaaaactggattgtaatgaggttgagctaaaatagtttagaatcaaatttgtccaatagagcaggcgagcagcagagtggatgtgcctctaataattgaatagacaagaatgcagcaaatttcaagaaaattttcaatgatccacctagcagcacagcatcgtttcactagacaagtatatatacaagattatcccctcctccttttccgggcttgggaccggctatgtcattaaacacctcaagtgacataggcggagttacctacacacctacaagaagaagaagaagaagaagaaacacacaaatcattgacctctcagagccactcgttgacctccagctcatgctcatctccatggagctggcggtgttgctccggaagcccagggatccacagctgagagatctcctgcatacctttttccagcaatagccactccaaaccacccaactcctcgacatgcctcaaattcaggcattcatttacaaacagctctctcacttggggaaggttggagatcctctccaggccttcacatccttcaacttgaaggaaaccagagaggaatgggaggtcctccaccgtcttcaagcaacttgtgcatcttataaagaactccttcaagttggtggcctgctgtccaagctgtggtgggagagccctcagcttggggcagcccacaagttgcaacctcgtcaaacaaggcagcagccatgacgaccttggagttggagacggggcttcctcccccttttgcttcgaagcagcagttccatcctctcccccttccttggctgctgcagctgcttcctcctcctgcacttcttcttcttcaacaaaggaccacttgtcagactcgtaagaagaatggaggaaatttcagaaagttcagagtttcggttaactgaagatgcaaaggagggagaaaacgtttcatcctgggtaatgaagatctaagagatgagacaaagccacgtgttcgagagagggatccgacggtgttaacgtcatgagaagccgctgtagctatcaaagcttgtcgttttgctctttacattcactgtaataattttagctgctgtaaacttacttaagctggcttttgctgtgggaagaagataagaagaatcacaatttctatttgtcttaggagtagctaacttagaaccctaggagatagtcttgcggcggccacccaaatcctaccaaaattcacaaatcgctactctgtttctccatttctggttcagggttctgacagaggtatcagagcacgagcgaatccttggctcttggatctctctggtgaaggttggtggaaggcggcggcgagatccaccgtaaaattcctgagctaggagggattcaatccggaggcgagtggtgcttcagatcggacagcaagggttgggttgccactttcgtggtgtgcacctgtaaaatctccggcgcttctgatttgaggttggcggctgtagatccgactgcaggggtaataggggaggaatcttgaattctgaacctaacctgcaggggcgaaatggtgaccaagatgcgctcaaacgatgagattgtgggactggaggagatgaacgagtttcgctcagatgtggcatctctgaagaaggaagtagtagagcttaagggcttgaggtcagaggtgaaggagatcaagggccttctgctggagttgtgcaaacagaaggggaacgagggacaggagaatcctgtgggagatgctgcagcaaaagagaagagcacgggagaagcaggacccagtcgatctgtgcaggtaaccacgcctagtttgggagttcagttctctattgagccaaatactatgagcctatctgcacctatgggtcaagaagctagaccacaggggggagtcagtagtgttcagacagatttggggcaggtgactactgtattatcaaaacctccaccattcataccatttgccccatttccaaaccagagggtacctttcttaaactcagctccttttcaaactcaaacaacagttgggggaagagtgcccaattcaaattttcaaacacaagggacagccactagctcaggcactgggcaacaaggggttcacatattagatcatagcagacctggtggtatggtttatcaaggagaaaatcaacattatgctgaagctgtaatcaagggacctcggttggaaataccactgttcacaggagaagatcccattgactggttgaagcaatgtgagaaattctacgagattactgggacaccatatgatcaatgggtcaatctggcaattgcacatctgcagggaagagcaatgaagtggtttagaggagtaggtattccttggcagttgattccttggccacaatggtgtcacatggtgagcactcgtttttcggctgcaaatgagcatgaggcagtggaactattccagaatgttaagcagtatggttcaactgtggaacaatatatagataaatttgaggagtatgtggatctagtcaggagggaccatccttacttacaggaacagtatctgaatagctgcttcatcggtgggcttagagaggatatcaagcatgatgtgtgtgggcaaaaaccacaaggtctgttggagtcctattggtatgcaaagaactatgagaaggcagctaatgcaaggaaggtggcactgaatttcagcagaaacagaaatcagaacaccaatttcaacaatcttggcaggaacgcaaataatagaccacaaaggggtgatggtgagaagaaagaagacagaaaatgctggttttgtaaggaaccatggtttcctagacaccaatgcaaggtgaagcaagctatcaatgctttactggtagagaatgaaccttgtactgaagaggaggaggatgaatcaaaagagaaggaacaagaggagctggccactgaccaaatagaggcacctaagcaggagggagcacatgaggagttaatgagtgtgtcatttagtgcagcttctggcacaactcggcctgatactttttcagtcctaatcatgatcaatgggaaacaagcagttggtctaattgatagtgggagtactgggactttcatgacccatgagtttgcagttaagtgcaagtgtcctatagcaacctcgactattaagaaggtgatagtagcaggaggaggagaattgaaatctaatcttgtagtcccagaagtggcatataaaattcaaggggtgaaatttgttaatgctttcagcctgatcaccttgaagggatatgatgtaatcttgggggcagactagatttttcggcatagtccaattactttggatctcaaacagagggaactgtctatcaccaaggaaggtaagctagttgaatttcaggatttcactaaacctgggaaacatttcttaattgatggtcataaaatggagaagctgataaaaaagggagctgtggggtgtgtgttacaagtgaatgcgatgactgaagaagagaggaaggaggaggctgcagtgccagcagatgttcaggaagttttatcacaattcccaggagtgatgaaggagccaaaaggcttacctccaagaagagcttgtgaccatgtgataaacttgaaacctgggtcagaacctcccaaccagagaccctatagagtgccacattaccaaaaggaggccatggagaacataatatcagatctgatccagtctaaggagattaggttcagtgacagcccttatgcctgtccagctataatggttagaaaaagggatggatcttggagaatgtgtgtagactaccgacagctgaatgcccagacagtgaagaacaagtttcctatgccaattatagaggacttgttggatgagttacatggggctagaatattttctaagctggacttaaggtcgggatatcatcagattagaatggctgaggaagatattcctaaaactgccttcaaaacacacatgggtcactatgagtaccaagtaatgccttttgggttaactaatgcacctgccacttttcagtcactaatgaaccaagctctagcaccctttttaagaaagtttgttcttgtgtttttttatgacatcttgatttatagcaaaacaagggaggaacatatcaagcatatcaaggcagtattgcaagtcctggagaagaaccagttggtggtacggcttaagaagtgtgcttttggtctgagcagtgtggcttacttgggacatgtgatatcttctgatggagtggcaacagatcctagcaagatcagtgatatcatgaatcggaaggaacctaaaaatgtgactgaagttagggaattcttggggatgactgggtattatagaagatttataaaagggtatgggttaatctgcagaccccttcacgacatgttgaagaaaggaggtttcaattgggggttagctcaatctgaagcatttacagagctaaaagggaagctgtgtactagtccagtgttagccttaccaaactttgagcagccgtttgtgattgaagcagatgcttgcgaagttggtattggagcagttttgatgcaggcaggaaggccaattgcttattatagcaaggctctagggccaaaagcagcagctcagtcaatttatgagaaagaggctatggctatactagaggctttaaagagatggaggcattatgttttgggtggagaattagtcatcaaaacagatcagcagagtcttaagtacatgatgaaccaaagactggtggaagggatacaacacaagttattgcttaaactgatggaatataattacactattgagtacaaggctggtagggagaacttagtagcagatgccctatctaggagcccgaaaaacaaggaagaagtgactgaactttgtgcagctattgctgtggtggtgcctgagtggatactggatattaaaagaagttatgaagaggatgttcaagctcataagttgctgagtttaattggcacagcaggggatccagaaggggagtataagtttgaggctggaattatgaaatataaaggaagaatatatgtgggggaaacaggagaaatcag

SEQ ID NO: 24099 - DNA, 8538 bp, Oryza sativa
attgttgggactgggggagttggtaagacaacattagctcagaaaatatacaatgatagaaaaataaaaggaagtttcaacaaaaaggcctgggtttgtgtttccaaagtgtactctaaagcttctcttttgagagaacttcttcgaattatggaagttcatcatgatcaagatgaatcaattggagagctccagagcaagcttgaaatagcaattaaggagacaagttttttccttgtgttggatgacatgtggcaatctgacgcatggacaaatttattaagaattccgttgcatgctgcagaaatgggagcaattctcataacaactagaaataatattgttgccttagaaatcggagtggaccatacttatcgagttgatttgatgtcaaccgacgtaggatgggagctactttgcaagagcatgaatatcagtgaaagcatagaattgcaaactctgcaggatgttgggattgagattgttcgcaaatgtggttgccttcctcttgcaatcaaggttattgctagagtgttagcgagtaaagaacaaacagagaacgaatggaaaaaaatattgagcaaaaatgcttggttcatgaacaaccttccaaatgatttgagaggtgctttatatctgagttacgatgagttaccacgtcatttgaagcaatgctttctttattgtagtgtatatcctgaagatgcaaacatttaccatgatgatcttacaaggatgtggatcgctgaaggctttatagaggaccatggaggtcaactactagaagaaacagcagacgagtattactatgagctgatccaccggaaccttcttcaaccagatggtttatattatgaccacagcagctgcaaaatgcatgatcttttaaggcagcttgcttgttatttgtcaagggaagaatgttttgttggaaacccagaatcattggtaggtaacactgtgtctaaacttcgacgtgtttcagtcgtcacagataagaacatggtaatgttacctagcatggacgaggtgcaatataaagtaaggacatggaaaacttcttatgagaaaacactcagagttgataattcatttttcaagagatttccttatcttcgtgttttagatttgactgattcatttgtaccaagcatcccaggttgcatcgggaatttgatccatctacgtttgcttgatcttgatggtaccaatgtatcttgtcttccagagtccattggcaacctgaaaaatcttcaaatattgaacttggagaggagtgttgctttgcacagtcttccttcagcgatcacccaactgtgcaatttaaggcgccttggcctcaattattcaccgatatatcaagttccaaaagggattggcaaattggaatttctcaatgatgtagaagggtttccagtctatggtggcagtagtaatactaaaatgcaagatggatggaacttggaagagttggcttatctttaccagctaaggcggcttcatatgattaaattggaaagagcagcttaccgcactacttacccattgttaacagacaaagggtttctgaaatttttgtatctatggtgtactgaacgtacagatgaaccatacacagaaaaagatttcagcaatattgagaagatctttgagcagctaattccgccgtgcaacctggaagatcttgctattgttaaattcttcggtcgccagtatcccttctggatagattctacccatttggcttatgtaaaatccttgcatctcttcaactgcaaattctgtatgcaccttccaccagttgggcagctacccaacttgaaatatctaaaaattgagggagcagctgcagttaccattattggacccgaatttgctggccacagggcgagtaatcttggacgaacagttgctttccccaagcttgaagagttgctcattagagatatgcccaactgggaagagtggttctttattgatgaagcaacgtcaactgctaaggaaagggttgatgatggagattctgcaataccaaaagagaaagcattacctccaaggatgcagatactgtcacggttgaggaggctggaactttctggctgcccaaagctgaaagctcttccacagcagcttgcacagattaacagtctgaaggagatagagctaagatgggcaagcagcctgaaggtggtggagaacttccccctcctctctgagatgcttttgattgcgacatgtcaagccctggagaaagtctctaaccttcctcaagtgcgagagctgcgcgtgcaagattgtccaaacttgagacttgttgaggatttgagcactttggagcagttgtggctttatgaggatatgcatgaggtctctacattgtgggtgcctgggcttcaacagcagtgccggcaacatcatggagaggatcttgaagtctacaattggacatagtaataatgtatggatgcccaaaattatttggacgcttcagttgtttgatgcaaggtatgtgattttatatactctggattcggattgcgcccattttttggcgtgctattgtgtacatagatatatattttttgctttaccagttctcggtcttgaggatgaaaggatctagtactttgtaatatcggatattacagatatgacaataatcccaaagatatggcagtataagaactaaaaaactgtacttctagtttgttctggtaatcctctattaggttctgcaacttccatgcagctcattatcagcacatcgaccttctactgagcaggaatgaatgaatggatcaacgggtagatggtaggagtaccagactgactgtgtgtatattcagcaaatttagtctccctgatgtttacagcctaccttaactgaatttcacatcagcaatgattgcgtgcaaggccctttttcctccaccagatgatgcttaaggaccacaaaatacatgtatatctcgatgaaccgaaaataaaagcattccctccattatccaacatcgttttttatcgagtccatccttctccatttaaacactgaacagaacagcttgttactctgtcatcaggagagatattatgaccaatacccccaggttttccccttgttattccgtattgttgaattaactgtagttttgatgcattcatgtgttatgcagggggatgctgatcagtgccccttttggatacttcaaccttcctaatgttccatgtaagctgttttcctaatttctcccattgtaatctgctctactagcaatggcttatctgctgcatctcctgtacaggattcagaactcaagttcttgccgcaaaatggtttctgtacacacaaaaatggctaaaatttcaaatgccaactgcgattaacagcagattgagttgctgatggaggtgaaaactcactatgctttagagttcgctcccaaatcatcaaccctcttatatggactccgaaatcagaatctgagttttgtgttcagttatttcagttcagtgatctagtttcatctcaactgttccgagtaattaacaactggagtagaaattatccttcccctgaactgaatcacaaatgcatcgcaaagcaatcaaagctgtggcgaaattcatctatctagcgacgagaagagaggaagggagggaggcgtcacgtacctgggttgaactcgaggaggaggaagaggccgcggcgtcgaccccgggcgccgtggcggcgaagggggcccatggagcgctccaacttctcctccgtcggatctctgtcgctccctgcggcccaccctccagctccgcctccgcctccgctccccgacgccatcgccgaggtggggggttggatggccgtaccaggcgctccacgatgtacctcactcactgactcatcggagaactcgcccgcagcaatggtagctcccttctccaccatcaacttcgccactcgtcggagcgccgccgtcgccgtcggcgaccaacgcgcccttttccaacgacaatacgagataatccgagggcttattcgaaaatgatcctccaatgctcaggcgcccttagatatcccggcccattaattagggcccacacgtcatccgcaaaccccttgatggcccataaaatatgggctccacgttgcatcccgcccatgttcacttgcagcacgttgggctgtgaaagggtccaaagtccaagtatcgccccagagacggcccgtacactttgggcctcacattgctcctgccctgcgctgacgggccgcatgtccgcgtagtatcgtcccggcccacaaattaaatggaatcgcttgctggcctacgcccattagtcggcccgaccgcaagagcgatagtctcctggatgatagaatccgccgccatggcagccgctcgccggagctccgccgactggccacggagctcctctccggcgaagatttgcatcacgtaggttcttcgagtcttccctttccataatgtgctttggctctttcatcttcctctctctgtctcacagatcagacaagtgcaaatgagagatgctgtactgctgagtaagcttcagatactgttgtgttaccaaaaattatctcgggaaaccaacacttgacgagcatgtcaatacctattgatgagagatgttgtatgtactgctgtttaagctatagaacctattgatgttatacagatctgagtgcattttttttctttgataatgtcaggtgtgagctcatgaaactgggattgtgttctgttcgtagcatcctcttctttcattctttgttgtgaatcaatggtcctgttgaagtcaccaattggatgctttgttctctatgttctgcttctgtagctggatgagtatcagtcactgtatctgaacacatacagagtgaactctatggtttcagagcaggtatgttccttctttgacatggtcatcaatctgaaagcatgtcctccactagcatgtgcagtagtatgattccatgatggaggaaacaaaacttaatcatgtgcacgtctttctttttcttttctaatcaaagtgcgcgcctgctttaacaccatggactataatattcacgtaaactaattataatcacatcaccacgtacgtccagtgcgcttcatgcagccacggggaagctgccttcttccaggtcaggattgtcgatcagagccaaaccaagcagtttgttcagagttcagaattacatagaaactactgaaatctgaatgctgaaaatgattttgttgttgcatgcaggcacagcgaggggaaaggaaggcatgacacttatcttcgtgtgctgcaaccccagctgcaatcacagatggagggagtgacatgtaaattaattgtaattaatgctactattatgctgcatgtaaaggcaatagagctttgcattatgccatgaattggtatatgtttactagtcaaatcgagggataagacgacaaacaatgagtatgagatgccattgagcccgtgacggaggaaacaaaactcaagcatgtgtatgctcacccctttgtaaaggcaataaagcacgcagctggtttcacatcatggaatcttggaagcaaactctaaattaatcacatcgaaataaactgtaaactaatcacatcgccagagcccaggcgccagctaatcgttgcaatatactattgcagctgttgatcagtgccctagaatatgtgagtgtagctaatagaagtacgaaaaggaaaacgcaaagttccctactaatctgtaaggtctattagtaggaattaagtactctctcaggagcctcaccatttgcattctaacaaacctaacgttttgacaaagaccattgcgtttccatggtgttactagaacaattgcttcagcgctagtgtgcaggaaatcaattaccatttagtgatgattggggatatgaataagaaaaggagtagccatagctaactatacggttcatgaatatacacaaaatgttgggttgtgcagcatagacaagtggacaattacttaaaatttggtcagtgatagtaacatgggaaagataaaagaaaagaagagtggttcagcagttgtctagctagtctgaatgttcagctatacaatatatgtaaggccttaccaccttgcctaaatcactccctagcctcctgcagtactgttgctttgttccactgtgtcgcattcttacactgcatttctaccggctgtgggtaagctcaatacatatagctgaatttacttcctttatttccttaagttaatccgtaaatgctcatcttgactgcagggcacggattttcaacaggatcagttgcgtccatttctgtctgctttctgattgattgagatgagatctactaggaaggaaaaatctgcttcatctgagtaatcccatatatactgctcttcttgaagcactccttgatcggtgaatgtcaacacatcaaccagtatttctggtactctcccgttgattcttctagttaaccttctgaatcatttcagttgtacatatataatacacacttcacttttcttctgtcccctttttgcagttgtagcagtgcagtctgcggttctctcttgatgactggctcataatgttctgaaatctattctatactctggcttattcaatcagattcctttggtcttgattaatctcagtttattgagatcttaagcacaagatgggaccgagcaacctgttaacctgtgcaagatggttgctactatactactgatccttgttatgtaccatatgttatttttgtgctgaatgatcgctctgtaaggtaagatttgcatcccggcgaaaacgaaaaaagatttgcatgtgtacttcaagtttcgaatgcatcattctgtgatctttttttgggatgcagctagtagagtagtaggtagggaggtgtatccgccatgcaacttttaggttttcatgtgtgaagctacctaaataatatagaccctgtttggatgcttgggctgtggttacataaccataaatgtcaattttgctagccattagactcaacatgcacggtacaccgaattaagtggaaactcttatacaaagaatagatggataatatatttactgaacttcatcttgcattcatattttgtcagccttatctaacttttaaactatgttaacacaagtttggttacatgtcaggctgcattttttacattgatcaattatatatggtggattaccccttttgagtttgtcggatggcaacaatagtagacacattggttggatcatgcatcaataagttgcaagcgatcattacagacaagacaatactcattttaggggtaaaagatgagcttgaagaactgcaacgaagaacaaacgtcataagatcttctcttcaggatgctgaggcaaggaggatggaagattcagtagttgaaaaatggcttgaccagctaagagatgttatgtatgatgttgatgatattattgatttggctagatttaaaggaagtgtcctactgcctgactatcctatgtcatcgtcaaggaaagcaactgcttgcagtggcctttcactttcgtcctgcttttctaatattcgtatacgtcatgaagttgctgtaaaaattagaagcctgaacaaaaagatcgataacatttcaaaggatgaggtatttttaaaactcaaccgcagacatcataatggaagtggttcagcatggacaccaatagaaagctccagcctagttgaacccaaccttgtgggcaaggaggtcatacgtgcttgcagagaagtggtggatttggtgcttgcacacaagaaaaagaatgtttacaagcttgctattgttggaacaggaggagttggtaagacaacactagctcagaaaatattcaatgataaaaaattagaagggagatttgaccatcatgcatgggcttgtgtttccaaggagtattctagggattctcttttgagacaagttcttcgtaatatgggaattcgatatgagcaagatgaatcagttccagagctccaaagaaagattaaatcacacattgcaaataaaagtttttttctggtgtcggatgatgtgtggaactctgaagcatggacagatttactaagcactccacttcatgcagccgccacaggagtaattctaataactactcgagatgacactattgctagagtaattggggtggaccacactcatagggttgatttgatgtcagccgatgtaggatgggagttactttggaggagcatgaacatcaaagaagagaaacaagtgaaaaatctacgggacacaggtatcgagattgtccgcaaatgtggtggcctacctcttgcaatcagggctattgccaaagtcttagcaagcctgcaagatcaaacagagaatgagtggagacagatattggggaaaaatgcctggtccatgagcaaacttcctgatgaattaaatggtgctttatatcccgggaaaccaacacttgacgagcatgtcaatacctattgatga

SEQ ID NO: 24100 - DNA, 2514 bp, Oryza sativa
acaaacagagaatgaatggagacggatattggggaaaaatgcctggtccatgagcaaacttcctcgtgaattaagtggtgctttatatctgagttatgaagtgctgccgcaccaactgaagcaatgttttctttattgtgcacttttccctgaagatgcaagcattttgcgtgacgatcttactaggatgtgggttgctgaaggctttatagatgaggaaaaaggacaattactagaagatacagcagagagatattattatgagctgatccatcggaacttgctccaaccagatggtttatattttgaccacagcagctgcaagatgcatgatctcttaaggcaacttgcttcttatttgtcaagagaagaatgttttgttggagacccagagtcactagggactaatactatgtgcaaagtacggcgtatttcagttgtcactgagaaggacatagtggtgttacctagcatggacaaggatcaatataaagtgaggtgttttacaaacttatctgggaagtcagcaagaattgataattcacttttcgagagacttgtatgtcttcgcattttggatttgtctgactcacttgtacatgacatcccaggtgcgattggaaatttgatttatctgcggttgctcgatcttgacaagacaaatatatgttctctcccagaggccattggctcccttcaaagccttcaaatattgaatttgcaggggtgtgaatctttgcgcagacttcctttggcaacaactcaactatgcaatttgaggcggcttggtcttgctggtactccaataaacctggttccaaaagggataggaagactgaaatttctcaatgatttagaaggatttcctatcggtggtggaaatgacaataccaaaatacaagatggatggaatttggaagagttggctcatctttcacagttgaggcagcttggtatgataaaattggaaagagctactccttgcagcagtagagacccatttctactaacagagaaaaagcatctcaaagttctgaatctacactgcactgaacagacagatgaagcatattcagaggaaggcattagcaatgttgagaagatctttgagaagctagcacctccacacaacttagaagttcttgctattgtgaatttctttgggcgaaggttccccacctggcttggtactaaccatttgtcttcagtgaaatacgtgctcctcatagattgcaaatcttgtgtgcatcttcccccaatcggacagctaccaaacttgaaatacctaaaaattaatggagcaagtgcaatcaccaagattggacccgaatttgttggctgctgggagggtaatctcagatccacagaggcagttgctttccccaagctcgaagcgttggtcattgaggatatgcccaactgggaggagtggtgtcagaaccctgaaccagaaatggagaaacagagtagcgatttgtgaattttggtaggatttgggtggccgccgcaagactatctcctagggttctaagttagctactcctaagacaaatagaaattgtgattcttcttatcttcttcccacagcaaaagccagcttaagtaagtttacagcagctaaaattattacagtgaatgtaaagagcaaaacgacaagctttgatagctacagcggcttctcatgacgttaacaccgtcggatccctctctcgaacacgtggctttgtctcatctcttagatcttcattacccaggatgaaacgttttctccctcctttgcatcttcagttaaccgaaactctgaactttctaaaatttcctccattcttcttacgagtctgacattactccccccttaagcccaaccttgtcctcaaggttgaaaatttggaaacactttctgaatataagaagcatcctcccaggttgcttcagccggagttaaattgctccacagaattagccattgagtgacagcaacattgttccttggaatcattctcctttgcagcactgctactggctctgttttgatttgaccatctggtcccactgccggtaaatttggcattggtacagcatgagtacccaggtgctttttaagttggctcacatggaagaccggatgtatagcagcttcttcaggtaactgcaatctataagctacagcacctaccttctctagcaccttgaatggcccatagtatttgcctcttaactttaatgatcctctgatcccaaaagcattttgtctatagggttgtagtttcagatataccatatctcccacctccagctttctctctgttcgattcctatcagcataatacttcatccttctttgtgcatcttccatgcttgctttgagtttctgaactatagtctctttctcttccagggttacccttgcttcttgagatacatcacatgggacagaaaattcactgatttgaggtggactgtatccataaagggccttgaatggagtcatttgtattgctgtgtgatatgttg

SEQ ID NO: 24101 - DNA, 15790 bp, Oryza sativa
ctgcccctctgctcttcagctgtatatatgcagctattctagcatttgatagtctccttagttgttcatgtcgtgtgcattgactgattgtttaatgatttatatgatttagttttattttcatttatgctgcatgtaagcatttcatcatggtcaagattttcataaaatggtggatatacattgacaaattcattagttgtccatttctttaatcctctcgtgatcttattaacatgcgtcctgtacatacggtgtattctagataaatgaattgtcctatatgtactacaacataatcatgtgcaatagtgttcctagctctgcagacaaagatagagattacttctactccaaaagaaaattgtatgggttatatcaccaaacaatgctatgatggcattgctatattcactatatgatagtagtaatatcacaaatgcatatatccatccaaggacttggggacaacataaatggtttagcatttggtacacaggctgcataagtgcacgactaaacataatggacttcgctaggccaagagataagtaatccttaattcagctcttgaatgtgctagctatgattggccgtgtacatccttcgggatgtagaggccgggttttatttaatccattatttaaaaatgcgctatctatgacgaagaccagatcacgtgcatttagccttcaagtctgcaagtgtgttctatgtcatatcaatgtgcacatttagtactcagtatcttataaaaacacaaatacacatgaattttcgcaagacattaggcaatagagtagtttttttagatttcacaaaaaataggtcaggcccaatgttacagattccttgcagcctgtgagcaggatattgaagatggaagggttgtgcccaacatctgttcctagtgtagggctcctaattaaggtttgtttggtgaaaaaacaaaagccacctaaatgtctttgtattggttcaaattgattaatatttttgttcgtattacatctgttataagcagaggatattgccgagcgacatgcctatgtatagtccctatgtgtcttttccttatactttttgtaattcacgtatgatgtttggtaagttcaattgtagaaaatagattgttgcaaaacggatgtcacttgtattttcttttccttaattaagttatttaattaccaaattgcttatgaatatacatccatgattaatttttgtgcgcttatttgtgttgtaggttaatcttgaagaatttgggctgcagtcacctgtaatctgtacttttgtctttacctagctactggtctttgaaatatattaaaaaaattaaaaaaacaaaaatatcaaaaaatgggaaaatgtcaaaaaaaaggttatattttctttagctcttgtaaaatacatcgtcatgttttcttagatgtgtgcgtttcttttctttttattttttttattgtaggtgtgtaggtaactccgcctatgtcatcttaggtttatctgaatgacatagccggtcccaagcccggaaaaaggaggaggggataatcttgtatagatgttggttgaaatgacgctctcctactatatagtagatcattgggatttttccgtacttttatcagattaatttcattttcaatgatggaatagttatggagacacttctagagactcatccagtcttattttcaatgacggaatagtctactgctaccaggtctttgaaagttttcttgaaactgcacctttgtcaggctactgcattttttttgtgatggaataattatgaaaacactttcagaggcacatacactctgtttctctgttggacgaacctgagttggaaaccagtttagtttgagctcatttcaaccccttctttcaccagaagcaattgggctaaacccaagcaccaatcattctcctgtcagtccttaatgacaagcctgcaggacaaggaaatcaatgaagatcactgaggcaaaaatatatttatcctcccatcatgatagaaactgattgtgctttgtgaattgtgatcgagaggagaggaaatggtggataaccttcctagtcattcctttgtactgacaatgtttcagtacttgaggaaatctcagtgatgatacctcgtattgacaatcaatacctgtgttaatagatggatacaacacatctttgactgaaatttgcatcggcaatgattgtgtccaaggctctttctccaccagctgctgcttatgtgggatggaacccatgtataacttgaggaagagaagtaaatccaacttttgtttatttcattgaattcatcctttttccttttgaacactgaaaataacagcttgtatgtctttaggattggttcaggaaaatgttattatgacagtgcactagcttttcaccttgttatcccattacattgttaaattaaccatggttttattgccttcgtattttctggacggggatgcaaaccagtgtcttcttggatacttgcatcttcctaatgttccgtgtaagctgatttccttattttgcatagtgtaatgtgttctactagcaacgatagggtttgagatattcggttttgacatttcatttgatggcatttgatcattatgttcaaagatgctcactactgatgctgtagagctcactcccccaaatctgcaaccttctcatggactctgaaattagaatcgaggtttgtgttcattcatgtacacaattgagctattcagtttgaattttcatctgaatcattctgtgttcatctacaacggacaaattattcttatcgtgactgatcaacgcagcacaaagcaaagcacagctatagcgcatccagcgatgagaagaaaaagggggaggaaaacgaggggtcctgtacctcggttgtgctcgaggttctccggcgccggcgacgtgggactcggcggcgatttacctcgtcggagcgctcgctcgcttgccgtcgtcgcatcaacggcaatataaacatataatgtctccctgactcgtggggccacttgagggcaagaacgcaagaacgacgcgtgtctctcctgcttgagaactaaccggcagccgctcgccggagctccctccggaaaccccaaatctcggcgcccgtatccagaggcggttcgtgtcccgttggttcttgggctcctatcctcgttcagatcagggaggctgttcagttcttgtttatccagcggggcgcagcgaaatttacagaggaatctcaatctccaaactggtaggaagagagtttggtcgatagaagttgagctcttgtttgttcgttggtctgcagagttcactagttcagataatcatatcatcaacaccatgaattgaaagagatgctgcactgctgtttattgtgttcactgtttaattcatagcatccatcaaacctgtatctgtttgggagaatgttcgatcaatgctacagttggaatcaaattcaactcaggaccaaattcgtgttaggcaaatattcatgttcaatctgttaatacgtttaactgcagttctcaacatctcttgacgaggaagcagggctgctgctgcaattcggcctgcaattcaagtgcagcaatatgttgtgtgcaatttgtgcattagtgcacaagttgagaatggtaatattatttcactcggaagagatggaacagttgcgaaacgcagaaccactcggttcagaggagaatagtcctggacaaaaggacagaaaatggtccaatggtgagcattgatcatttttacagtgaatggtgagcaactgatcagcatcaaccatggtgaagctgaacctgataagtcgacagcactaggggtgatgatcctagccacccataaatcctttcttgtatgtttcctaacatatataagtcagcaagtcaaatgttcttatcgttttctttagtcgatggttcatcgattctgacatcaagacaagaagccaacatactgctagccatgttactttcctcttggctcacatacggccatttgaatggattagattcagaaataacactatatctcgtctttctttcttacttacatgagttgaaatattcttggcctttttttctctacttactagggcagaattaagattttgaagatgagctgcaccccaatccttaagagatactaggaggtactccctccgtttcatattataaaacgttctaacattgctcacattctagacacacacatatatatatatattgattcattaatatatatatatgaatatgggcaatactagaaagtcttataatatgaaacggaagaagtaccatattttctaatgtaaaatttggtatttctcgataccttcggtattaggaggtctttctttctctatttactagggtggagtactctgaatgaatttcagtccaaatatctttcctgacatgggaatctttttagtagcacgatggagaaatttatatatgcagctgaaacatcttgttcatacatcagactgccatttgcacaatttgcaaacttgttcaaacatctttatctaagatggcttgtcttgttccgtgcaatttgcacactggaaaacaaactcctcatgcacagtgggacataaatggtgagacggataaaagagccattgtactatttgaacactgcataagagagccagcccatctagtccacgagacataatctcataatgggaacttgctcgttgtcttccttgtgaccggcgatgcctcggctgcacgcatcaaaggccttgctctcaggctcagctgagttttctctcacaacatagggtttgaacaattttctgcttgtcacgttaggagctagccaatcgaaacgttggctcgctcggtcatcatcttgcattccagaagacacccgcctgctccactgccgttcctgtcgatccgattcacttcagcctcagctcggctttcataccaagcaagttagctttgtcaacttgagcaaaattaacaccgcaatttgagccggttacttctttctcgtttgcctgttgatacaaagaagccaccgaaaggtaaaccccttaatgatttcagttcttcagcttcagtaatcagtatatacttgctcaaaacagattgcaaaataacttgctagctacaaagatactctgaaaccaattcaacttttgtccattttcagacggtattactcttgcatgatttaattggatatattgcttacgccaaaaaaaaaaacttggatatattggagcatcaccctcgacgagtttctctatggcaaccatactggattctttgattggatcatgtgctaagaagttgcaagagatcattaccgaggaggcaatactaattttaggtgtaaaagaagatcttagagaactgcaggaaaaaatggaacaaatacgatgctttataagtgatgtggagcgaaggggcatggaagactcatcaatacacaattggatttctcgtctaaaagatgctatgtatgatgctgatgacattatcgatttggttagctttgaaggaagcaagctattaaatggccattcttgttcaccgagaaaaacaattgcatgtaatgggctttcacttctctcttgcttttccaacattcgggttcaccatgagattggtaataaaattagaagcctgaacagaaaactagaagaaatagcaaaggataaaatatttgtaacacttgagaatacacagtcatctcataaagattcaacatcagaattgagaaaaagttctcaaattgctgaatccaaccttgtggggaaagagatattacatgcttctagaaaattggtgagccaggttcttacacacaaggaaaagaagacttacaagcttgctattattggaacagggggaatcggaaagacaacacttgctcagaaagtattcaatgatgagaaattaaaacaaagcttcgacaaacatgcatggatctgtgtttctcaggactactccccagcctctgttttgggacaactacttagaaccatcgacgctcaatgcaaacaagaagaatcagttggcgagctacaaagcaagcttgaatcggctattaaagataagagttattttcttgtgttggatgatgtatggcagtctgatgtgtggaccaatctactacgaactccactgtatgctgcaacctcgggaatagttttgataactactaggcaagatactgtcgctagagaaattggggttgaggaaccacatcatatcgaccaaatgtcaccggctgttggttgggagctactctggaagagcattaacattgaggacgagaaagaagtgcaaaatctgcgagacatagggattgagattgttcagaaatgtggtgggctacctcttgcaatcaaggttattgctagagttttggcaagcaaagataaagcagagaacgaatggaaaaagattttagctaattacgtttggtccatgtataaacttcctaaggaaataagaggtgctctatatctaagctacgatgatttaccacagcatttaaagcaatgttttctttattgtattgtatatcctgaagactggaccattcaccgtgattaccttatcaggttgtgggttgccgaaggctttgtagaagtgcacaaagatcaactactagaagatacagcagaagaatactactatgagctaataagtaggaatctcctccaaccggttgacacatcttttgatcagagcaaatgcaaaatgcatgatctcttaaggcaacttgcttgccatctatcaagagaagaatgttatattggagatccaacatcattggtggataataacatgtgtaaattgcgccgcattttagctatcaccgagaaagatatggtagtcatacctagcatgggtaaggaggagattaagttgagaacttttagaacccaaccaaatccactgggaattgagaaaacatttttcatgagattcacgtatcttcgtgttttggacttgactgacttacttgtggaagaaataccagattgtgttggatatttaattcatctacgtttacttgatcttagtggaaccaacatatcctgtcttccaaaatctattggtgctctaaaaaacctccagatgttacacttacagcggtgtgaatctttgtacagtttgcccagcatgatcactcggttatgcaatttaaggcggcttggtcttgatgattcaccaataaatcaggttccaagagggataggaagacttgaattcctcaatgatttagaaggatttcctgttggaggtggaagtgacaatactaaaatgcaagacggatggaacttgcaggagttagctcatctttcacagttacgccggcttgacttgaacaaattggaaagagcaactcctaggagcagtacagatgcattgttgctaactgacaaaaagcatcttaaaagtctacatctatgctgcactgaaccgactgatgaagcatgctcagaggaaggcattagcaatgtcgagatgatctttgagcagctaagtcctccacgcaatttagaagatcttatgattgtattattctttgggcgaaggttccccacctggcttagtacatcccttttatcttcactgacatatttgaaactcaaagattgcaaatcttgtgtgcatcttccaccaattggacagctaccaacttgaaataccttagaattgatggagcaagtgcaatcaccaagattggacccgaatttgttggctgctgggagggtaatctcatatccacagagacagttgctttccctaggcttgaattattggctatcaaggatatgcccaactgggaggagtggtcctttgtcaaagaagaagagttgcaggaggagaaagcagctgcagcagcccaggaagggggaaaggatggaactgctgcttcgaagcaaaagggggaggaagccccgtctccaactccaaggtcgtcgtggctgctgccttgtttgaagcagttgcaacttgtggagtgccccaagctgagggctctcccaccacagcttggacagcaggccaccaacttgaaggagctcgatataagaagagcaagatgcttgaagatggtggaacacctcccattcctctctggtatactttttgttcaaagttgtcaaggcctggagataatctccaaccttccccaagtgagagagctacttgtaaatcattgcccgaatttgaggcatgttgagatgttgggtggtttggagcagctatggctgtcaaagaatatgcagaagatctcttcactgtgggtcccagggcttgaggagcaacatcgccagctccatggagatgagcataagttggaggtcaacgagtggttttaagagccaattaattagatggcacaaggtatgtacactaattggttgggatttttcactggaataaactaatcattgggttgtacatccatgcttcttctctgctcttcagctgtatgcaactactctagcatttgatagtctccttagttgttcatgttgtgtgaattgtgattgtttaataatttatatgatttagttcttttttcattgagtttttctcccggccttccttttgtagcacgcggtactggtactgtgaggtaccagtctccatccggccgttgattgctgaggggtacgatgggtatcacgtgtggtccaaatagcgtgtgtgtctcgatatctctcgctttcccttctccttctgcatctagcgctgccgcagggcacatgagaaaaaagtcgaggtgaaggtcgaccccatcggccgcaccgccgcaggcagacgcagcaagggcgatggcatccgcaatcgtcccagaatcgtggccgctgcagttgtcctcgccagcgccacaggagttgtcgctgccgcaggtgtcatcgctgcagccgtaggtgtcatcatcgcggtcacaggagtcgtctcggcgccgctgcaagggccgtggctgcagtggatctccaggaccccatccgcagcatggtcgcaggagtcgcagcgttgagaggaatggatgaggcgccgccgcgaaggggaaaacgatgggacaaggggaagacgccagcatcgagaccaacgaatgccgccgccgccgccgtcgtattgtccgccacgcgccgccgtcgggaggaagcctagggttttgctactctgcggcacttccccaaacaaaccaccgatccaaacatccttccaaacgcgaaaatacgattatacccttccactatggctcactcgtgcttgctaccccacgatcaagctggtaccctgaggtaccatgtaatcgtgaccattcgatatgccatcattaatggatgggattttagtaccttgcggtacaaaaagaatgaccggagcaatgctctttttcattagtgctgcatgtaaccatttcaccgtggtcaagattttcataaaatggtagatatagatcaacaaattaattagttgaccatatcttttatccactcatggtcttattaacatcctgtatggtatgttaaataagtgtatcgtcctataggtactacaacatgatcatatgcagtagtgtacaaagatttgaagacagagatagagactactgctactccaaaacaaaactgtatgggttatatcgccaaaaacatgctatgatggcattgctattcactatatgtcaataggaatatcatagatggatatatccatccaatgatttgtcccaacataaatggtttagcatttggttcataggctgcaaaagtgagggactaaacatattgggcttcgttaggccaagagataagtaacccttaatttgactcttgaatgtaccagctatgatgcagaccagcttacatgcatttagccttcaatttcacaagtgtgttctatatcagatcatgcatgtgtgcaaaagatagcatttactatcttgtaaaaacacatatacacatgaatttttgcaagacattagacctatagaataatttttttttacgacaaaaaataggttaggcccaatgttacagattccttgcgacctgttagcaggatattaaacatgaaagggttgtgcccaacatctgtttctactgtagggctcctaattaaggtttgtttagtgccaaaagtatccacctaaatgtctttgcattggttcaaattgattaatattttttttcatattctatcagttaaaataagcggaggatattaccgacatgcctatctgtatatgtgtcttttccttatactttttgtaatgcatgcctgatgtttggtaagttaattccacgaaatatgattgttgcgaaactgatagcacttatatttatttccttaattaagttattaaaactgatgtctgatgtataaagtatatatacatccgtgattaatttttgtgtgcttatttgttttgtaggttgttaatcttgaagagttggagtgcagtcattcctcagagaataaaatgaaaaaaaaatcacaaaacatgaaaatttaaaacaaaaaaaaaacaaaagcatcaaaaaaaggggaaatgtcaaaaattgaaaaaaaaagcattttctttagctattgtaaaatacatcttcatataatttgttatatttgcttgcgtttgttttcttttaaaactttttttattgtaggtgtgtaggtaactccgcctatgtcatcttaaggcgtaactaaatgacatagccggtcccaagcccggaaaaaggaggaggggatataatcttgtatacttctatattgaaatgatgctctgctgctaaatacatcatttgatattttcttggaagtttctgcacttttatcaagctaatttcatcttcagtaatggatcagaatagttatggagagtcatccactctgtttaattgttcaacaaatctgattctagactattttagtttgacctcattacagtccagttttccagtaaaagcaatttggatgaacacatgcatcagttcattctcctctgtcggtctgtcctacatccttcagttatcagtgccagatcaatgatcacaagagttgatattttggagaccacaaatgcacaagtctgtttgttggaggctttagtatttttcatgatcaaaactggtgcagaaaacatctgttatcacatatcacgctatttaggttcagaacataattatgaagcacatgatcaacaaataaaaatgatgaatttaaattcatgaaaaatggaattggcaaaaaccagaaaaacagagaggcgtgcttgatgtcctgacaagaatgatttccagcgatggtcagtaattactgaagtacattgctctagtgaatctttacataatcacttcacctccatgcaagtttcttgactggaaaaaggtaaacatggaacagaataacaaactgcacctggagggggctactttatttttatttttttttgaaagataccttaaagcggatactgaactggactgaaattgccactgaatgttcgatcacattaagcctggcaggaaagcggagttctcaacaaacagagttggacaggaaatggtccagcagcaatgcaaacaagcaatgctgatccgggtaggaatgggcgagttcaagtcgttgtgtcacgcagggttcttcttccccgaggcgaagatcaagggacactggaagtggagcaagacgattaaggtcgtcgaaagcgagacgctcggcagcgctacctatggtaagaataggaagatcttacaatcgaattcagggcgttcaggtaaacactagacaaatcccaatcgccaaatccacagcatcctaaacgaaaatcaacagtgtttctcacagcaatgatctgaacgaaattcatcttcacatgcatatatatcacccatggccagcacccccacacatacatatcttattcaacaaaattacaagcagttccctgataaagttgcatattacaccaacaggttctgcaacttccatgcagctcattatcagaacatcaaacttctattgagcaggaatgaatgaatggatcaatgggtagatggtaggagtaccatactgactgtgtgtattgttaggaaaccgccggcccatgaaggcccggctcggttacccactaattaggcccatcactaaatatggaaggtggaagagggaatggctataaatagaggagtagagaggaggattgtacacttgagaatgcaatggatgaatgagaaaggatgccacaccctcatatcttgtgtctccacttttgtagaattacgcaatccctcttggactatctcggtacatttagtctccctgatggttacagcccaccttaactgaattttacatcagcaatgattgtgtgcaaggccctctttcctccaccagatgatgctttatgaccacaaaatccatgtatatcttgatgaacagaaaagaaaatcattccttccattatccaacatcgttttttattgagtccatccttttccatttaaacgctgaacagaacagcttgttactctgtcatcaggattggttcaggaatcaggagagatattatgacaaataccctagcttttccccttgttgtcccgtcatattgttgaattaactgtagttttgatgggatgctaaaaagtgccccttttggatacttcaaccttcctaatattccatgtaagctgttttcctaatttttcgcattgtaatctgctctactagcaatggcttatgtgctacatctcctgtacaggattcagaactcgagttcttgccacaaaatggttactgtacacacaaatctggctaaaattgtaaatggaaaatttcaaatgccaactgcaattaacagcagattgagttgcaattaactctcctatgctttagagttcacccccaaatcatcaaccctcttatatggactctgaaatcagaatcgagttttgtgttcagttattgcagttcagtgctctagtttcatctcaactgttccgagtaattaacaactggactagaaattattcttcccctgtactgaaactcactcactgactcatcgaagcgctcatacactctttgatgggccatacactttgggcctcgttttgctcctgccctgtgcagctgtgctgacgggccgcatgtccccgtagtatggaaaaagtacaccgaaggtccctcaacttgtcatcgagttacaaaattgtcccccacgtcccttaactaatcaaaaccggtcacaataggtcctttggtgtttttgactccggttttatcctatgtggcaactgactcagcatgggacccacgtgggtcccacatgtcagcatcttattccttcctctctctactgccctttccaatcccccttccacgggcgacgggcgtgcgcgggacggagaggcggggcgcgggcggctgggcacggcgtggccggcggccgaccggaaagaactgagcggcggcggcgggggaggagctaggcgcgagggcggtcgcggtggagccggtgccatcctcgcctcgcctcccgcacgcgcgcgtgtgcgtgcgcctcgccacacccccgccgcctaccgcgcgctcgcagccgccactgccgagcaaggcgaaggcgccatggcggcgctcacgcaggcactcccgtccgtggcacccgtgccgccgccgtcgtgatctctctcctcatcgtcatctagttccaaggaaggatttggtctgtgtctgtacatgactttttttttgttttgctcgggctagcttggccattgttagtgaattgatggtgaaaataaaaaagagtttattgggtaggtctggtgttgccgccaacgccgtcccgcgaccaggcagcggcagcaatcggagacgaccacgctgcggcgacaaaacagaggggaacacgcagcggggaacggaggggaacatgtcgatctggccgatgtcaaggttggtgggtaccagcgtggggttcacccgctcgacggcctggtactgcatcaggctctgcagcttggtggtggagacaatccagaaggtgtcgccggcgttgatctggtactgcataggcgcgtatgcattgggcgagtgggaggggcacccacactggagcggcacaagcagcggctgccccgccgctcgcgcgcaacccctccccccaccgaccgcgtgacgcccctcccccgtcgccgcttcgtgggtctcgtcccctccctcccccacgcacccgtccgtctcgcgcgacgccatcaccgctgacgccctcctcctctcccgcctcgcagaacgcagagcagagaagtgagagagagagagagagatgaggaagggagagaagaggggaaaagagagagaaggctgacgtggccacactgacatgtgggatccacgcgggtcctacgctaactcagccgccatgtcggacaaaaccagggtcaaaaccaccgaaggatgtaaagtgaacggttttgttagttgagggatgcccgctatttggttttgtggttggaggatgattttgtatctcgatgacaaattgagggacctttggtgtactttttcccccatagtatcgtccaggcccacaaattaaatggaatcccttgctggaccatataacatgggcctacgtcgcttccggcgtacgcccattaatcggcccgaccgcaagagcgatagtctcctggatgagagaatccgccgccatggcagccgctcgccggagctccgccgactggccacggagctcctctccggcgaagatttgcatcacgtaggttcttcgagtcttccctttccataatgtgctttggctctttcatcttcttctctctgtctcacagatcagacaagttgcgcatgataccaaattagagatgctgtactgctgagtaaacttcagatactattgtgttaccaaaaattatcccgggaaagcaacacctgaattcttttgatatcaacacatatctgtttgggacaatgttagatcagtgctcctgttgatgtcacaatccaattggatgctttctaggagtaaaatgctttctaggagtaaatgttctgtgcaatattgagttcaacacttcaatcaaaccagatggtttcagatcagaggtattctaaggcatagttatcaacaacacaaacttgcagaaggactatcaaactggaggaaataaattttggtcaaatagaaagaagtcatgaaaacaagtactcatctaagcaattactccagtaattatgtataatattctatgagaaatagttacaatggcacagactccaagagtttttgaagacttcgtgatatgttcatcagccataaattctagaattagaatgcgacatgactagcaagatccaaattctccaagaatgctctgtccttgtctctattgcccggctccttcacactgcagatgcaaagcagagtgaactgattggggtctggatggtcgggtgtgatcccattctctagactctttgagataacaaagatttgctctttgtcacctttaatctccttcttgagaagtactagaagcatctcagttgcctgcagcttagtagggttcaacgtggagaggaagatctgcaagaaccagataggcatcagccatgagtaccatgaagttttgccgtgaatggtaagctgattagaatcttatatagtcatatatatttacctttcttagttttctatgtaataagtgataatagaagaattttgttgttgctgagtg

SEQ ID NO: 24102 - DNA, 3389 bp, Oryza sativa
tgactgaacttttgcaagctcctgaatcacaggaggtagctgacagatactgtgtgtaccgcaacatggtgcaccacatcgccggggagttcaccacattgcttgacctggaaggatgtcttcttccaggtcaggattatcggtcagagacaaaccaccagtttcttcatagttcagaattacatagaaactactaaactctgaaaggtgaaagctttaaaagctttaaaccacagcgaggggtgaggaaggcatgacgcttatcttcgtgtgctgcaaccccagctgcggtcacagatggagggagtacgtggcatgcaaaggcagtagagatttgcgttatgccatgaattggtctatgtttactttgtcaacaagagtatgagatgccatgatcctatgacagaggaaacaaaactgaagcatgtgtggccttccttctctatctgtttttttttctaattcaagggcgcagctagttgactagttccacatcatggaatcttgaagccaacagtaaagtaatcacatagaagtaaactgtagatcaatcacatggaaataaactgtgaactaatcacatcgactagacaagtggacaagcacaaaacgttgggttgtggagcatagacaagtggacaataactcaaaattgggtcagcggtattaacgtgggaaagataaaagaaaagagtggttcagcacttgtctagtctgaatgttcagctagctatgcaatatatatatgcaaggtcttaccactccctcctgcagtactgttgctttgttccactgttgtgtgtgtggcattcttgtactgcatttctaccagctgtgggtaagctcaagacatatagctgaatttacttcctttgtttccttaagataatctgtaaatgctcgttttgattgcaggcacggtgtttcatcaggatcagtcgtgtctatttctgtctgccctgtgatcgcttgagacgaggtctgctaggaaggaaaatctgcttcatctgaataaacacatatatactgatatctccttgtagcagacactctcccgtcggtggatgtcaacacattcacctgtatttttggtattatcccattgatccttctagttaaccttctgaatcattcaagttttacatcggtataatgagcatacacttcacctcttattttcatctcccctttttgcagttgtagcagcacaatcagtggttctctcttgatgactggctcataatgttctgaaatcctttctacagttggcgtatccactgagtttcttttgatcttcactaatctgagtctgtcgagtatctaaagtagatgggtcagagcaaacttctagcttgtgcaagatgaatgctactatactattgatccttgttatgtgacttatgtcttttcatgctgaattatcactccataaggtaagatttgcatgcaatatacttgagtaaaacccctcaacttgtttccggttacttctttctcctcatttacctttaacccaagaagcttacccgaaatgtaaccccattattccagttctttagcttcagtatgctaacttgctcaaaactcatggcaaaacaacttattaaaaaccttaccgaaatgtaaccccattattctagatactctgaaactgattgaacttttgtccattttcagatcgtgtaattctcataagtaatttacttagaaattttggtgcatcaccatcaacgagtttctctatggcaaccatattgggttctttgattggatcatgcgtaaacaagttgcaaggcatcattacagaggaggcaatactaattttaggtgtagaagaagaactcaaaaaactgcagaaaagaatgaaacaaatacagtgctttctcagtgatgctgagcgaaggggaatggaagactcagcagtacacaattgggtttcttggctaaaagatgctatgtatgatgctgatgacattatcgatttggctagttttgaaggaagcaagctattaaatggccattcttcttcaccaagaaaaacaactgcatgcggtgggctttcacctctctcttgcttttccaatattcaggttcgccatgagattggtgataaaattagaagtctgaaccggaaattagcggaaatagaaaaggataaaatatttgcaacacttaagaatgcacaaccagctgataaaggttcaacatcagaactgagaaaaacatctcacattgttgaacccaaccttgtggggaaagagatattaaaagtttctagaaatttggtgtgccacgtgcttgcacacaaggaaaagaaggcttacaagcttgctattgttggaacagggggaatcggaaagacaacacttgctcagaaattattcaatgatcagaaattaaaaggaagcttcaacaaacatgcttggatttgtgtttctcaggactactccccgtcctctgttttgagacaactacttagaaccatggaggttcagcacagacaggaagaatcagttggcgagctccaaagcaagcttgaattggctattaaagataagagttattttcttgtgttggacgatgtatggcagcatgatgtatggaccaatctactacgaactccactgcatgctgcaacctcaggaataattttgataactactcggcaagatattgtcgctagggaaattggggttgagaaacagcatcgtgttgaccaaatgtcaccagctgatggttgggagctactctggaagagcattagcattcaggatgaaaaagaagtgcaaaatctgcgagacatagggatcaagattattcagaaatgtggtggtctacctcttgcaatcaaggttattgctagagttttggcaagcaaagataaaacagagaacgaatggaaaaggattttagataaaaatgtttggtccatggctaaacttcctaaagaaataagaggtgctctatatctaagctatgatgatttaccacaacatttaaagcaatgttttctttattgtattgtatttcctgaagactggaccattcatcgtgattaccttattaggatgtgggttgccgaaggctttgtagaagtgcacaaagatcaattacttgaagatacagcagaagaatactactatgagctaataagtaggaatctcctccaaccagttaacacatcttttgataagagccaatgcaaaatgcatgatctcttaaggcaacttgcttgttatatatcaagagaagaatgctatattggagatccaacatcatgtgtggataataacatgtgtaaactgcgacgcattttagttatcaccgagaaagatatggttgtcatacctagcatgggtaaggaggagattaagttgagaacttttaga

SEQ ID NO: 24103 - DNA, 25392 bp, Oryza sativa
gatgctaacacctccacacaacttacgagatcttgttattgggtatttctttggttgtagattccccacctggcttggtactacccatttgccttcagtgaaatccatgatcctcgcaaattgcaaatcctgtgtgcaccttccaccaatcggacagctaccaaacttgaactacttgaaaattattggagcaagtgcaatcaccaagattggacccgaattcgttggctgcagggaaggtaatctcatatccacagaggcagttgctttccccaagctcgaaatgttgatcatcaaggatatgcccaactgggaggagtggtcctttgttgaacaagaagaagaagaggtgcaggaggaggaagcagttgcagcagccaaggaagggggagaggatggaactgttgcttcgaagcaaaaggggaaagtagccctgtctccaaggtcatcgtggctgatgccttgtttgaggaggttggatctttgggactgccccaagctgagggctctcccaccacagcttggacagaccaacttgaaggagctccttataagatacacaagttgattgaagacggtggaggacctcccgttcctctctggtttacttttagttgaaagatgtgaagacctagagaggatctccaaccttccccaagtgagagagttgtttttaaattgttgcccgaatttgaggcatgttgaggagttgggcggtttggagcagctatggctggatgaaggtatgcacgagatctctcagcagtgggtccctgggcttcaggagctacactgcaagctccatggagatgagcatgagctggtggtcaacgagtagctctaacacccacttaatgtagatggtgcaaggtatgtacactaattgcttgggatttttactggaatatactaatctttgggttgtacattcatgctgctcctctgctcttcagctgaatgcatctattctagcatttgatagtctccttacttgttcatgttgtgtgcattgactgattgtttaatcacttatatgatttagtatttatttcattactgctgcacgtaaccatttcaccgtggtcaagattttcataaaatggtggatatacatcgacaaatttgttagttgtccatatcttttatcctctcatgatcttattaacatgcatcctgcacatacggtgtattctagataaatgtattgtcctatatgtactacaacataatcatgtgcagtagtgttcctagctctgcagacatagatagagattactgctactccaaaagaaaattgtatgggttatatcaccaaacaatgctatgatggcattgctatattcactatatgccagtagtaatatcacatatgcatatatccattcaaggatttggggacaacataaaggcaaaatttgccactggacacgcaaaaaaacgtgtaattggctgagagacaccgcgaaaacgtgacatggctgatggacactacaaaaaatgtgtaattggctgtaggacactcgtcgcattattttattatttccgggtcaaaacaggtgagatatttttctaaatgcccggattgccccttctctttccttctttaaacaccggtgggtcccatgtgtcatggacagtgtatgtttaatctaatttataataggtttttaaccacctggccccacgcgtcatggactaatttttgtaacaccctgaaaatttgaccaacaaaaatcaaagttccaaaaatatggaccttcaaaaactttttaaataaattgcatcatgctgattttgttcacctatttcatcggattttaatttcggagttcatagatcacgaataaagaatagttaattaggaataaaccctaaaattagattggcaagagaaataattaagatataatttaaaataaagattatgtgaggatagaaataaataaaacattatcacgaccatatttatatcaattaaatttaaatgtgatggaataagaattaactctaattaaattccaataaattatatataaaaataaaatatgggtaatgataatctaggttagagcaacacaaatattgtgtaaacttgatttgtgcaaaaattataaatattgggacaagatttgaataggaaaaacaaccaaataggaaaaacagaaaaaaattcactattcattgcgctgtaagtgttcgatcgcgttccctagccctaacccctcctctgccgcacgcgcctggccgccatcacgtcgccgctgtcgcccgtcgcgtcgtcgccttgcgccccgtgccgccgcgcgccgtcgccgtcgctgccgcgccgccttgcgccccgtgccgccgcgtgcgccgtcgccgtcgccgttccgtcgccgcgcgtgcgtctcatcgcctcgcgcctcgcgccgccgtcgccgctgtcgcccgtcccgtcgccgcgccgtcgtcctgtcgccgtcgcgtcgccgcctcgtgccccgcgcccgcgcgccgcccgcccgtcgcgtcgccgcctcgcgccccgcgctgctgccgcgccgcatcgtcgtcgcatcgccgtcgtcgtcgcaccgagccccgtgtcacgccgcgctgcccgcccgtcgccatcgccgcctgccgcgccgcgcgccgcctgtcacgtcgccataaggctgcccgccccgctccacgccctataaagcccgacccctcctcttctccaccccacacacatccccttcatctttcctcctctccctctcccccttccccacgcgccgccgtcgtcgtgccgccgcgccgccgccttcgagccgccgcgctgcgccgcgacttgcgccgccgtcgccatcgtcgccgccgctgcccccccacctcgcgtccaccgccgccgccgcccgggtgggcaaggagccgagagagagagagggagaaaggagccgggagggagagaagagagtaaaaaaaaagaaagaaaagaaaagagaaaagaaagaaaaggaaaaagggaaaagaaaaagaaagaaaaagaaagaaagaggaagaaaataaataggcatttgagtaaaatttagaggtttagaaaatttaaaataattagaatttaatcgtggattaattatagtcgtaaaattgcgaaatttaattatattttggtagcctctatgagtaatcaatttgcggtaggaatttagatttatttaagaactaaaataaaggtgttgaattcttaggaaaattacttaggagacacaaaatgtcttaggttgaggaatagttctatttcgcgaataatatagtggatataacaatcgactctcgtgctcgctttttgatttggtctttattggattttatttgaattcggaattcaaatcaattcttcgcacgtacttgtagagcccgagggagttgcggatccgagcgaaggtcaagacccgcaagactttgagcaaggcaagtcatcactattctttgagcatattgatcccgattgcaaaatttattttgtttacaaataagattggatgtgatgatgaacattccacttgtgaactatgccatgccttgattattgttcatctttaaatctttgtaaccataaatacgtatgagtccctagtcaactatgacacttgcttagaaatgctactctagatttatgcatgctcatactttattaaatgctatatgcttgggcaattacctttgggaagttaattgagatgcggcatgtggagacatgagcgccacattgccatgatatgatgacatgaattatgaaaataggaatgaaattaaacacttgttttagactggggcggacggtaatattgggtgatatctgggaaaggctagtaccgtccccggtcaattaaggaccgagccatgaagttaagcatgaaacgaccctgtacaaccacacttctcgtatggggatagacctagcggagtaaatagctgagcggaggcagtatccttgcatagtggtttcttgatgtttgaggatggggctctacagtggtaccgccattggtaggactgccatatgataatttagacataattataacttaatgcatgtgcgtgagtcttcccttcccgggtgcgccagaactcctctcgctgctagaaactgtgtacgcctagagtgcatgaggatgaaaagttcatagagcggatactgccgatgccaggttatcgaaaagctttgccgtgacacgtctcatgtgttgggacgaggctcatgtgttgggcagtcgcggagtgcgggtaaagtgtacatccactgtagtgtgagtaaaacaaatctattcgaatagccgtgctcgcagttattgagcaccgggacatgtattacacttagctagactctaaattcttaacttgtgtggaatgggatattgcatgatgatttttatgctgttggagccacttcctgagaggagggaaggtggacatcctcagaaaaccatgacaactcaatggcgggaagctatccttgggatcacaatggatggtggacagcaccatcgttgtttaaatatgaacactggtactaaaatttgctcagtcaatgctaggtcttaggcttgtgaaaagaattacaaaacttgctttgcgcaaaagaaccatagccatcctttgaaatacccctatcatgtgcattgttgatgtgatggcttgctgagtacggttggtactcacccttgcaaatataaacttaatcagaggccggagatgaagcttcggaggatccctgtgcctattaccaggagggtgatgaagacgatggtgctcaataggtcttagttacggtcgttgcctgtggcaatggcgtgccgctgccttaactctgctgccttatctacctctgtttttgggatgtactccggaccgctcggttcgatgatttaagactatgcctgcgggcttatgatgtaataatttgcactagactctcgtgtatgtgcatatggtatttcagctataaactcgtgtgtaccagactacttgatccagggaaatggtactgtttacacgattgattcctgttataaaaacgggggtccacaatttttttctaattagtagggtgattgctatttgctaatcataagtggggcccatatctctctcctatccttcttcttcttcctcacgcacgcgccagagtagaggaacggcgcgcggccggcgcgacgacctgagccaggacggctcggcgtgcagcagaaaaagcggcggcgctccgccatggtctcaccgccggagctcgtcccttacttgaccagagacgggacaaagacgggacggagaagcgcgggtgggtcaggatggccgtcgatgccttggctgccgtcttgtccgcggatggggtaaacgaagataccaaggaaggtctcatcgatgccctcatagccggcgatctgggccccatcatgaacacgctcatcgcagctgttcccagatctggtatgggtcctcaaggacgccggcaatctgctgcatggcggcaaccgtgcaggtgcgaggctgcccagctcgctcgtagatggtccggccaggcgccatcccgacgctcgcgcgagttcaccgtgggagacgactagaggatgagagaggcagtggcatccgcgccggaggccgtgggaaagttgctcgtgtgatgcaaggacgacgacactgtacatgggcccacatgtcggctgcatcgagaagagaggggcattcctgtcattttgaaaattttcttccctctttcggcatggaaattataaaataatgtcttcggtgtcctacaaccaattacacaacttttgtagtgtccatcggcaatgccaagttttacagtgtcccttagccaattactcgatttttgagtgtcctgtagcaaattttgcccaacataaatggtttagcatttggtatacaggctacataagtgcacgaccaaacataatggacttcgttagaccaagagataagtactccttaattcagctcttgaatgtgctagctatgattggctgtgtacatccttcgggatgcagaggccgggttttatttaatccattatgtaaaaatgtgctatctatgatgaagaccagctcacgcgcatttagccttcaagtctgcaagtgtgttcttgtcatatcaatgtgcacatttagcattcactatcttataaaaacacaaatacacatgaattttcgcaagacattaggcctatagagtagttttttagatttgacaaaaaataggtcaggcccaatgttacagattcagagattccttgcagcctgtgagcaggatattgaagatggaagggttgtgcccaacatctgttcctagtgtagggctcctaattaagttttgtttggtgaaaaacaaaagccacctaaatgtctttgtatgtgtcttttccttatactttttgtaatgcacgtctgatgtttggtaagttcaattgcagaaaatagattgttgcaaaacgaacgtcacttgtattttcttttccttaattaagttatttaattaccaaattgcttatgtatatacatccatgattaattttttttttgcggggaacatccatgattaatttgtgtgcgcttatttgtgttgtaggttaatcttgaaggatttggccgggctgcggtcacctgtaatctgtatttttatctttacctagctactggtctttgaaatattaaaaaaataaaaaaacatgaaaattaaaaaatatatatcaaaaaatgggaaaatgtaaaaaaaaggttatattttctttaactcttgtaaaatacattgtcatgttttcttagatgtgtgtgtttcttttctttttaattgttttattgtaggagtgtatgtaactccgcctatgtcatcttaagtttatctaaatgatatagccggtcccaagcccggaaaaaggaggagggtataatcttgtatagatgttggttgaaatgatgctctcctgctacatagtggatcattgggatttttttgtacttttatcatattattttcattttcaatgatggaatagttatggagacacttctgtagactcatccagtcttattgctctgttggacacatctgattctaaactaagcttgaccagaccaccagatctgagagttacgttgcaaattgagatagacaagtaggtaaaggaaattcagtgccaggcatgacaagaggcagggcaccccagataaggtgtgcaacgagacattcgagtctctgagctcatatatgcccaaagtcctgaacaactcgatacaattttgctacaagatcaaatcataacggctagatcaaggtaagttctatttttatgtcggtttggccgatctagctaatgaattgacaaaatataagtacagttacatacccactaatcaataaagacatccccatgctaaaacaagtatgaaagaaatgtgcatatccctcagtatctaaaagaaaatagttttaagttttagcctataagtttatcccacaaagattatttttacagtgaggttcactagatctctttaatactactttatatttttctccctccttctcttttttttctcctcattaatagaatacaatgttcttttagcctcctacttaatctatctttgatagctaaaactacattgttttagaaacggagggagtatgtgagtgacaggttacaacttacaacaatcattgtctgatgtgtcacttgcttcggttcacaataggctgtgaactttatgtgttgcttcggtttgttgttcccctattgttttgttgctagctgctatgcttgtcatcagttcctgtgatgaacgtggcggtctgaaactctgtaagcctgcaggtctcactctctgtctctcctcattcctgagtcctgacagcctgtggcccatttctgcatttagtcctaattaatgaatttacctagccagttgacaccatcaggagggaaaaatactgaagactctgtgaaccctgcaatctagtagtttacatgtttattcaaatgagcaaatattcaactccctcatggactctgaaataagaattgagttttgcattcatttcttgtgctcttcagttattcagttcagttctatatagtgtcaggactatcatctgaactgtttcgggttcatgaacaataactgttaagtccatctaataagttcagttattcttcccctgaatgactaatgcagcaaagcaaagcaatgctgaatcgcatccagtttatcttaatttgggttcctgtgcacacaatttgggtgaacttgtaaagttcaaatgccaaatgtgattagaagcacatttagttagttgctgatggaggtgtatagggcttttgtatgtatggattgtggtaaggcttgtcagaagttgtaattcctacctccagtttcagatacatggcagaatttcacctgatggcatttgatcgttatgttcagagatgctcagttgctcactactgatgctgtagagctcactcccccaaatttgcaaccctctcatgaactctgaaattagaatcgaggtttgtgttcattcctgtacacacttgagctattcagttccaattttcatctgaatcgttctgtgttcatctacaaagcaaagcacatctagagcgcatccagcgatgagaagagaaaaggggaggaaaacgagaggttcgccccaagatccggccgagcctcgtcgaacagcttcgcgctccgccacctatctccggcgccgacgacgtggggctcggcggggatttacctcgtcagagagctcgttcgcttgccgtcgtcgcatcaacggcaatgcaaacatataatgtctccctgactcgtggggcccacttgagggcaagaacgcaacaatgacgcgtgtctctcctgcttgagaactaaccagcagccgctcgccggagctcctgccggaaaccccaaatctcggcgcccgtatccggaggcggttcgtgtcccgttggttcttggagacttggactcctatcctcgttcagatcaggggcgctgttcagttcttgtttatccagcagggcgcaccgaaatttgcagaggaatctcaatctccaaactggtaggaagagattttggtcgatagaagtagagttcttgtttgttctttggtctgtagagttcactagttcagataatcatgtcatcaacaccatgaattgaaagagatgctgtactgctgtttattgtgtttactgtttaattcgtagtatccatcaaacctgtatctgtttgggagaatgttcgatcaaattcaactcatgaccaaattcgtgttaggcaaatattcacattcaatctgttacttcctccgttttacaatgtaagtcattatagtatttttcatattcatattagttttaatgaatctagatagatatatatgtctagattcattaacatcaactaggaaggaagcccgcgcatatgcgcgggcaatttatttattgtctataaaaagaatattaaaagaagccctatcacactatattcactgtaagaaatagatcatagattttgatagtactaaatgataagaatgtgtatcatatccaaacaaaaaatcactttgttccggttatatgtaaattcgcctatcacccctacttattattattgtcttggaaatatgagtatctttttaatagatagaattgtagttatacctaaaagtaaacccaatacaccattaatgccagaaaaagttaaatctccacatcatacccaagtgcctatgtctcacatgtgtccaaatctatatataaatatttaaaagtactgcttctaccaattaataggataaaaccgtttaacttatataagaatgcctctctaacgatcgggtgaagccgactatagccgttaaggtttttctttaatgccttaattcatggtctcgtattgatatagtcgtgctcctcaagtaggccagttaagctctattttcaatggtaacctgtaaaatcggaccacctcaaccgaataatgcatactcctgcatagtttactacaacgtagccaattgagattcatgcttggcaccctttagggaatgagtgaaaaaagatggaggtaatgaaaaaaaaggtttttttgtgtcttgagttgatttaatgtatagagtagacataatgtgtttatgatgttaatcaatggtactaaattttagtagtaaagacatattgtttaaaaaagattagtatggatccattcgactatctaatatcttcagtggcgaggatccacataaaaaatatatgctctcacgatgatcatttgctaacatatggttttgatatttttttcacttgtattatacatctaattcccctatgcatgtaagtagggtttaatatgcgttggaatttgtgctaatttgttaacactatttggatgagaccaacaaaaaatagatataatgtagttacgtgtatgttttttttttggggggggggggacagtagtctctcgtacatacgtttgtttttcttttttttggacaaaattttttctaatgtagggatagggtgtacgcatgtgtactcccagtgtgcttctgcacatatttatatgagttcatatgattgtcttttaaattattagtaaaaagaatactttcgagaaaatcaatgggaagagagtggagcaaagggtggcgtaaggcagttgcatatggcatggcttgttttaccacctcagtaggagtagttgctacatttatataccctcaatttgggaaaatcttagagctggaaagaaagagaaaactaccagatgggacggataatatacacactcttttttttctttttatatctcttatctacatacttacgtaggagttgtgtacgtacgtatgcacagaactatacggtttttagcacatagggattagtttagtatatctaatttaatggttgaaaataatggatcattgatttaattgtaaactgatggataaatattttacttttttatataatttttcatagattctctctaatttattagagcatcacgtggcatcttaggagtatttgtagaagtgtaggaatagtattactcataggtgtaatgtacttgtagtccactattgtttgtagtatattgtttttatattctatttacctataatttgttgatggttgcgcacttagtatcaccctttatcttcggtgttggatgacacacgtgctcattagatatcagctatcgtttggtgcattgtgcatggatatctcgtaagtaatattatttagcgatttgtggacaatggcttgtatatagaattatatatggagataagtgaggacatatgttcgatattttaggttatgattaaccaagaatattgtatactacatatgtttagtaccctaagtaacaaatttaagattgtgttctaaagtgcttatcagattggctactctcttatttatattgaacatgtttcccgaaattgctaaacatgtttcctgaaattgctaaacaatatattatatggtgcatgttttgcaaatactttttatataaaagtttttttttagaaagatcaactaaatttatttttgctttttaatatttaatacaaaattaaacatgtgctaatgacttgcattattccaagtgcctacataaactcacccaataagcttgatctaacgaagtttaaagtaggagataaaggacaacgacacgatgtaaaaataatatatttgatatttaatttctaataatatataaataaagaaaaaacagtacataataaatttactaacctcattttaatatattagttttttttacagtatggaatgagtaatttttgagggtgctatttataactgggttttttcattttcaaaacgcaggtctaatagtgtacttcctccgtataaccttgtaagactttctagcattgctcacattcatttagatgttaatgaatctagacatatatgtgtttagatttattaacatctatatgtatataggcaatgctagaaagttttacattgtgaagcggagagggtacatgttatgtttttttctttttccgggggtacgtacgtgtgtgtgtttttttctatatagtattcgtatgtgactgggtacgtacatattttctttttgtcaaatagtgtacgtgttatggtttttttttcttctccgccggcatgagaagtgaaagaaaagcgtacacacacaaaggggaaacggaggtcagatggatacgtggatagtacgtacgctacggagggatcatacttgcgttggacggatggatcgagattttgatttccttttaagataaatctaacgatcaaaattaatgggtccatcaatttaaaggaaaatcgacggtcagatttctctattttaatagagtgacatgtggcgactcgagagcgtttataggatgccacatgtcgatttaggagcgtttgtagaaagtttaatggacttaaatctaacgatcaaaattaatgggtccatcaatttaaaggaaaatcgacggtcagatttctctattttaatagagtgacatgtggcgactcgagagcgtttataggatgccacatgtcgatttaggagcgtttgtagaaagtttaatggacttttagtatataatagaagatagatagataatagatagatagatagatagatagatagatagatagatagatagaagatagatagatatgaatgtgggaaatgatagaatgccttatattgtgaaacggagggagtaatacgtttaactgcagttctcaacatctctcgatcgacgagcaagctgtggctgctgctgcaattcggcctgcaattcaagtgcagcaatatgttgtgtgcaatttgtgcattagtgcacaagttgagaatggtaatattatttcactcggaagagatggaacagttgtgaaatgcagaaccactcggttcagagaatagtcctggacaaaaggacagaaaatggtccaatggtgacaattgatcatttttacagtgaatggtgagcaactgatcagcatcgaccatggtgaagctgaacctgataagtcgacagcactaggggtgatgatcctagccacccataaatcctttcttgtatatttcctaacatatataagtcagcaagtcaaatgttcttatcgttttctttagtcgatggttcatcgattctgacatcaagacaagaagccaacatactgctagccatgttcctttcctcttggctcacatacggccatttgaatggattagattcagaaataatacaatatctcgtctttctttcttaattacttacatgagttggccggtgcgcaactctgccgccggctaccgcctgctgcgcagagatgcaagtgggtagtcccgctacccgtataaaaacccgcttgctagtatatttttcgtatggtagtacgaaatttagaagaaaaaatgaactagaagtaggataagcgggacaaaaaaaaaagcccgcttgcccggcccgcttgcatccctatgctgcgcgccaggttgagctcctcggccgcgagcgtgccccgggtccactacgctgcagctctccctccgctcgcgccttccttcgtgcccgatagatgcgaccgcgccctctggactccctcacccacctccgtgccccacgccggtcaggcggccaacacgcgcctcctccgccattgtcgacgtttgatgtcgcgattccggtatttgcatagtatggggatcgttggtactaggatatacgcgagactgaggtaaaagagatggggacgaggatttttatataggttcgggcccctgaattgtcaggtaacaaccctacatcctgttggccgaagccggtattactcttattcaccataatcacaccagtataatatgtggggtagcctatctaattgttgtcgacatggcggtctgaaggtctgactcgtagtcgacaacagggtaatcttcctcctcgaatccgtgcccggcgagatcagagatagcgctttcgtctctcccgacagtatccggagacaccgtaggggactagccatgcttatccctgaagttgatatccaacgtcttgtcttggcgtatgttggcttgtatgttgtggcttctgttgttccgtgtcccctctcctcctagggggccttgtatttatacccataggtgtctccttgtcctagtagaactagggaaaccaatatggatatagtccgagtaatccttgtcgtttccatgtagaactctggttgtctttccttatccagaactccctccatatctgaagtcagtttccgtattagacatggtatgtggtgggtcctgccgagatgtagtcgactactattaggtatgtggtatccataaccctgatagtagcccctgacttcaatgcaaatgaacgaattcatattctcgaccactgaccatggagtaactgttatcgagctcaagtgaccattctcggtgagttcagagataacgttagacttcctttatcagcctcgtgcgggcacctaaagggtttgtctcagtccatctccaacgtcaaccaagaaagtacagaacattcgactaagtctcccgtcttgctgtaatcgagaatttggattgaagtcaagaaattttatctcggcgggtacaccatctcttcaatccgtattccttgccgagatccaccaactgttctcgagcgatcgagaaggcgtagaatctgcgacggagccttgtcaacatttgtcgtactcgccttagtcgatcttggtgtagaaccatagagacatggagtcttccacaacgtcgaatagaattttcctgaaatcaatactcagaaaagaatatcaaatagaaatagcccccgggcgaacgctcaaagggtgacatgttatagtatgtatggaaaactgaaaatgagttaaatttacagaccaatgttttgtatatgagcgccttctctcttaccgacttcgatcagtcagtttgttgagtcatacactctccctagcccccagccttgtcgtcggagaatcgttctcggaggagaaggctcttggacccttgacctgccttggttgaacaagcactaattctagcccccagtcgtgaagttggaaaatccaatttccgattacacggcttggttaatacgcacggcgagaactcttacacgaccagatcttacgtggtcttttgtctctacaggatccgacaaggccttatcggctctaggcgcccccagccaaagttcccttaggttcctcggaggccttgtcaagacggcgtaaagggacatgaggataggtttcaatgctaggtgtcgtcatggtaagggatctctaggtaaaacacttagcaatattgtgtatctgatatcaactttgttcgagtagaggtaatgggagaatcgctacaccgttggtcaaaaaccagttgtagccccaactcgaccacttgaaacaaaggtagtgggagaatcgctacaccgctggtcgaggaccaggtagtagtcgtaactcgaccacttaaaagtggaaatagtgggagaatcgctacacctctggtcgataaccaggtagtagtcttaactcgaccactagaagtaaatgtacgagagatcgctacgattaactggttgagaaccagtgagtaggtgtctctcgaccatttggagttggtacgagggccgttatgctaccggtcgaagactagtcgtagctgtccctcaactatccgaagtcatctgaagtcgtggtgcgaggaccgttacgctattaccatagttgtacctcgaccatcaggatttaaggcacgagagatcgctacgtcctactggtttgagaaccatgagtagaattatctctcgagcaccaatggaagctgcggtgcgagagattgctacggtttacaggttcgagaaccagcgagcgagtagaattatctctcgaacaccaatggaagtttgcggtgcgagagattgctacgtacttgttcgagaaccagcgagcgagtagaattacctctcgagcaccaatggaggcgctagagttggtttattacatgtgcatctcatgtggccagcatgactcacatacccaacttatagcatatccggatgtccgttcgcaatcatgtcgggtgatcaagccgacgacgttcgcgaggaattatccgttaacaaccttttctcgagtagctcagccatggctggtgtcgcgaccgagaaaattaccttttcccgaacgctagtgtattaatccccgtcccaggaaaagccggggtacaccacacaaacatgaaacaaaaggcacatctttattatatcgataatatttacattattacaaaggcacttcaggcatgacaaacaaaaataaacagcagcggactagcgggcctacggctccatcttcacaggcgctcaactggggtataagccaggactccacctaagacttcttctccaaagcttctgttactgaagggggaaagattgagcaagaatgagtacaaccacagtactcagcaagtcacaccggaaatgcataattaatgcaagggggtacaaggggataataatataggggttaagttttgcagtaaacagcatttaaaagtcatttagttgcccaaagccattttataaagacgatcctagagctacacagtattattaatcaaggccgtgaacccacacgaacctgccttaacccaaggcctacgatgattcagaccgaactggcaacccgaccctgggtcccagctcgtcccaagccaacccaggccaatcattccacattttagttattaagcaggttttaagaatttaaaacactaacttgggtacattgctaggcttgcccataaccgagggcgcggctattcgaataggttttactctgatcagaggtgtacatctttacccacaagacacgtcttcctcacgtgcaaccacgtgccacataccaccacggcatatggacggaagacatgacatagtttccaacccatcctagccatagacaagagtaccgacccaacccacctacggccggaacccccggacaggcaggcagaattgagcccctagcagcaggacaccagccctgtgccatgacatctcgactaccgggccgcagcccgtgtagccttcatttgtcctagagatgtccatcgacccccgactttgtccatctccatccgtgtacttttgtttataaccagactgagccacaaactaagccttacccacttgacatgtggaagtacggtagtgctttgcaacagaggcccgaagaccgaggtgctgctaacaaaaccatgcaccccgagcccagcctaaaaccattttgagggttttgaatagagggagaggtgtgcatccaattccacaataatccaaccattccatagtgtccaagtgacatgaatattcccaaagtctagagttataaaaccacctaatgttgcctagttaatcagcgaagcatctacctaaattcatactagtggaaccatgaatagagtatccactagctggggttttgtttattctagggtgaacaaggtaataataacaatagcaataataatgtcataacgaaggtaaataggcatggctaaataaaacagtgataacgcgggaatttaaataaagcggtaatgcattaatttaaatcaaaataattttataaactgggattcaatatgctcaagaataatgtgacttgccttgctcaaagagaacggccttccgaaccttcggcgacgatcgcgaaccacgcttcgggaacctccggaacgacagaagctacgcgaagcacacaagcaaagctacaagcctataaagaagcaataacaatacataaaaagaaagcacacggttctttaggttataataaacattaggagacttgaacgggtcgattcagagttcgtatgaccaagatatgatcatccgaagtttaatgctgttatatggagatttgcggattattataattaggctttgcaactataaaacatgtgaaagcgctagcctggaaaagacaggaaggctgcgctgttgacatgcggaccccacatgtcaacctaaaggaccgcggtagaccgagtacacagagacggtccacgggtcgacggaagcggaccccgtgtgtcaactgaggcgagtagccgacaaacggactccactagacaccacgcgggctgcacacgtggaaaccacgtggctaccgagcgggcacactaacacggacactacacggtcacttcccgcacacgtgaacgactaccgacaccggtacacgggtaccggggtcgacaaccgcacaacgggtacggggcgacaacgaaaggacaaggacggggcagcgagaggacggatccttaccaccacacgacgaggcgagggaacgacaacgacgaacgggcgcggcggaggcggccgggaacgacggagacgaacggcgaggggacgacttcggtggcgatccttggacaaaggcgagacgcggccggcacgaggcttgacgacgcggagccgaggacgaagacgacgatggggctgctgcacacttgacgaaacgcgggcggcgaacgcgatcggcttgacggagggacgaacgccacgacgatgaggacgacgagaggacgacgacgacgacgaccggggccggcgaggagacgacgagggcagccggcggcagctgcatggagacggggacgacggggaacgcgccgctgcgaatccgacgacggaggcggcgccgcgagacgacgagccggcgaggacgaatgatgacgacgacgacgaacaccggcggtgttcgggtggaggggaggcgaggccgagggcgaccttgccgctatgatgccggaggtggtggtggcgcagcgagccgacgagccggggaggaggaaggggcggccgaagggacgccggcgacgacgaggatggagaggccggcgcaatgcttgacgacgcggtctccggacgaatcagagggcaggccggggtggaggtcgacgcggcgacgccgagggaggagacggcgcggccggcccacacctgagcggcgcggcaggggcggctggaggcagtacagtggcggcaacgccactggacgacggcgggaacgcgcctccggcagtcccgcgcgaaacggagggcaggctgtcgtaggctctccagaccttccattatatttgagagatgaagtgaataattcaagtcatcaaacaagcataatgaaacatccgacacctcgagagaggaatattggagacattgctgggcccttagcctgccagtcaacttcagcctgagatgtgcccgtcaaaccactcgaaggcggcgaccagatgtgttacacattcaggagacttgacaaaaatggctaaagatctacaacctctcaaatattcctaactcatactcatgtgaatctagttcccaggatgtgcactagattcacactttcatcttaagcatggttacacatagcaaacacaactaagatgaaagaaacttaagacttacaacaacttaataattacataggccgaccgcccaaatagacttattagagaacagcggaagcttgactacccaaacacaagcacaccgactaagggtataccccattaagttctcatcctagaagaagcaatcggaacccgcatcactcaaagactaagactaaacctgcaaacaaaaggttatatcaaacagcaagagtcagtacattaaacaagttaatgtactggcaagcacaagtcaatcctaccatactacatgtaaagcatatattcaaaggaagacaatatgtagctcaatttcagcataaagcaagttttgtttcgcaattcttttgtaaagaagttgatgcttcaattaacaaaacaagttttaagttttaacattaagtttatcataattccatcataatcaatctcttgttgtcatccttgaacaacaagtcataatatatcatcacactcacacaactcaacacgttttatcaatttcaaatcaagtcacatgttcacattttaaatcataaagcctatactcatgacacatcaccaaagcgctcatgaccgtgagcacggctaatcgattagtttaaagaactctgcagagtttgtacagctttacccacatgatatgaactctctagtttgttttgagtttgcaagactccaccacactcttcatgttgaatgtgatctagaggtcataacgaagcctttacactacttagaatctagccttacaccagcacgatacgtgttcctccatcctaggcatacttggaaatatgtctagaaccgttaagtggcgggcccacgccttaaacttaacgccgtggtggcggacacaacgggaacccacccacgtggcacaataccgttgtattggacagacttagtcacctaaactaccacgtcggggcaaataggaagttcctctgaatcatcgactaattcctcataattatcgactaactcatacacaccggcctaccagaatgcaaggctagtcctaaatagattaatcagcttaggccatcccatactagcacatgtggatgtacgaataactttaaatgggtgacacaagttcggtccttatggacttgggcaaacactccccctatcggtatgcaactaacactatatgcacaccacttgctgcccaagtataaaatcacattttacacattttagttcgcaaatacccatcatattcattttattccagcaaaggttcaagtatcaaaatcacattttaattatagatggaatgaacatttgcatatttctaagcatggctaagcaagtaattgcacatagagcatatataaacccatttgagcacaaagagtgtactctaaccatttctaggggttcaaacagcaagaggatcaattattcaaggtggaatatgcagcaaataggtcataactaccttaacccaatttcaaataccgatatagtctaagttcacatgcaactttgcaaacaaatattttcattcctcaaatcatgggattcaatgtgttcaaaggatgggaggagaaaacttgccttgatcagagaattgttagcacctaatccactccttcaccgattatgcaattatctagataaaggacacgatatccaattaaacaccgaaagagctgaaaatccaaaatgctctaaaatgcatgatttatgcacagtgggttggtactgatctaaaatgaatttaggtgaaataattcctattttattttattccatttgggagttatgaattttagaagttttatcggtttatagtagtatagtcttaggtagtgttatgaaatactttggtaaagtgatttttactagattagacttcataggagtgtgaagttgtgttttctaagactaacacatttggtttcacaatttttggagttataatgatttctttatgcattttacaagttataacgtgttattggtgtatagtgttttatatgttcatgacttttgagttataggttcagaacatgctacttcctgtataagttgaataaaaggaataatttggttatctaaaacatttttagttcacatgtttatggtctttactagtatggttcatattttataaactagagatgctctaatctaaactagcaatatattatattaacctagaaattgttatatgagctaagttcttctaagttttagtggatgaggatggaactatggcttcactggtcaatcaagtttttatttaggtttaattagacctaaagtgtatatatatacttatacatgtttatgtattaattaaacaacactatgtgtttaaattcttatttcactaagttaaggttttgatcaatgttctctacagaaggtgccaaattttattttactatgttgaagataactatttgctggttctatagaaactttgttcatttcatttggactaaaatgaattttctacaagttttacaaattaatggctgctctatgttagtaaatccttatatgaatatttagagacttttactacacagcaagtatataatattatttcataacttggaaatacttgtgttagtgatcctacataacttaagtttattcaaattgaagctaaattgggttctacatgaatttctaaagtttagcttatctaaaactagtcattttaaagataatagttttagaggcttttaatgcaaagtaagtaattacttttatttcacttaatcagagattgtatgatgatgaatgatgaatctgtagaatttgattttgtttcaaaatgagttgaaatgaattttctatgtattttataagtttgtacatgttttatgcatgacttatcttagataaatcttagagacattatttgtacagtaagtgtcaagttttatattcctggaataaagttcataacttcaagaatctacagaaactggaatcacttcaaaatgagctatatttgattttatatagattttacaactttgtgcatttttctgctaaacatataattgtttgggcattttcctaatttttcttcagattttaaaggatgggtccacatggctgtgagggaccaatatgcacaaaggcccttgatgtttctaggaatcaacccgcagtcctaggcccatatgtcagttactaacattttgcgcaaaaacctctggtttctcgggaaatagatcccgcagtcccctagttttaggtttgtatgcaaaacaatgcttgagttttagtttatttacagattattactggtcctacttgtaagtgactgttccagttgttaatacatccctgggagtctttaaatttcaaaagccatgcccttgctctggacagagcagagcagcagcacagccgtgagcttcacagcatcaccagtggcgaacaatggcgattcagcttaagctcccaaaacaaaaagtgtagagaacaaccgtgcgaacctattggtggctttctggcaagatttggtgctctatagcggctgttagggtgttagaggcggtggctaagctcggcttgcacatgcatgtgggttttgaggctcgatttaatcgtgcatgcgtatgataaggactctagggactactaggaggctcaccaagaatcaaacgcggctcggcgaagtcttggcgacggtgtactggttcggcgacggcgcaactgctacggtcgtcgtcgacggtgtactcccgggcttctactgcatatagagggtgcatgcttcggtttagatcagcacaaggtagctctaggcgaaaaagattgcgccgaagctcaccagagaaggagaaagaaaggaatggcggcggcggccagagcacgacggtgttccgagttgacgcggtcgcgttcccggagattggctgcactaaaagaggcgttcttggtggcgttagagacggcattgagagggaattacagaacgcttattgaacggaaatggagctcaccggatttcgacggcgtcgaggacttatctcaccggcgccggagttggcacccccgttcccggcgaatctgaggcggggtacctcggttcttccgcgaaacgagacaggggcgagagagagtgagagttggtcggccggtcgggttaagtacggtcgccggcggagatggggaggaggagctcgccctcttccgcgctcaacgcgtgctcacacgcgtggcgcgcggggtctgagtcgtgggcccgtgtggagagggatgtgaggctgacaatggggtcccactaggcaagagagaggtgtagaaggaggaagtgttggacagggctgaacctagcctaaggcactgacaagtggggccaactcgatggaaactaggccagggagagagatatgggtagaagactggtaaacttgatttttagattaattttcggaattattttctcctctaactttgtaactacataattcaatgtgtggaccaaattaattagtgttgattttactggaggtaaatgattacacctagattccattttctttggttgcactcaaaaataatgggtggactgctcacagaaattaaacaaagatgggctattagaaagctagattgaatttttaggaggcttaaacagaggaggaaaaatctagaaaaattacatttattcatgataactaatctagtatttgaataaattatttcccatgttcacttatgtgcagttaaatgtacttttggatgaaatatggttttagccgattaaatttaatttgttttcttttagttgtctgcttcaaccgattaatttgagatatcaacatgagtgttaacatgttaccaaattacagaggacaagtttgtgctaatcactgtccacataaatttttccatgattttatcttgcacaaaatattttagagaattaagatgacctttgtttgtatatgtgttcccacttcataattgcatctaatattattatagggattacattaaacttcttttagactgagaagatgatatttgagtttaatattaagtccatatgttatcacccaagattaactataggtttgtttagtgaaataattcttttagattatgctcatgggatctattatggaatgcaagaccaaaactccaaatgcacaaagaactcgagcctaggcatgcattatgtacatgtatgcttgatgacatttctagtctaatgttgggaatgaaaaggttttattttgttctcaaattttaatcatgcaatggtttaagttgatcatcacctaaattaaaacggaaatttttggctctcgaaatttggagaagttaacctctaactattttgacaagaaatcttaagtcctaaaatttcgggtatgttacacaggccgggggagaggaggcggctgcaacaccggggaaggcgacggcacggccggccggcgcacggtcgaggagggagaggcggtggaggcgcccggcgcggaggaaagagaagggcgacggcggggaggtggctagggaccacgggagaatgcgggagggggctaaaactggagaacggatcgagggggttccattttataggagaggagagggagccgggcacgggagagggcggaacggcgacgggaaacacggccggcggccatggaaagcggccggggaagacgcgggcgttcccggcgattgggggcacgattcaagggggaaattggggggaattgaagaggattcaatggggattaaaacccccgaatcaattttggaattagccaaatgaatcaagcggatttgagggaggaacggcgctagggttcacggg

SEQ ID NO: 24104 - DNA, 21641 bp, Oryza sativa
  unsure (1)..(21641): unsure at all n locations
cccgcgggccggggggagagagggaggactttgggccagacttggcccaaaggaggaaggaggattatttttaggtttttctttttaataaactttgataattgtttttgttgcttaataattattttcggtgctctgaaaattcaagtaaaatttgagggctccttttagaccaaagagaatttaacaaaaattctccgggccacatttgaatttttcttgtacgtattttagtgtttgccaatttcttttcgaattttaaataaattctattattccttttagagaatgatttttaattcgggatgaatttatcaggacgtgacagctggtgctatgagataggtcatcggtcttcgttggtaggttgggcgcgacgattctgcatttgtcgagatcgttctcaataatggggtgtactcgaccacaacctactcgagtgctcaattgttcctgaaaaatattttctagaaggcaagaaatatagcagagaatatcgagtatgtactcaaaaaactgcataaatcttctagtattatcaggatataacgagcagatgtaaatatcaggcattacgtgaaccgtaaacaagcttgatttgtacaaaataaaatagagcgagcccccggcattaaaccgtagtcggtttaacatcagggacactcgcacaacagatattgtacaaaaagcatgctctaggtaaacataattgatctgacaatatctgaaaataggtacggtaaattgtatataaaatattgcgtacctttgtagatatatgccggatatatctacggaataagtagatcaattaaattaattattccactaattaccttaattttccttggccggtcaatgcacagaccgtagctctgtacataccaatatgcatccgtatgcataggcatgtatgtgtacagcgtacaggggtgctggtcacggtagagtgcatccgatgcatgcgaggtgaagtcgggatctcgtcggaagacatactccggtcgggttagatcttcccacagccgaagttatcgagcagcttgttgttggagaatccatctcttaaacccatctcgtcgaaatcctgaagcaccaaaatccccctacctggcgcgcctctgtcaacgtttgatgtcgcgattccggtatttgcatagtatggggatcgttgatactaggatatacgcgagactgaggtaaaagagatggggacgaggatttttatacaggttcgggcctctgaattgtcaggtaataaccctacatcctgttggccgaagccggtattactcttattcaccataatcacaccagtacaatatgtgggatagcctatctaattgttgtcgacatggcggtctgaaggtctgactcgtagtcggcaacagggtagtcttcttcctcgaatccgtgcccggcaagatcagagatagcgctttcgtctctcctgacagtatccggagacaccgtatggggttagccgtgcttatccttgaagtcgatatccgacgtcttgtcttggcgtatgttggcttgtatgttgtggcttctgttgttccgtgttgtccgtgtcccctctcctcctagggggccttgtatttatatccataggtgtccccttgtccaaatagaactagggaaaccaatatggatatagtccgagtggtacttgtcgtttccatgtagaactctggttgtctttccttatccaaaactccctccatatctgaagtcagtttccgtataagacatggtatgtggtgggtcctgccgagatatagtcgactactattaggtatgtggtatccataaccctgacagtcgcccatgtaaccctagccgcgcgtgcgtgtgtgctgtggggaagcggcacgcgggcgtgtattggtaaataacagtggcagataagtcttccctctctaaatttatttttttattttcttctaaatctattcctcacagtgtgaatacaatagggctagacggccacttcgattttgaaaaagagggtcaaatgaacaaagttaaaaatatagggtcaaatttatagttagactttaaaatagagtgaaaaaaagcaattgtctctttgtcgttttccatatatatggtcgcaaacatttcagggctagcccagccttggctggccaatcaaagtttctacaattctctctcagttctatcttggtatatcagatcctcatcatcaagagatatttttcttaaccagcagaaaaaaattcgtccccatcttcgaatttggacgaaatacattgaaatgcttttaaatttagcattaataatatcttcaaatctgtccaaaaaacaacatcggtagtgtgcacttagaatcagtggagaatggacaagaggctagaaaacaacccaatggttagcattgatcataatgaagtgtcaagtatatatatggaagttagagttatatcagatataattgatttctatcatagtcttactagtcttacttatttttaatcttttcttatttctacctaagcatatattctacatatacaattgccctgaggcccaatacaacaaatccaatattcacaatatatgtcctcccattctattcaacacgaacctgagcctcatatgtcgacatgatagggttgatgaacatatatactacttcctccgttttataatgtaagaatgttataatgtcgacattatagcattccccatattcatattgatgttaatgaatctaaatagatatatatgtctagattcgttaacatcaatatgaatgtgaaaaatgctaaaatgacttacattgtgaaacggaaggagtattagacatgctttttaccctctctagtggtcgccaccctccccagccttttccttttttctttctcacttttgtaatctcttagccttcacggctattatacagtattttcctctcctttaatacaaacacaccatgctggggtttaaaaaaagacagtgatagagtattttgttgaacttagtcacccataattccagctacatttatcatcatagaaggaactttcatgcatatgctgccataagtcaataagtcaacgtttttatcgttttgtacaatggttcatcgatgctgacacctgacatcgataccggccggcaacaacaaactgattgcaactagaagggaaaatattagaaacaagaagctttagctttgttcacctacctactataccatcacgagctttaataccgggtagcaaaccttcccatatttatatatgcgatttcattcatataatatatactccctccgtattttaatgtatgacgccgttgactttttgacaaacgtttgacctttcgtcttattcaaaaaatttatgtaattataatttattttattgtgacttgatttatcatcaaatgttctctaagcatgacatacgtatttttatatttgcataaaattttttaataagacgagtggtcaaacgttggttaaaaagtcgacggcgttatatattaaaatatggagagagtataagccaatggatgcatggctttgtcatgtggatgagatttagctctccctcatctcacctcaggcccgtcaactcgtctcaggctactaaatagtagtgtagtaccttacacgaacttcacaaatctcacagccatctcctgtcctctttgtgcaaccgcatgagagcccagcaaatctcgtacagtatatggaatcaccaggagtgcgctgatcatcgtcttcctcacgatgggggatgccatggttagctgcacaaaaggcatctctccagtgaggtgagcctccctcacgacatacgtccacttgaacattttttttgttcttgtttaaaattatgtgtagcgattatacttgtgttcttgtatagcaattctacaaaactaaaggtactatttgattcaacaaaacctgcgaacagtatccaaaggggggcaaaattgaaggggaaaataaggggttgtatgcacgatgagtttttcttctttttgcacaatttacaattgtacgatgctttggtatagtaggagagcctagccgttcaaaagcatcttgcataaacagaaacttttaaacaaactacccttgctaaggctcatcagtacgctgatcaaatgtactcggtaagggatgcatggatattttcaagtggagctaatcatcatcttcacggttgctttgagaaccatatgactaagccttatcatcaagtatacagacaatcgacatgccttttaagaacttttttttgggtcatgcctgataacttctaccttacgtactacattatttgtgtaaggcacaatcacatggagttggtggcattatgctctcatgagaacattaaatttcatcaacttacatagtacggactatttacttccaagttgtgctccttgcatccttgattaatgggaacaactcagctcatggaatctcaaagtaaatggatcacattgccaactaatattagcaatatattactcctacatctcatgtcttgtcctgttcaatacacctaggcacttgacaattggtgacagttgcagttttccatgttgctaattactcccttagaggggtacatcagagtcaacacaatggaaggggaaaaactaaaaaagcatcggcgactttgtagacttgtatgcagtcttcatactttataatgtctcattgtacgttcttgatgtgatgcaagaccggtttctctctagtgtccagccatccctctgcttaatacagagttcatctctcttaacattgaaaaaaaatagagttcttctctcttcctagctcttctcttgatttgtccatgttgaccatgtcgccgaagatccatgatcaacgtggccatttctgttcttattgaagtttttttactgaagagatcttgttgttgggagttgggacttgggagggaccaatttttctgaacatatagcactctccttcagtccttctgcagcactctgaccaatggcatgataatttgtatccatatttccggttatttctcttattctctggttcatatggcgtaaccttaatttcttcttttccattgatgtgttttacttctaaccattggttgcaccagctttctattaatgaacttgcaattcacctgttcttttatttttcttctctttgcaggtgatctcaggttttatcttggtggtttcctgctgaaccttctgctatcgatccatcgaaaaatctagtgagttgatagttgcaggaaactgatgctatcaatccgttgaaaaatcaaatgggtcgatagttgcaggaaactgattttgcaagactatagctaattcttaccgtcggcataggattaatgccggaaataggtctgtaatgaaaggtaatgcttcttcacatcttggaatgttgaatgattttagtaaagtgaaagattctttctctagctactgttttgtgtgatcccgactgtgctttctgagcaattttatggtccttgaggaggtaccatgaagtaccattttttctattataaattttggtacctcatagtacctttacactaaaattttggtaccttatggtacctgctcggttgtggtanaattgctcgtgctttctgggtagcagcaactacagttgaactattaacatatttttcactttttgcacttcaattaagcagtgtctcaagttatctaaacatattatactttttctacaatcaaaatttggtgaaattgtggtgattggattattatcgttaggtagatacaatcatagtttgaattccataatctttttctcatgttttctaaacaaacaaacaaacaaacaaacggtttaatttgctgtcctaatatatatgagagtttttacgctccaggtactggtactgctaggtaccaaataaaatccaaccattgaatcaaaaggggcatgatgggaaaaaagaatcgatttgccgagcgcccctgcttctgaactgcttgttgactcgccatcgtcctcgattcttcgctggcacgccgccgcgtgagtgttcttcgacggcatcttctctgacgccattccttgccgccagcgccacctgtgtgttcttccgcggtaccactactagtgccacgacctttattcagctggtgcccggtggctgtgttgttatttctcgatccgtcgccgccggcgattaactgctcgttgctctacgcgatgccgattagtatggacggaggaggccataaatcttgtgataatgagaggataccgtgattgaaaggagtgagaggaaaaatcagtgcggatggttccgccatggactgagtagagaaaagaaaaaggaaagaaagaaggatgagaaaaaaaaggcagatggttccgccatggactaagttgaagaaaaaaataagagaagaaaagaaggatgagaggaaaaatcaaggtagaatggtagatggttccatcatggatgagtcgagaagaaaaaaaagcaaagaaaaaaagacagatggttccacttccggcatggacgagtaagtgccgtgccgtgcggcgaggatgccggtgacgggtcgaattcctgttgtcgagtcgaggtggggagatgaggctgtttgttcctcctcgctgcaatggatgggagaagaaaaggggaaggagcagtggagcacggtccggcgagcgcattgaatcaggattctagcgagaggtgcacagctttgaggctaaacacgaaattatggttttacccttcggatggttagtaccgggaggggtgagcgcttgtaccgctaggtactggatgcttgacagccgtccgatcatcctggatcgatggaccaaatttggtaccgcttccccgctggacggtaaaaagtctcggtccaacaaaaagtacctcgaggtatagtaccggtacctcacggtaccaaatcgttttcgatcgttggatttaacaatactcatcctgctcagctagatccaatgatcataaacgttttggtccgtgaggtaccggtacctcgaggtactttttgttagatcggagtaaatctcgtagaaaggaggaagtgagagaaatagagatggacgacttgctgtgataccggtattttcttgctgctgctttaatttgttgtatgcaaatttggtgattcatgtggattcgccaatttagtcacaaacatgtgattcacggcacaaggaaaaataccgttagtagaggtaccagtgaccaagtttggtttagggtttcgggttcagccattctagctctacatctatataatgtgcatacacttcacctttcttttctttcctccctttgttgcagttgtagaagcgtggtctatggtttcctcttgctgctggactcataatcttctgctgtatatatattctgtactttggctcattcaatcaattgtgtttggtcttcactaatctcactcaattgagatttgaagtggatgtgttggtcatgcaaactggttacgagatgatggctagcaactatttttcgagatgaagagggaattttgttaataattcagaataagagtacattcttcaggaactatttgctctatagaataaaaaaggaaatcaacatatcaatatcaacggcagaacgttttaaacattatgccaattgtgcaacctcatgagcaatgaattatgttttcctcatcatgatccggcaggacaattaaaccaggtaattgttcatcaaagtcgatgaggcaaactaagtaactttgcaatgtttgagcaatcaaacactaatattataggttgcttgatccaatcaacaggaagagctgaattattggttgccttgtctacacgttggccattcaacctgtatatgaggcctgcaaaattattattactatactttttttttctgctgaatgaaaacagtcagtaaggtaaattttgcttgcacacttcaaatatcgtattcttttctcttcatgatcttttgagacttcctttcaaacacatgagttttacaatattttcaaagaaattagttctattaccacagttcatgtgttccaaaaggaggctttacgggatgaaactagtagggaggtgtttctacatgacgttaattaccacaatgcgaagtcctgtcacgacttgtagaaatgttttttatgatactcgaagattgtctagactagtcatttcacactgatccaacagttggcattttttgaatcatattacgtcctatgcaaatactcactacatttctaaatatttgacaccattgactttttagcacatgtttaaccgttcgtcttattaaaaaacttttgtgaaatatataaaactatatgtatacatattagtatatctaacaatgaatcaaatgataggaaaagaattaataattacttaaattttttgaataaaacgaatgatcaaacatatttaaaaaagtcaactgcgtcaaatatttagaaacggagggagtaggtcttaaaaggaggcattacatttcaaacttgctattgtaagcatggcgacccaaaagacaactataatttttgaaataacgttatttggcacattttgaaattttaattacaaaatacaactgtaattttcacaaaatatgccaattctgttaacatcacttggcaaattttgtgaaccttctctaatttttcactatgttaacagaattggaattattgccagcctgcctttttttacattcatctggtattttggccttggtggatctccccgtttgtgtttgcctgatggcggcggtattagatgctttgattgtctcatgcatcaagaagttgcaggatatcattacagacaatgcaatactcgtgctaggagtagaagaagagctcagtgaactggtgagaaaaacagattacatacgatgttctcttaatgacgctgagacaacgaggttggatcatgaagcagttaataattggcttggacaactaagagatgttatgtatgatgtcgatgatattattgatttggctagatttaaaggaagcatcctactagctgaccatccttcatcatcatcaagcaaaccaacacgttgcaattgcccttcgtgtcattgtaatatttggacacgtcatgaggttgctgttaagattagaagcctgaacaaaaagatagcgaacatttcaaatgatgaactacttcaagatctcagacgtagaccgcatccgagaaatggttcgatatggacaccgataaaaacctccagcatagttgaacccaaccttgtgggtgaagaggtcatacttgcttgcagagaattggtggatttggttattgaaaataaggaaaagaaagattacaagcttggtattgtagggacaggaggagttggcaagacaacacttgctcagcaaatatataatgatgaaaaaataacagggaatttcgataaacatgcatgggtttgtgtttcaacagacagcacacaaacttctctattggaagaagttcttcggatcatgaaaattcgatatgggaaagcaaaatcagttgaagagctccaaaacaagctcaaatcagccattaaagagaagagttttttccttgtgctagatgatgtatgggaatctaatgcgtggactaattcacttcaaaaaccattgcatgctgcagccaaggggatagttatagtaactacgagaaatgaaaaagtagctcaggaaattaaagtggaccatacccatcaagttcatttgatgtcagaaaatgtaggatgggatctactttggaagagcatgggcataaccgaagagaaacaagttcatcatctgcgggacatagggattgagattgttcaccaatgtggttatctcccactagcaataaagatcatcgccaaagttttaattagcaaagagaaaacaaatgatgaatggaaaaggatattgagcaacaattcgtggtccatgaataatcttcctgatgaactaagagctttatatctgagttacagtgagctatcacaccaactgaaacaatgttttctttattgtgctatatatcctgaacattcaaccattaaccgtgatgatcttactagtatgtgggtggctgaaggcttcattgatgagcagaaagaccaactactagaagatacagcagtagaatactacaatgagctgatccattggaacctccttcaactagacctttcatattttgacctaggtgggtgcaagatgcatggtctcttaaggcagcttgtttgctatttatcaagagaagaatgttttgttggagatccagaatcacaaaatggtaatacaatgagtaaaatgcgacgtgtttctgtggtgacagagaaggacacggtggtgttaccaagtatggataagaagcagtataaagtgaggacttacagaacttcatattccaagtcactgagagtttacaatccacttttcaagaggcttacatatctccgtgttttggatttgactggcacacttgtacagagcatcccaagtcacattggaaatttgattcatatgcgtttgattaatcttgatgggacaaacatatcttgtctcccagagtccgttggtaaccttcaaaatcttcaagtactgaacctgcaaaggtgtaaatctttgtacaggcttcctttggcaaccacgaaactatgcaatttaaggcggcttggtcttcttgatacaccaataaataaggttccaaaagggataggaagactgcaattccttaatgatttggaaggatttcctattggaagtgtaacttataataaaaaaatgcaagatggatggaatttggaagacttggctgatctttcacagttgaggcggcttgttatggtaaaactagaaagatgtactccttgcagcagtgaagattcatttctcctaacaaacaaagaacatctgaaagttctatatctagaatgcactgaaccaacaaatgaagcatgttcagatgaacatgttaaacatgttgagaatatctttgagcagctagtccctccacagaacttgaaagatctatctattctgagattccttggtcagaacttaccctcctagctttgtaatgtctatctgccttcactgaaatatttgatcctctctgattgcaaatattgcatacatcttccaccaatatggcagctacccaacttggaacgcctgaaaattgtgaaagcaactgcaattaccaagattggacccgaatttattgggcaatttccaagatccagggaagcagttgctttccccaagcttgaatggttgatcatcaatgatatgcccaactgggaggaatgggcctttattgaagaagatgagatatcacttgcagcaatgaacgaaggaggaggggatggaactgctgtggccgaagaggaggagatatcacttgcagcaatgaatgaaggaggagaggatggaaccactgtgacggaaaagggggaagcctcatttccaaggttgtgtgtgctgccctctttgaagaggttggacattgataactgccccaagctgagggctctcccacaacagcttggacacgaggccaccagtttgaaagagctctcccttgtagcagcaagctgcttgaagtcggtgaaggaccttccatccctatctggtttcctttctgtttgtagatgtgaaggcctggagagggttacagaacttcccaaagtgagaaagctgtttgtaagtgtttgtccaaatttgagctgtgttgaggagttaggcagtttggagcagctatggttggatgtgaatatggaggactcatcaccgtgggtgcatgggcttcgagagcagtaccgccacctggatgtctacacgtggcctagagagtgagatgtgaagacccaactaaaagacagtagattagtagagacacaaggtaagggcattggctctgtatttgttgatacatatttttattctatcgttatctaaaatagtggaaacatattttaatttcattccaactttgcatattttcagccaaaatcatgcatgtctaatgttattctcacctgtacactttacattcattgatgttgtacactttgcatcattcttagtaaggagatcatcatatatattagacaaaatgtcaaactttcggtagttgttatgattaatatttgtacctatattactgaccttgtcacctaaaactagtacagaaatccttaaaactttgtgttgtaattattctcaatgtccataaccagtacagaaacaagtgttatagcattttataatctattatatcctaaagtacattaaacctcctacaaacgcttctaagccatcacgtagcactcctacgaacactcctaagcctccacatgacattctaataaattaaagaaatttctaaaaattccgagaaaaacaaaaacatcttgtcatttatctttattaaatctggtgaacccatcatttacaaccattagatctagtcgtcaacccgtgcgttgtatgggttattaaaatatttaagaaattcaattgtacatgtggttgaatacatgggttaaaatgattattttgcttaaaaaaatgttggaatggcggcattcgggcatccggtctcttgtactttaccatgatttgacttggaaaacagtgagggaagtctccacggttcggatataatgatgattaatccaaaactaattaattaattcaattaaaaatactcaactacagtaccatgactatagctggccaaatgggtggcccggcccaacacgcacggccccactagtggcacgacccactaaggcacggcaactgtagcaggccgtgcacgtggcccataaaaaattgaaaattgagggaaaaataatatgaagttaaaaaatgaatgaagacaggacaaacgtgaggaaaatttaggaaatatacgaaatatattagaaaatatatggtaaaaataggataaaatatgaaaaaaaataaaaaaatatgagaaaaatatgggaaaaattagaaaattgtagggaaaataaatgggcagctgggccgtgctcgtgccgacccgtcaacaggcatgccgtgccgtgtaagcccatgggctaaggtgctggcccaagcacgacacggacaaatgggccatgccggcacagcacacagtccgcccaacatctgttcctagtgtagggctcctaattaattaaggtttgtttggtgaaacaaaaaagccacctaaatgtctttgtattggttcaaattgattaatagttttgttcgtgttctacctgttaaaagaagaagaggatattgctgatcggcatgcctatgtatagtccatgtgtgtcttttccttatgccttttgtaatgcacgtgtattgtttggtaagttcaattccagaaaatatgattgttgaaaaactgatagcacatatattttcttttccttaattaagttattaaattaccaaaatacttatgtatatatacatccatgattaatttctgtgtgcttatttattttgtaggttgttaatcttgaagaatttgggctgtgcagtcacttgtaatatgtatttttgttttacctagttattggtctttgaaatattaaaaaaattttatttttttaaaaaataaataaaacaaaaatatcaagaaagggaaaatgtcaaaaaaataaaaaatatattttctttagctcttgtaaaatatattgtcatgtttcgttagattttgcgtgtgtgtttcttttctttttatttttttttgtaggtgtgtaggtaactccgcctatgtcatcgtaggtataactaaatgacatagccggtccccagcccggaaaaaggaggaggggatagtttggtatagatgtgtgttgaaatgatgctccgttgctagatcattgggaattttctgcacttttattagattaatttcattttcagtgatggaataattgtggaaacatttctggagactcatccacccttattgctctgttggacaaatctgattctgaactatttaagctagcttgaccagaccaccaggtctaagagctgcgaattgacaagtaggtgaaggaaattcagtgccgaccatgacctgatgaggagcaaaaatttttttcaagtcttggagcccaaatgtgcctgaagtcctgaacaacaagatacaattttgctgcaggatcaaacaattttgctcctctcatttgtttcttgtctttacctagttgctggtctttggaagattacaaaaactgaaaaaaaaaagagtgaaaagaacacgaaaattacaaaaaaaaagtcaaaaaagggatacagatccaaaaatgaaaaaaaaaacgtgtttttgttttttgtcttgcacgtgtgtaggtagctcctcctatgccatcttgggtgtgcatctttaatggcattgctagttccaagcccgaaaaagagaaaattgcatatgtaccatcgcgtaaaattggcttcgtaaaaataccatcacttaaatgggcttcgctagaataacatcctgaactgagtacacttcgccactttaccattttcatcatttcttccattttaaatttattttatcatctttgcatctctttttggactgaaatacccctaagtcatcaacgctgaagcacttctggtcccaagcccggaaaaggagcagggggtaatagtgtatagacattaagtgaaacaatgcgctgctgctatctagagcagtgaaagttctcttgaaaatttctgcactcttgtcaagttaattgcatttttattgatggaatagtttactgaaaaacacttctagacactcatccactctggtgctctattgggcaattctgtttctaaactattttagcttgacctcattgcaaaccagttttcatgtgaaagcaatggaggcgaacacattcaccagttcgtcctcctctcattccctgcatcctgtttgagaattgagaattgtgaacactgcggtgtggaggctgcggttcgtcagaagtttaaattcctagatccagtttcagatacttagcagcatttcacctgatggcatttgatcgtaatgttcagagaatgttatctcctaatgctttggagttcactccccaaattttcaacactgtcatggactctgaaattagaatccagctgtgttgcgttcattactgtaagagctctttttttttttaaacctaagccagcattgctggttttatattaagagagggagaaactgtacagacaagagacatcgggcccgaaacccatacagctgcatggttaattatggggaaccgacatcacagaggaaaacatgggacctaactacactactaacaacaacggcggagcccaaacgcaagacatcattgccaagctaaacacaaaagtggcacaacagctccgacatcatagaagaggtgttatcgttgccgagctagccggccaagcaacccagcagcgccgacttcaccactgcagcgacattgaagccacggaagttgccaaagcgaaagcagctccgacatccacaatggacatcagccaagccatgaaagagccacttccttcacatggccagcaccaactctttggaagagaccgcaacacgtcatcgttgtcaagcgtcgccgcaccccagcagcgagcagctccgacttcctccgtagaaacaaccgaagagtgtgtcgcccaccacaagagcgaagcgaacccaagaggcttaggcctcgccaagcaccaaggaaagaaagcttttgaaccgaagagaccctcaatagtcatcgatgtaaaggaacttccccgaagcgacgcccccaaggaggacacgacgcgtaacgccgccgccgctcgtccgaagccggagcaaggttttcacttggagatttgtggggcaaatgggagagcacattgacaacgccttcaagaagggaaatggcgccaatgggtgcgtcgtcgtcatcgagccggccaaaggtacagcaaggctttcgccagcgtctgcacattacccacacaagcacccccacatcgacgaccaaacgatagtccaagatgactcacaagcattccaccctcgacgcatcctaccatcgcccacactcctctgctgcaccgaccagaaccggccaaggcggccaaggtactggtcgtcgaagctccccgctgccatcgcctccacgagcacccactccccgctatgccgctgccaccgtcgccacaagcgcccgcagccccgctgcacctcgtcaagacgccagtgggcgtagctggaggttgccactgcgccgacaagggcctcgcatccgcctcctcgcagcaccagacccccgccgtcgccggcctcccactgccgctctggcgagggcacactggtccccaccttggcagcacgccatcatccagccaggagggtggtggatctggccaagggccaccggatccgaccgcccccatcgccgggccgagggccaccgccgcctcgcggctgcctcgccgtcgtctcgcggctgcctcgccgtcgtctcgcggccaccccaccgccgtctcgcgtggccccccatcaccggccgagggcctcgccagccggggcccgcgtcctccctcgtgccgctcgatgcccctctccacctccgtcgcgacgctagcccgctggccgaaaccgtgggtgagggggccagatccggccacggaggcgccggatccgccgccccaaaccgatcggccgtctcaccttcggctgcgccgtcgtcggccttctccgtcctcctcacgcagaggacggttccaccgagctgtacgtttgggccttgccgccgccttcccggctcaccactggctttgccgccggcgagcttcggcggcggcgaggtggaggagggggatgagggtgtggcggcacgggtggctagggtttcgcccccgagccgcccgcgtgagagcgacgcgggggacgcgtcctcctttcatcttcctgtaagagctcttcagtcattcagtttagtgcacagactttttagggcccctttgaatcgcaggattgagaaaacataggaataggaaaaacgtaagattttgataggaatgtaagtgtaaaacagaagattgcaaaacgcaggaaaaacacaggaatgaccgtttgattgaatcgcaggaaaaacacaggaattagatgagagagatagactcgtaggaaagttaccaagaggttgaagctcttgctaaatttcctccaaaatctctttaggattgtccataggaatttcaaaggattgtatatgattcaatcctttgtttcgaagggcttcataggaaattttcctataggattgaaatcctccaaaattcctatgtttttcctccaattcaaagaggcgcttagtgtcatcgcaacaagttcatctaacaggtacaaaattgtcttcccctggatgacaaaatgcagcagaaagcaaagcaaaactgaattgcattcagcgacgggaaaagaaagggaggagtgagaggtgtcgcttacattctctggtctccggcacgaacgccgaggtgggggctcgctcgacggccgcgcgcgctaggagctcgaggatgacctcattggctcgtcggatcgcccgctcgcagcaacgcccggttcccttctccccatcgcctctcgctgaagctcctgccgtcgccgggtcgccgtcgctcgcaacgacaacaatacgagataactcgagggcctatacgaaaataaacccccagttcacacttcacaggcgtgtttaaatctcagccgcctatatcagatcgaacggtgcagagaggctgaggttttggatcgctcgaacgaagagattttttttttgacgcaaaaggtagagactaccttataaccattgcattaatggtggtcaaatcagataaaatctggtaaagccgaacaagagaacagaggggggagaagaaggaaaaaacagaaagaaaagacatgagaaaaaacagaggtacaagggagaaaaacaggaagaaagaaaaaaaaatacaagagatacatagatacaaaaggggagacaagatggttaagcgaatttgaccacccaagcagtaatgtgtgctcgaaggcaaggcttgaggcaacgaagagattttggtcgatagtagttgagttcatgttcctttgttggtctgtagcgctcagtgattcacatcatctcaagacatgaatcaacctattttttttagataatggataaaatccggcctctatatccaaaggaatcaacctatttctgtttgggagaatgttagaacaatgcttcccgttgaagtcgcaatccaactagaaatgctttttatatgcagcttgtagatagatgtgcagacaagattcagttcagcacttcagccaaactgtattcagacaagattctattatcaaaagacacaacagtagtccccacatgtgacatgtggaccaaaaggagtgaagtagtatattgtaggagtatttcaaaaactcccctgtagcctccccacttgggtctaattttattttacaggaaccgtaagcaaaccctaggattttgcttatacaaggtttacctaactataccattgatgatagagacacttacattcttgccctttcctaacccgccctgctccttcacactgcggaggcaaactttttttgaatgactcgcacgagattacaagattacaaccctggagggtcgtaaccaggaaaaagaaaaaaaaccccacccacacaccgacatcgccaacacacaagcccaggagaaggctagcaccggaccggccgccgctaagtatgaccgaccgccactaggccgacaaagggacactgacgagatcgccccataggggtgccaaaacgatgtcttcaagaagagaagtgacggaaaagccgctgccgccgtccgtcgggactcgaaggagccaagactaggctttcgcccggcaattacccttgggggatgaaacaacacgacaacaccctcaggagggagaacctcgttgttggttcgaccaaggccggactgagttttcacccgccgctcaccacctgcaaatccacggctgacgcactgatgccccaccaccatacaagctctgccgacctgtgggacccctgcactggtgtccccagtcggctagccttcgagcgccgaagatcgcgccacacccaccagcagattctcctcacacctaggtcgcctcctccaccgtcagccgcgcctctcgcgccaagccggcctcctccaccggacacgcctctcgcgccaatccggcctccctccatcggacgcgcctctcgcgccaatccggcctccctccatcggccgcgcttctcgtgccaagccggtcaccgacccctctaccaaacgatgtcgcgccggccaaatgtagccatctcccacgccctcgtcttgccgtccgaggccgccatgcctccggtgaccgtagtcatggccaccaccaccacagccactgctgttgaacgcaaagccacctcaccgtcctcatcctcacctcgcacctccacttgctgccgccagtgacccgcatccgccgacatcgccagcgcctccacaggctatcgcagaagatcccgccgccgccgggtcaccgtcgatcatgacgacaacaatacgagataactcgagggcctatatgaaaataaaccctcgattcacagtcacaggcatgcttaaatctaagccacctgtataagatcgagcggtgcagagaggctgaggttttggatcgctggaacgaagagattttggttgatagcagttgagttcgtgttcctttgttggtctgtactctgtagagttcagtgattcacatcatctcaagacctgaatcaacctatactatctctgtttgggagaatgttagatcaatgcttcccgttgaagtcgcaatccatatgctttctaaatggtaaatgcaagtagcttgtagatagatgtgcagacaagattcagttcagcacttcagccaaactgtatctgttggacaaatctgattctattatcaaaagatacaacagtactccccacatatggaccaaacacagtgaagtagtttcccagtaaaatcaattgggatagacacatgcaccagttcatccccctctcagtccttgcatcctgctgtttgagagttgagaattgagacacaagttaggcaaaggaaatcattcactgtttgttagcagtacgtacaaagtttggccagatacacaaaaacgcatgaaaacaagtatacttgtaaacaattactcctgtaaactccaatatttgatgagaaatatttctgtatgtttactcgtgaaacctgtccattggattcaacgctaaaagttttgatcccaagtatgcaacaggactggaaataagccccgaattctcatagaaacctctgccgttgtctctgtcaaccagctctttcacaatgcaaatgcatgcctaagcagagaactggttggcgtcaggaaggccaagtgagattctgttctccagacacttggagatactacaaagatttgatctttctcatcttttaatcgccttcttgagagagatcatctcagttgcctgcagcttctagaaaaaaaaaacaggtacaattcagcgaggagagggaaggtcagcaagaagcagataggacacagccatgttccagaaatcagttccaactgttagccttttttttttcctgtaaaagaaacaactgcgttaccactgtcatataggccagaacacaacatcagttagatcttactacggagctagtgcccttgtttggttgattcaggttcattcttgagctaaaaagtactaacagtttaggatggcaatgtcactgcattgcttgactgaacttgcaattccctgaatcacaggaggtagctggcagtagagctactgcgcgtaccataacgtggtgcaccacaccgcccggggatttcacccaggtgctccaggacgtcgccggcgaccccaccctgccccgcaccaagtccgtccggtgcgccgcctgcggccacggcgaagctgtcttcttccaggtcaggattatcgatcacaaccaaaccaactagtttattcagagttcagagttaatacaaaagatactcaactaacgcaagttctgcatattctcaaaaaaaataattctcggtttcggttcagatgccaactgtgattaacagaatgtgtagttgcagatggagtaataattcggggtatctttgtgaacattgcagtggagaggccgcgccaggggcaacgcccggttcccttctcctcatcgccggcggcagcggcggcggcgtctcgacatctcttcctcccttgtacaacgacacgacaacacgagataatacgagggcctaaacgaaaatcggcccacggattccgaggcgcgtctaatctcagccgcctgtatatgatcgaacggtgcagagagaggctgtggttttggatcgctggaacgaagaaattttggtcgatagcagttgagttcgtgttcctctgttggtctgtagcgttcaatgatgcagagatgccgtactgccgttt

SEQ ID NO: 24105 - DNA, 716 bp, Oryza sativa
atacgtaaatggattaaatttccaatataatctggtattgtttgcacaagtgagtcacttagatccaaaacacgaagatgagttaatctcatgaaaaatgtgttatcaactccctgtagctgatgatcagttgtaaaagttctcaacttaatttcctccttaccagtgaaaggtatgaccaccgtgtctttctctccgacaactaacatgcgtcgtagtttacatatagtattgtctactaatggttttagatctccaatatgacattcttcccttgatagataacaagcaagttgccttaagagatcatgcattttgcatctgctctgatcaaaatatgtgtaaactggttgcaggagattcctaattattagttcatagtagtattcttctgctgtatcttctagtaattgatctttgtgcacttctacaaagccttcagcaacccacatcatgataagctcatcacgtttcaaggtccagtcttcaggaaatacaatacaataaagaaaacattgcttcaaatgcagtggtaaatcatcataacttagatatagtgcaccacttatttccttagggagtttagccatggaccaaacgtttttagctaaaatccttttccatttgttctctgttttatctttgcttgccaatactcgagcagtaaccttgattgcaagaggtagcccaccacatttctgaacaatctcaatccc

SEQ ID NO: 24106 - DNA, 731 bp, Oryza sativa
attatatggctggcctagaagcagttagatacaataatggtccaatcatacttctatactccttctgatcaacagcttcaccatcttcatcaggatccaacacaactatagaaccaattggtgttgaaattgccttgcaattctccatcctgaaccatctcaaaagatctttcgtgtacgataactcacccatcatgctcatctcaaattccctgcgcatagtctcagcaaactctacaaccaaagcgtgagttgaacaaccaaagatgatatcatccacataaatatgaacaaaaagcgttttgtcaacctttcccattgaaaaaccttttgcaagaaaaaagttcttacgcctatcataccatgctctaggtgcttgtttcaatccatacaaagctttagacaatttaaaaacatgctagggaaaattaggattttcaaaacctggtggttgtttgacataaacttccttctgtatgaaaccatttagaaaagcacttttcacatccatttgatacgatttaaacctttcgaagtagcaaaagccaacaaaagtctaattgcctcaatcctagcaacaggagcaaaagtttcatcataatccaaaccctccacctgagtaaaaccttgagcaacaagtatagctttatttctgacaatcaaaccatcctgattttgtttatttttgaaaacctacatggttccaataatattatgtcgggctgcaggaa

SEQ ID NO: 24107 - DNA, 1734 bp, Oryza sativa
atgccgccgttgttgggcgtctgcgtcttcaccgaccggcttgccttcgccgccgccgactggtgtttccgcctgcacggctggcctttatgccgccgttgttgggcgtctacgtcttcaccgaccggccgcctcgtccgccgccgactggtgcttccgcctgcacggctggcctattatgccgccgttgttgggcgtctacgtcttcaccgaccggcttgccttcgccgccgccgactggtgtttccgcctgcacggctggcctttatgccgccgttgttgggcgtctacgtcttcaccgaccggcttgccttcgccgccgccgactggtgtttccgcctgcacggctggcctttatgccgccgttgttgggcgtctacgtcttcaccgaccggccgcctcgtccgccgccgactggtgcttccgcctgcacggctggcctattatgccgccgttgttgggcgtctacgtcgtcaccgaccggcttccttggccgccgccgactggtgtttccgcctgcacggctggcctattatgccgccattgttgggcgtctacgtcttcaccgaccggccgccgcatccgccgctgactggtgtcaccgcctgcacggctggcctgttataacgccaactaatgctatcttcttcacggctggccacgtcgccgtcaccgctaataggcgttatcatcttcaacgcaagctgtctacatctgctgccgactagtttattcacttccatggctgcatgattccgccaatgttgattggctttatcttcttcatcgccggtcgtctcgtctactgctgactagtgccctcgtctctacatctggtttatacagcctaccactactgatgaacatcatcgtcttccgtcgccgactagtgcttttattttcacaactgcgcgtcttcactaccagtttgcttctgttgccgacgactcgtgttcacttcatcacggcaatgcaactttgtcatcatggtagagcgacttcatctttattatcttcggcactggcaaactctattgctgctacttcacaagttttgctacatcaccaaccatgacgttgttgtgaatctcgacatctcggcatgcgatgccgtgttattttactacaacaagtggctctccaacattcatgatttctacttggacatcttcaatacatatcttcaatcaagcaataactattcgacgacaagaggctacagttctcgactctatgttcagttgtttcccaactaatcaaagagtcgggggctacacaaatacaaggctcaaaatttgacaaattttatgtcaagctgaagaaatcaattcatcaacccacgagtcaactccaggagtcattatcttcatctttgcttcggagcagacattctacttcaacaacttcaaatatttcggtttagacgagttgggcaacaacatcaactctcctccaagtgaagcatctacaacagctataacattaatttgatggattattgtcactgacatcatcaccagcacctctgcttcatcgaccctgacatctccgctgttgctaatggatgattatgttttcgccgacttattatttcaccttcacggttgacctactatgcaaatgctgatgagcgtctttgtcattatcattggttgctacactgctattggctggatcaccgacatcgtcttcttcatcatgtcggttgcgtttgtcgtcgtcaactattttctt

SEQ ID NO: 24108 - DNA, 4713 bp, Oryza sativa
tactatcactttatcggatgaaaaaatgaccaaaataaaagttatagatcttgatgagttatacaactttgttgttgatgactttttgagttgaaataatttagtatatgaaaaatgttgtttgaagttgtcatatttttaaattcaaacttaaactgttaaaaaaaacgttagatagaaaaatgaccaaaataaaagttatagatcttgatgagttgtacaactttattgttaatgacatttttagttaaaatcatttagtatatgaaaatgctgtttgaagttgtcatattttcaaattcaaattcaaactattaaaaaaacgttatatagaaaaatgaccaaaataaaagttatagatcttgatgagttatacagctttattgttgacaattcttccatttaaaatcatttactacccgaaatttttttttgaatttcttgtattttaaaatacaaattttatacagttcaatcaaacccggatagagaaatgaccaaaataaaaatggtagatctcaatgagttctacaactttgcctacaactttgcttttgatagttttttcatatgggttcatttagtatcataaaattcaatttgaaattcattttttcctataagtctgatttgcatcttactcatgataatacttgcaaaatatatatttaatccaattaactcagatttgctggtgaaatatgtgatcaaaatggatgttatgtgaatgtggttgtgttatgtgaatgaatgtatatgaataggggatgctaggatgtgacatcctggcccaggccttaatatgattaatagaatactcatacaaatttttttcttggaagcagcttccaaagaaatatgaggttaagtgtgctcggcttagagtaatttcaggatgggtgaccgaccgggaatttgaggttacgcgtgctcggtttagagtagtttcgggatgggtgaccgaccgggaaattcgtcccaggtgtgcatgagtccggataggtgaccgaccgggaaggcacacgagtgagggcaaaggcctgaggccaaaaaaacaaaatttatttttttgcaaaggcctgaggctaacaaaaaatcaaaatttatttttttttggattatactcatctgtgacgggttataatctaggcccgttggagatatgagtcatccgtgacgggctataatctaggcccgttagagatgagagtcatctatgacgggctataatctaggtctgttagagatgagagtcatccatgacgtgctataatctaggcctgttagagatgagagtcatccgtgacgagcttttgtgttggcccgattgagatgcgtcatccgtgacagccggatgcccgattgagatattttctcacatcactaaccatgtccgaaagagatgatattttaagcccgttagagataaccaatctcgttccgttgaagaacaaattaattagcttctttttcccatcttcaaggaaaggagctagctagccaagaacttttgtgaagtttctgtttcgaaaaaaatgtgaataatgtaagtaataacacagacaacaaaaggatgtgataacgtaaacctgcacaaacggccaacctctgttttaccaccatgcacaaaacatggccaacgtaaacctgcaaaaatccgaaatcactaaaccaaacccatcaattctcatatccatcttaatccatcaatctttcgagaaaaaaaactaaagcaattacaatttactgagtgatagtttgggtcatcatctatatttttcttaaataagcttccaaataagcatgccttggcctcctatccaactgacgcaagtacaaaaaagaaagacacaaattaaattcctaaaattatgttattttcaatttacttatcggattattgttgtaaattttctctccactttgtaaaaatacgtttttatataaaaaaaactttcttttatgcatgcattgcttataccacttatttgaaatttatttttaagaacgaatttatcctacccttaaatgaagtaaaccctctatccaaaagtttaaggtatatttcattttttttctaaaaatctaagcatatttctgtctctatgtgttaaattaaattgttcattgtaccgatgagccatcttgatactaattggttatatgcatgtatataatttttttcatttttatcacatgatgaatgagttaatttcttcttatatttggtgataaaagaaatatgtttttgacttttagatacagggagtagataattaatttatgataataatatctggtctgtcaaacgcgtttgtgcgagtagtactagtactacacatcttacattggtcgccatctctggattaattttagtccaagactttatcaaatcgaaagccatacatgatactaagagcaagtataatagcaaactataagccagctataaatacatatcgagaagatacatgaggagagataagagcagcggactataaattttgtagccagttgcagcacggattacaagatgtaatatgtttataacaggtgagattaggttttacttgtgtagatatgtttatatgtaactattgcataaattggctattaagttgactgtagttgattttgagccaacagtgcgctatactattaaacttgctctgaggccaactttgtcaaagcacctttccaacgccgcacagatctaactcacactgttcacccataaataattccatggaaaccctcactagctctccaactacggactctacactctaaaggagaaaattgacattgtgccatcatcaaaagtgggtttcgtccaaataccactctgcaaaatggattcgataaaatgccactgtcaacacttggttacacgctaaaatactatctcggaccaaattaccctcctctcatcttcttcctccctccatcaccatcagctctcaccggcggccaccatcccgccttcgcgtgagctctcctccatggctccatggagaaccacaggccacaggcccctgcgaggacccctcccatggctcccctccccgtgccccctcccatcgccccatcccagccccgcctccgcgagaccccgcaccccggctgccgccgccatcgcctccacctccgatgaccaccacgccacgccttcgccatggtcatgctcaccaacgactccaccgtgcgggcgcgcctccgccgcctggaagaacaggagcggctgggacggtgggttggcacgaaagatggagatcgccgacatcggcggcagcggcgcggatggtgtggagcgtgaccacggggtcgtcggttgggggtggtcgaggcggggaggaaggggagcggaggtggaggaggatgagtcaggcgtggtggaggaggggaggaaggggagtggaggtggaggaggatgaggcggaaggggagcggaggtggaggcgggcgcggtggagacggcgaggaaggcgagtggaggtggaggcgggcgtggtggagacggcgaggaaggcgagcggaggtggaggcgggcgcggtggaggcggggaggaaggggagcggaggtggaggcgggcgcggtggagacggcgaggaaggcgagcggaggtggaggcgggcgcggtggaggcggggaggaaggggagcgggggtggaggcggatgaggcgggcgcggcagaggcgagccggcaaggcatcccttgttagaggtggaagaaagtagtaacaggggcatttttctccgttcgggcattatagcgtgtagtctttaattgaaagtggcattttaacgaggcccactcccagcgtggcatttgggcgaaacccacttttgaggatggcataatgtcaattttctcactctaaagagtccctttcagtacagttaggcagtagccatgagagctatacgtacgtgcaagtgcaactgcacaagaagaaatcatggaattattaactaatgcccttgttgtgattaagaccatctaatccatctgatcagcgagtgacacgcatgagatgagcgagctgcgcgcagcagctagtagtagaagatgctagcgtagtccgtgtaataacctacccgacttaaattagcagcagttactaccacctgcttcgcaacccccaccgccattaatgcggtgatctactgcttgctgctgctgctactagcgtcttctttccttgagcttcagcttaattaagcttcatctccatcggtcgccacctgacctccccaactgtgaattgaaacggagggaaatggtggagcagcagcataaaatccaacgtgattctctcggctggctgtgcctgtgtgtgcagctaagctaagcttgcttgctctctcttcttcttcgtgttgttgtttctctctctgtctcgctgtctgttgccaccattaatggctggctccgtgggtagctgagctctttgctggccgagctgagctagcctacctagctggggggagagagagagagagagagagagagcataaggatcttggaggaggtggagatggagtacggcggcgggcgggaaggaggaggagggatgaacggcaacgggacggcgtacgcgggggcgctgtcgccggcggcgaggtacgcggagtcgggcggggcgagcctgacgtgggagaatctgacggcggtgctccccggcggcggcgggcgggcgacgaagaagct

SEQ ID NO: 24109 - DNA, 10513 bp, Oryza sativa
tcatggggccctccggctccggcaagtccaccctcctcgacgccctctccggtatcctttcttccttcctttgccacctccatctctctttgcttcatgcatgctcagcagcaaaatcaaaataaatattcttttgaggagattaacaatttaacatggtttaaattcatggaacagttaatttttttgcgttgatttttgtgataggatttgtattcaaggcaaggatttttgatagatgggatattggggttgttttgagtgtggcatcccattccatttcaccccatgtactgcacgaatttcaccccatgtactgcacttcttgctggcttgctccatgcatgcccagcagtcaaaaaataaaaaaataaatcaaaacgcggtttatcaatgaattcttttttcgaggaaacatggtttgaattcatggaacagttcaaatttcgcattgatttctgtgccaggatttgtattttaaggcaaggatttctgatagattgatatggggttgattgattctgtttttgagtatggctgcagggaggctggccaggaacgtgctcctgacagggaaggtgcttctcaacggcaagaagaggcgactcgactatggcgtcttggtgagtttgctaatttagctcacaatttcaacatgcagatgctcatacaatttctaacttttttcactctgaatcttactcatcaaccgtattcatgttttttctattgctgattaatcaattcgtcagcttgattagagtgttccaagttcgacgctgcttgagtgttaaattacgcacgaatttatcactgatactacatcttaaccccactagctgcaaggacgaagaatgtggacttaacccagggaacaaatatagattcagatcttgtttggaattgaaggagtgtaggataaatcgcagatttgacgttggggtgtgtgagacttcctgatgactggcagaactatcacacgtgtagccactcggtgcgccgactcggggtattcgacggctaaggatgcatagatagatgtatggcacctagctagatacagtcatagagtacagtactgagcatggcatcccatgtgcacactctttaattttaggtgaagcattggaacaaatgcaattatgcttggtaccaaagtagtgtataccaaaccaaagcaagccattaatttagctagttagggtgcaacaaggctttttatttgatctgctggtgattgcttagttcctcccatgttcatggtttcctcttcagagttcctatgttcctttcactttgaatacaggaatgtactaattttgcttgtcttatcttcaaattagtatatattgcttaaaaatatcactgtgagtctcttgtagcagtctgtatagttgcactcagaatggagtgtgagagggacagtttggtgctgcccaactaatttttcatttatgccaattaataagaggacacatgtatagcatatcagcattacaaatgtagttatgagtctctttcatatgtttcaatatgtgcacgcatgcactgtcactgatatttcaaagccagatgggcttctaaattaatacagtatcagatacccgatccctccggccggtcataaaaatatgtcgttttcaacatcctaagtcaaacttttgaaacattaaacatttctatcttttagatatttgggttagatatgtatgaaaatcataaaatccgttgatgaaaagtactttttgtaatattgcaatattattcggttttgcaatggcagaattaattatgacagcttcgtatagttgactgctgaagcgagagaggtcgatcagaaatcacttaattgctagtgctactaactctgcatcaattcctacaatttcataacagttttaggagctatctgatttccttggaagaccctttttacatgatgactgattgattaatttcaaatctattacatactatactatactagtactataagtttttttttgcgtaatagtataagctaatttcactagcttttttactataaattgaaagattgcttgagatttttaaagccctctggaaccacagtaattttcataaaaaaatttcatagaattcatagctagtcaacaacatgattctcacatacacataaataccacagaattcctcatcattggcaaatctgagtgtgcctatcatttcaaatttaaccactatggtaaaatttgatttgctgaggtaacttaaatcaaataaccaatcaattagtgatgtagtaatagcacgggcatatgatgacaggcgtacgtgacacaagagaacgtgctgctggggacgctgacggtccgggagacggtgacctactcggcgctgctccggctgccgtcgaccatgtccaaggcggaggtccggcgggtggtcgacgacacgctcgacgagatggggctccgggagtgcgccgaccggaacatcggcaactggcacctccgggggatcagcggcggcgagaagaagcggctgagcatcgcgctggagatcctcacccgccccaggctcctcttcctcgacgagcccaccagcggcctcgatagcgcctccgccttctccgtcatcgagacgctccgccagctcgccgtcgacggcggccgcaccatcgtctcgtcggtgcaccagcccagcagcgaggtcttcgccctcttcgacgacctctgcctcctctccagcggcgagtgcgtctacttcggtgacgccaagcttgctccacaggtgtgtgataaatcttcagagaaaagtacttgtagtaataatcttcctttttgttttctccaattagcaatgaacaagtagatgatgattataaaatgagttttagatataatttatgtgatggtttctgtaattgttgctgttcctgcagttcttcgcggaaacagggttcccctgtcctagccggaggaacccgtccgatcacttcctccggtgtgtcaacgccgacttcgacgacgtcgccgccgccatgaaaggatccatgaagctgcgagcagtatgtccagctactgaagagatgtttgtaaatgtgatttttatctgatggaactgaattccgacaattttgtgtttttttcaggaggcagattttgatccgttactcaagtactccacgtcagagatcagagaacggctggtggacaagtacaggatctccgagtacgccatgatggtcaggaacacgatacacgagatcagcaaaatcgtaagcacaaacctgaatctcttaccacatccaaaattaagatcaattcaaaataaaaatgaaaaacctgatcaaacattccaaaaattccaaacgcaaaatgcaggagggagtgatcgaggaggtggtgatggggagccaggcgagctggtgcaagcagctgacgacgctgacgaggcggtccttcaccaacatgtcgcgcgacttcggctactactggctccggatcgtcatctacgtcctcatggcggtgtgcctgggcaccatctactacgacgtcggcacgagctacgcggcgatccaggcgagggcgtcgtgcggcggcttcgtgtccgggttcatgaccttcatgtccatcggcggcttcccgtccttcatcgaggagatgaagatgttcacgctggagcggcagaacggccactacggcgtggccgcctacatcatctccaacttcctctcgtcaatgccgttcctgctcgccgtgtcctgggccagcgcatccatcacctattggatggtcaagttcaggcccgggttcagctacttcgccttcttcgccctcaacctctacggcggcgtctccgtcatcgagagcctcatgatgatcatctccgccctcgtccccaacttcctcatgggcctcatcctcggtgctggcgtcattgtaagctaaaataacctgcacatttctattaattgctactctcttcgtttcaaaatataacaatctaagatccgtactagaaatctgacataactcctatctagttctagattgctatattttggaatagacggagtattactgaggaatgccttttctagcttgtatgctgaatctttccatggatgtatatatgatgtaggggatcatgatgctgacttctggattcttccggctgcttccggaacttccaaagatcttctggcgatacccggtgtcctacattgtctacggctcgtggggtttgaaagtaattgacttctgaatgacttaccatgtgcattcttacttggtgcagagaccgaagttacgacaatggtgctaatcactctacctgcattggaattgcagggagcgtacaagaacgatctgatcgggctggagttcgagccgatgatgccggggcagccgaagctgacgggggagtacatcatcaccaagatgatggggctgagcctcaaccactccaagtggctggacctctccatgatcttcgtcctcctcttcgcctaccgcctcatcttcttcctcgtcctcaaggccaaggaggccgccgcgccttacatccgcgtcgcctacacccgcttcaccatcaaacgactcgagcgccgcgcctccttcaggaagacgctcgccatgtcgtccatgtccaagcggcacaaccagccgccacaccccatggccgtccaggaggggctcaactctccaatgccatactgaagaactgttattacaagttacaactactactactgatgatgatgaagatgaagatgatgattgatcgatcgagcaagaagaggccggtagtttgggcgaccttgcgacgacgatgacaacaaagatgatgatcatatagatggtgttcgtgtgccacgaatcgattaattaatacttgtgtatgtgttgcccttggattgttttcagctcgttggaagctggaagggttcataaactgatagcgtattcttttttttaagatcttgtattttactgtaagaactcggtctctgtgaccaatacacatacaaaaaggatgctgtgtagttgagtgtttgttgtttcttgtttttttccctgattatttatctggccatgtcgatctggttagaacatgcttgtgctacattgatctggaagaaaatgcctgcagactgattactatcgatctcaaaggacaaaacgatgagaaaacaaaattttcatgagggcagaatggaggtaaaattgatacggcacgaggatcatgggtattgggaagtgcccttttcccctatatatgatggaattgaagtgatttcctgaatagtatgcatccaggtgatttctgttatcacaacagattcaacagtgtagttctgagagagaaattataaagcagagtattgaagaatcatccaatgttgcaagtgcaagaataggaaggattcatttattcattgtactattatatcacctgaacaaaagtactaacaaaatatagtggttgagtgtagcatgacaaactttttgttcaaattaatgctcaaaaagcacagcacaaaactcatgatacggttaaaaaaaatctacttaaaaaactttcacatgttttttcggtcgaaaacttccaaatgtaactacaatgtagtttacactgtaactaaaatatatgatgcacatagctgataaagggtaccctggtttgatccccgcccagcccgcgcgaggtttttgttctgcccgtatatgtagcacaaatcttggagcggatcagacagctagaaaataaagtttcccaaacaaaaaaccatcacaaattttctagtaaaacaaaaaaaatcacatgagaatcaactggatctaggaaataccactctggttttcaataaatgacgatgccattgactttttaggcaaaatttgctacgggactcttaaaaaacgtgtaattagctgtgggacaccgtaaaaacgtgaattggctatagaacaccgcaaaaaagtgataattagctactagacaccggaggtattattttattattccctataaaaacgaagagagaaagagtgttgaaagtaccaaaatacccctgtgtcgttttgcttgttctggagtcccactgatgccgctgccccatgccagcgagctgccacgccatgaccggactaagcaaggagagaaagagataagaaatagaagaagaagacaagagaaaaaaaaaaggaagagcaacctgtagccatcgcgtggccgccggcgaacagcacgccgtgccgtgccacgccaccacggcaaacggctgccgccgggcagcccacaccgagaccgcggcgctcacacgcgcgccttggcacgcactaccgtcgctcacgccgtgcctctgccctcgtcgtcgcacggtcatgccggcgccgtccgaccattcctcattgctccaccgccgcacatggcaaggaaccatgaaaaggaggaagaaatggaaaaaaaaaaggaaaaggcgctgatgggcgtcgccgcacgccgccaccgcatagtcgaatggcgccgtcgccaggcccccacaacgcgtgaacccatcgtatctaggtggtgtttggttggagggactaaagtggggctaaactttagtcccttagggacttatgtttttgtgagagcgactaaatttagtccctagtgtggagagaactccttcagcgaggagtttacgtgttaattacttaccacaaaccgggcttaacagaatacaggtatatatagctcggatagagttgttgtgcatctactaaaacataggaaacttatcttatctatctaaacagcccaacaactcttatccttcgctatttgttacattatcatatgtgagaaatatctaacactccccctcaatctgaacctgtaaggtttagattgtttctaaacatctctaactgtctgactgacagtgtcttggtgaagccatcagcaacttgatctttggtagatatatattccacttgtaaaaattttcttgcaacccgctcacgaacaaagtgataatctacctcaatatgcttggtgcgagcatgaaaaacaggattagctgtcatatactttgcaccaatattatcacaccataccttagcaattttgggtgcctgaattcccagttcatgaagtaaggtttgtatccacataatctctgcagtaacattagccaaagccttatattctgcctctgtactagatctggatacagtagcttgcttgcgtgcactccatgacacaagattaggccctataaaaacagcaaaacccccagtagaatgccgatcatccaaacatcctgcccaatctgcatcagagaaagcacttacaagaagagaattagacttgctaatttttagcccaagcttaactgtatgtttcaaatatctcaaaatcctcttagccgccgcccaatgcttagtggttggtgcatgcaaatactggcacaccttatttactgaaaatgataaatctggtctagtcagagtcaaatactgcaatgctccaaccagacttctgtacctggtactgtcttctggtccaaaaggattaccttcatgagcacttaatttttctgaaatagacaaaggagtattgactgctttacagtcactcatattcactctctttaacacatccatagcatatttctcttgtgtcaaaactatgccattatttacttctttcacttcaatgcctaggaagtaatgcagtcttcctagatccttgagtgcaaattcttgattaagattcttaagcaaagcattagtggcatcaatagatgagctggctactataatgtcatccacatataccaacataaacatagcaacatctcccttactgtaaaagaacaaagatgtatctgacttagatgatttaaaacctaactcatgcagcttagtacttaacctggaataccatgccctgggagcctgctttaaaccatataaggccttatctagtttgcacacatagccatctttctgttcataacctggtggctgcctcataaagacatcttcctctagaaccccatgaaggaaggcattctgtacatctagctgacgaagggtccaacctctagagattgctatggacaaaatagttctgatagtagcagccttaactacaggattgaaggtgtcctcataatctataccatatctctgtttgaacccctttgccacaactctagccttatatcgatctagactgccatcggcctttcgtttgaccttatagacccacttacaatctattatattctgccctttcttagaaggaactaggtgccaggttttgtttttcataagagcctgatattcactatccattgcttctttccaatttttatcacctaaagcctcatgcaaagtttgtggttctccagaagatgtaaaacaactgtatctaactgtcccatcagtgtatattttctcttttctaataccactttgtaaccttgttttaggtcgtattacctcagatagctgtgcagactcagacggcgcagatgatcctggctgatgtgactgctgcgcaccacctgacgaagacgcgacagcacgggcaggcgatggaggagcagcagtaggcgatgcagcaggcgacgtggcgcgcgctggttggatgcccgagcgctgctgctccgactccccctgcgtcgcagatccggaggcctgccgctgcagctgcgcctggaccgacgctgaatctgaggcggattctcccgccaagtcgccatttgctccatgtacccggccaaatgcccccggtatatctgaattcacatttctgggagattctgcacatgaaatatcagtagcatttggcatagagatattaaacagatgatcatgatgttcctctcccccttgatcagatgttttctcattgattagagtaggaggaagcaaagaaatttcagctcgaagacgggcgccagcatttggatgaagattagcaaagggaaacacttgttcatcaaaggtgacatcacgagatacatataccctgccggtagaaacatctagacatttgaaccctttgtggatattgctaaagccaagaaacacacattgctttgaacgaaattgaagcttatgagtattgtaggggcgcaaatttggccaacatgcacagccaaatgttcttagagatttataatctggtgtttgcttaaacaaccgttcaaggggtgtatcaaattttatgaccttactaggaaggcgattaatgagataagtagcagctaaaaaggcttcatcccagaatttcaaaggcatggaggcatgagctaaaagagatagaccaacttctactatgtggcgatgtttgcgctctacagctccattttgttgatgtgtgtgagggcaagagacatgatgggagatccctatttcattaaagaaagtgtgcagcttaagatattcgcctccccaatcagtttgcattgaaagaattttgcgatcaaattgcctttcaacaagtttctgaaattcatgaaacttctgaaacacctcagatttatgcttaagaaagtagatccaaacgaatttactataatcatcaatgaaactaacatagtatttctttgcacctacagactcagaggcaggcccccacacatcggaatgaataagttccaaaggattatttgacacactagttgatctaggaaaaggtaattgatgacactttgcttgttgacaggcatcacacacagactcattgacagaattactaagacaaggcaatttattttgactgagaattctaagaacaattggcttggagggatgaccaagacgcccatgccacctcacaaaagatggcgtcgcaacgaaggcctgtctcaaagacgatctggctggaagtgggtacaggcctcgtcgacagggaccttcaagaattgtcctcctcgtggccttgtccttaatcaaaaaatatttgccatgaatttcaagaaaagcataattatctgcaacaagtttatgaacagatactagatttttcgccgcttcaggaacatgtaaaacatttttaagatgcaaggggtgactaggagtaggaacaatagcatgaccaacatgtttaatactcgtaccttcgccacttgcagtgtgaatttgatctgttcccttgtatctctccttggttgtcaatttgtctagctgcccggtaatgtgatccgtcgccccagtatcaacataccagttggtatcaacaccgtaggcgtatgttgcagcaccgccaagcttctcatcaggaacatatgagtcatcataacgatgccagcagtcgcttgcaacatgccctcgcttgtgacacacttggcacacggggcgagtatcattgcctcgcccgcgtccctgacttgcgccgctaggggcgccacggccgtgaccgccacgaccgaagccgccgcgtccgccacctctgtttccagtgctgctgccgcgtccaccacgaccaccacctcggtttgccgcatttgccgaagtggtgagat

SEQ ID NO: 24110 - DNA, 596 bp, Oryza sativa
tcatggacttcctttacatttgttatctcccgatgcggatgaattggcaatggtgtacaccgtggaccaatggtcgaaggagtttattgatggcgtgcattattttttgagtgtggacaatgcctacaagtctaagggttttatatgttgtccatgcacaaggtgcaaaaactagaagcattcttcatcaacagctcttaatatccacttgatgcaattgggattcatgcctagctataactgttggaccttgcacggagagttaggggttgcaatagaagaggatgaagaagaagacgataacatttcggactgggttcaatacggtggatttgcagaaaatacaataggcgtggcggacagtgctattgaagaaaacaagggtgcggatgatcttggtcggagttgtgtgacgtaaagaaggactacgaaagtggaaaggatgtccaaaaattgaagcgtatgttagcggaccacacaaaatgtcattgtacctagattgcgaacaagggcagaaaaagttgggtaccatgctgaaattcttataatgcaagacaaaaaatggtgtgactgacaagacatttggcgtgttgttg

SEQ ID NO: 24111 - DNA, 1861 bp, Oryza sativa
acttggcatagcggaagtagacggctcatcttgagtggaggtggatggcttgtcttccacttcaataggcttgacatctccaatggacatgttcttcatagctctcatcaagccttcatcacctacatcatccaaattctcatgtccctcttgggagccattagtctcatcaaattgaacatcggcggtttcttccacaatacctttgttcttgttgtagacccggtataccttgctatttgaggcataacctagaaaaaacccttcatcacaccgactttcaaatttggttagactatcaccctttcggtaaatataacacttgcaaccaaaaacttgaaaataggtaatattaggcttcctcccaacaattagctcataggaagtctttttcaagagacgatgcaaataaagcctattggttgcatggcaagcggtgtttatggcttccacccaaaaggaatcggaaacactatattcatcaagcatagtccttgccatctcaatcaatgtacgatttttcctcaccactacaccattttgttgaggtgagtaggtagcggaaagttcgtgtttaataccaagatcatcacaatagtcctcgatattggtattcttaaactcggaaccattgtcacttcttattttcacaagagtgcaattaaatttattttgggcccttttgcaaactttttgaaaagctcggcaacgatagacttgacatgcaaaaagaacacccaagtatagcgagaataatcatcaacaatcacaagacaatgactattaccaccaatgctcttataggttgttgggccaaacaaatccatatgcaagagctccaatagtctcgatgtagacatgatactcttagtaggatgagaacatgcaatttgcttgccggcttgacaagcactacaaagcttatatttctcaaacttcacatctttcaagcccacaactagatcacgttttgaaagtttgctcaattgattcatgccaacatgggctagcctcctatgctaaagccaacccaatgaagtttttgcaactaaacaagttttcaaatttgcttcactagaattgaaatcaaccaaataaagatttccatatctaaaacctttgaatacacaagacttgtcaagaaggctagaaacaataacttcttgcgggaagaaagcacatgacaagccaagatcacaaatttgagcaaccgaaagcaaattaaaatttagagatttaacaagagagacattatcaattgacaaatcattggagatagcaattttacctaacccaattacctttcctttgctattgtctccaaatgtcactttctcttgttcatttcctcctacctcaaatgtggtgaacatagccctatcatgtgttgagtgcatccactgtcaagcacccaatggctcccaccggtgcggtagttcacctacaaaagaagatcaagctcttttaggtacccaaacttgtttgggtccttggaggttagagaccaaagctttgggcacccaaatggcattctttttaccaccgagtataggggaacccacatatctagcaacaatgctaccatcatgagccttcctaagcatataatgagaatcaaacatgcatgtcttaggaggcttaccaccagggcaatcattcaccaaatgcccaacctcacgacacttggagcaatacttaccattgctcttgacaaaacgagtggcacagtgagaaggtttcttacccttctttggaatgaatccaagtccctccttgttaaggatgcaccattgctcactcaaaatcttgtcaagagtgttcttacccttgaagcacctctccaagctcttgttgagcttag

SEQ ID NO: 24112 - DNA, 1692 bp, Oryza sativa
ggtgtgtcgaaacatgaattcggcaataataaaagagggtagcgtacgagacctaaagtggatggatgcggagacaaaggatttagacaggttcaggccctctcaatgaaaggtaataccctactcctgtttggggatttgaatccgccgggtgtatatagatctgacgatctagttgtgtcatgccccctagagggcctcctgcccaccttatatagggtggggggcaggattacaagatagaaaccttaaccaatacggtatcggtttcctaaatctactttacaatattatcaaaccaggactttaggctgttccgtaatatataaggaaacgtaatacccaagtcatgatctgttacatattccatatatataagttatcccctatgactagtcggataaccatgccgtatgggtatggggtacccataatatccacagtagcccctgagaccttcgcagtcgaaaagataatcttctctcgaaccagattactccaaagccgagtgcttcaatcatctttgtcatggtctcccgagtacttttaccaaatctgaagactgtggagggctggaaaataaagtcaggtgcaccgactagatgcacctaataggtgtagcccccgacaatgtggttaattgaacaaaccaagcatatagtcaaggaataaataatccaaccaaccgagtggttttgataatcgtaatcaaccaagtgacttgatatcaatatatagcatatgcggtgtgaatcctccaaataacatgatccgagtgatataccaactgctttgtaaaatatgatgagtgatatagcaaaatagctataaagaagcttgcatattgtgaataaagaaatttccaaagtattgggcatacgccatgcgcacactgctttaacagatgtgcttaagtccctagaagacacatggtttcaccacacctggaaatatatggcatatgtggtgtaaaatccgagtaaataaactcataaaggatttaccaaccgcctgaaaaatgaccataatatataatcagcctaagccataatattggtcaataaaaatgcacacttacgtggcaaaaagcaatgatattgtatccaatcaattgcttgataaacccaaacagcaccttgactatataaaaaagtcagcggggcagctatataaagctttactgtttgacaccttttaagatgcattgtaccaactcctaaaaagtcgagtaactgcggtataaaaggattttaaggtattgggcacttgatcacgcgcactttggcctaagcgaaaaatgcctaagtccctaaaagaacgtgacaggccacacctgaaaatatgggctgcagacatattaggcctaggccaaaaaatatgccttcgacaccctttaaaggatgacgcatgtaacatgctcccgagtaataaatcttctgggtaatatagaccaagtgtagctcatatgaatagcttctgatctgaatgattatcccttatgggatactccaaaataaatataataattgaatcccgactggcgcaagtattcggttgatagcccttacggggaataataattggtccagtctttgacatagaaaatagactcatgactatgaatccatgtgaaaatgtatccggaataagtccaaattggagatataatcctcacgcttgagttgatgagcc

SEQ ID NO: 24113 - DNA, 5356 bp, Oryza sativa
gaccggttcacgggaaaccctgggagacttaccgtgcttaccacaagcgggagtgggtaactgcttgatctgaagtatagctcgaccctttcctaggcaccggtggcgagggtgggcgtgatggagttgggtccgccgaggtattcggttgtctaggccggattcaccgcggcgcaagaggggaccgcccactgccttttgaggggtgggggtgaaaccttagtgtggtgtggatggttagggaagaagggttatgtggagggtcttgtcacgatttccccctttgcagtatcatggtgatacttcggggcatggcgacatgtgtggaatcgtgtcttgtgggtacagttgtacatctctggccagagtaaaactattcgaatagccgtgcccgcggttatgggcgatcaaccagattcaccgtgattagtctcacccctagtttagcttattgaactggtgtagtacaggtggttggttgggcctgttgcaacgtggtgtagcgttggacagtgattggttaatattgattaattactacagctgttttactgctatcaactactgctttgaaatgcctgctttatgcaaaagaacccctagcttcctttggttatatcctgcatcatacctcctcttccggtatgacttgctgagtacagtgggtagtactcagtcttgctctcttttcccctacactagagttgaagttcttctcagttggagccgtctcagagaggttggtttcgtcgctgccgtcaaggtttgcctgtggagtagagtcgcccgctgctgaagtcaagcttcccggtttagctcgcttttatctttcccgctgcatttgtaatcttttatatttttgtaagacgtgggtctgtatgtcaacaattgtcgtttgtgtaccctggctggtcctagacagggatttaatgcacattcagcttagaaattctggttcgagaatttctgggggtgacaagttggtatcagagccgaccttgaccgtaggacaagccaactggaaacctaagagccttctgaaccctttttttttcatatgcatatgcccttttgcacttggattttgtttcgggaaaattttggggtttgttcttttgatttgtgggaaaaatcttggtcgcttatttaattggatttctcgactagggacagtctagggatttagtaaaagtttattcgaaatttattcggcagtcggtcgggaattgtcgggtgatatgcattaggtcgtgtctatgttcggtggggtaagtttatgcgtatcagtatgactatgcatctatttcatgcattaagttattgtttagtcagttgcattagtgtcttttgtctcggttcgtgaaaaatgttgttctatgtataaaaatcatcatgctcggttatttatttgagtcttcttttgctttgtttaatttggatttgagcatgaattggttcctatcccttgtctactttagatgtcagtcctatccctcgtttgcaagcgccgccccgagcttcagagtcgccgcccttagctttatcgccttcttagtctgtttgcttgctagttttcgtgtttaggtttgttgcttgtgggttagtcggcggtcgatatcatgtgtcagtggtatgactgcctcaattaggagttgcgtgcctctttttcagtgttttaatcaagattaagataattgcacttaaattcataagcaagattagtttctgagccccctgtttttcttccttttctcatatttctacatatccccttcagatggagacaaggaatggttcacgcgactccaacaacgccagtggcagcgaagagccgatcaatggagcacgtgccaatagtgcatctgacaacagtctgtccccaccgcccgagaacccaacaattgctcaggtgttggacaatcagactcagatgatgacaatgatgatgcaacagatgcagcaacagtaccatcaggtgttgcagcaggtgcagcagcaagcacagcagaagcagcagaacctgcagtttggtcctccacgccctcagtccaaactgttagaatttcttcgtgtcaagccgcccactttctcaagcaccaccaacccaatcgaggcccacgactagcttcatgccattgagaagaagctgaatcttttgcaatgcaacgagcaagagaaggttgcttttgctacacaccagctgcaaggtcccgcttctgtttggtgggacaactacatggtgacccgtccagctggggcagaggttacttggacagagttttgccatagtttcaataaagcacaggttcctgagggaattgtggcacaaaagaagagagagttccgttccctgcaacaaggaaccagaacagttatagagtatttgcatgagttcaaccgcctcgcgcgctacgcccctgaggacgtgcgtaccgatgacgggaggcaggagaagtttctgtctagtcttgatgatgaattgactaaccagttgatctctagagattatgaggactttgagaagctggtggataaggctatccatcaggaggagcactgtaacaaaataaaccgtaagaggaaggcaactcagttcaggactcccaggggaagagttagaagcctcgtttcacgatgggacgtcacggtggaccttccaccatgattatccggcagcaccgtccctaccacccgggtagcttcaacaagaaccaccatagtggcagtcacaacaacagtgagcagcacagcctcaaccctactccgagttcactaaagattccagctcaatcagttcagccagctctgccagaacagcccaagaggttgggagaaaaacccgaactctgcttcaattgtaacaaacccggacacacggttggaaagtgcccgaagccaagatgtgctggacccaagttcgttcaggcccgtgtcaatcatgcatctgcagaggaggcgcagtcagcaccagaggttatattgggcacattccccgtcaactcgacaccggcagtaatattgtttgattctggtgcaacacattccttcatttccaagcgttttgctggtgcacatgggttatctttagtgaagcttaagataccaatgcgagttcatactcctggaggtggcatgaccacaactcactactgcccatctgtgacagttgaaattcaagggttgatttttccagccaacctcattcttctcgaatccaaggacctagatgtcatacttggaatggattggttgacaaggcacagaggagtgattgattgcgctagccgtaccatcaagttaaccaatgcaaaaggagaggtggtaaccttccagtctccagtgccgcagaagccagggatcagtttaaaccaggctgctggtgaagaacaagaggtagcagtggagaaaaccactaagaagctggaggatattcccatagtcagagagtatccaaaggtttttccagacgatctgacaacaatgccaccaaaaagggatatcgagttccggattgacttggtacctggaactgcaccgatccacaagaggccttacagaatgggagccaacgagttggcggaagtcaagaagcaagtcgatgaacagttacagaagggatacatccgcctgagcacgtcgccttggggtgctccggttatctttgtggagaagaaagacaaaaccaagaggatgtgcgttgactaccgcacactcaatgaggtcaccatcaagaacgagtatcctttaccaaggattgatgatctgtttgatcagttgaaaggagctactgtgttctctaagatagacctacaatcaggctatcaccagttgaggatccgcgaagaggatattccaaagacagcattcatcactcggtacgggttgtttgaatgcacagttatgtctttcggactcactaatgcacctgacttcttcatgaatttgatgaacaaggtgtttatggaatttctagacaagtttgtcgtggttttcatcgatgacatacttatctactccaagtccgaggaagaacatgagcagcatctccggttggtacttgaaaagttaaaagagcaccagctatatgccaagtttagcaagtgcgacttctggcttaaggaagttcagtttctcggtcacatcgtgaatgctcaaggagtagctgtggatccagcaaatgtggagtcagttaccaaatggaccccaccaaggacagtcactcaggttcggagtttcttaggacttgcgggctattaccgccggttcattcagaacttctctaaaattgctaagccaatgacacagctattgaagaaggaagaaaagtttatctggtctgctgaatgcaataggagttttgaagaactcaaacgatggttggtgtctgcaccagtcttaatcctgcctgatcagacaaaagatttccaggtctattgtgatgcatctcgccaggggctaggatgtgtgttgatgcaggatggcaaagtggtctcttatgcttcacggcagttgcgttctcatgaaggcaactacccgacgcatgatctggaattggccgcagttgttcatgctttaaagatttggcggcactatctcatcggtaaccgttgtgaggtatatacagatcacaaaagtctaaagtacatcttcactcaacctgatttgaatctcagacagcaaagatggttggagctgatcaaggattatgatatgggaatacattatcatcccggcaaggctaatgtggttgcagatgccttgagcaggaagagctactgcaatgttgcatgggtagagcaactatgttgtgaggttcaacgcgatttggaacatctgaaccttggtatagttgagcacggattcgtggttgccctagaggcacagcccacactggtggagcaggttcgcatagctcaagcaagtgatcctgaaatagcagagctcaaaaagaacatgagagttggaaaagcccgaggttttgttgaggatgaacaaggaacaatctggatgggagaaagattgtgtgtacccgaaaacaaggaattaaaagacctgatactaaccgaggctcatcaaactcagtattccattcatcccggtagtactaagatgtaccaagacctcaaagagaagttctggtgggtcagcatgagaagggaaatagctgaattcgtagcactctgtaacgtctatcaacgagtaaaggcagaacaccaaaggccagcaggtttgctacagccacttcagattccagaatggaagtgggaagaaatcggaatggatttcatcaccggtttgcccaggacgtcatcggggcatgattctatttgggtagtcgttgaccgactcaccaaag

SEQ ID NO: 24114 - DNA, 894 bp, Oryza sativa
gccgtatgctgagttctcttacaacaacagttaccaagctagtctgcagatggcaccgtttgaagcactgtatggacgaaggtgtcctactccactcttctgggatcagacaggggaacgccagttgtttggtacagaagttttaaatgaggcagaagagaaagtcagagctgttagggaaagattgagaatcgcgcaatctcggcagaaaagctatgcagacaaccgccgaagggagctcgctttcgaaacaggggattatgtgtatctccgtgtcactccactcaggggagtacatcgcttccaaaccaaaggaaagttggcaccacgctttgtgggaccatacaggatcttggaacgtagaggtgaagttgcttaccagcttgagcttccctccaacatgcttggcatccacaacgtgttccacgtctctcaattgaagaaatgtttgagaggacctgaggaacaggcaagtccggatcacatcaaaattcaggaagatctgacatatctggagaagccgactcgtatcctcgaaaccagcgagagaaggaccagaaacaaagtaatcagattctgcaaggttcagtggagtcatcactcagaagaagaggccacttgggaaagagaagatgagttgaaggccacccacccgcacctcttcgccagcacttccgaatctcgaggtcgagattccgtttaaggggggtaggtttgtcacaccttgaagtttccccccttttcttgctttaaaaattggttaaataaattgcccgaagaaattatcttaattaacctagagctaaatccctagttaataaatgcaattaataatcggaaatagcgtggtggaatttttcttgagttccccatgctccaatgcattaacaagat

SEQ ID NO: 24115 - DNA, 1102 bp, Oryza sativa
gagcgtaagagataagcttaaagccatgaatcccttttatgcatatctggatctggatcctgcagaacaaacatataggatgagtagtatctgatataaatataatactcgagaaaaaaaatcaagtattttaaaatatttataaatatgtatttctcctcttgtcaattttgatttccccgagcagatgactcattacgtttaaacgctctgcccaactagtcatagccaccaagcactgggagtcggcctaagcacttcccaaacatgcatatgagtgacatgagttcgtcattaatggaacaaagtttcacggatcggagtttactactcgggtacttttgcaattattaagagcagaaaataaatttatctcatctctatgcttttgatttattccgaataatacttagcaccttgcgttagtcggtccatccaacgagcccccgggtgctaggaatcggcccaaaggcaaccatccattggcaaaccaaacggaaagcataggaagatagaactccataactcgataggtacttttgtactcagattatgtcgcaagcaatcaagataaatattataaaaaatatgatataacatctatagcccccgactcactgctcaatggaagaccaattggtgtagtgaggcagaggaaaaggaaaaatatcatataaagaataaaataaatgatgacttagctttgtaatattccccttggtgatggcagaagtggccaatgtgggaacaaagtcgtccatcaataacaatgaagacaccagtcggcggcgacgaaggcggtcgacggtgaaagcgaagacgcccaacagcggcggcataataggccagccgtgtaggcggaggcaccagtcggcggcgacggaggcgggccggcggtgaagatgacgatgcccttcaacggtggtgtgaccaaccgaccgtataggcggggacaccactcggcggcgacggaggcaggccggcggtgaagtcgtagacgcccaacagcggcggcataataggccagccgtgtaggcggaggcaccaatcggcggcgacggaggcaggccggcggtgaagtcgtagacgcccaacagcggcg

SEQ ID NO: 24116 - DNA, 35999 bp, Oryza sativa
acgcccaacagcggcggcataataggccagccgtgtaggcggaggcaccaatcggcggcgacggaggcaggccggcggtgaagtcgtagacgcccaacagcggcggcataataggccagccgtgtaggcggaggcaccaatcggcggcgacggaggcaggccggcggtgaagtcgtagacgcccaacagcggcggcataataggccagccgtgtaggcggaggcaccactcggcggcgacggaggcacgccggcggtgaagtcgtagacgcccaacagcggcggcataataggccagccgtgccggcgaggacaccactcggcggcggacgaggcaggccggtcggtgaagtcgtagacgcccaacagcggcggcataataggccagccgtgtaggcggaggcaccagtcggcggcggacgaggcaggccggcggtgaagtcgtagacgcctaacagcggcggcataataggccagccgtgcaggcggaggcaccactcggcggcgacggaggcgggccggcggtgaagtcgtagatgcccaacagcggcggcataataggccagccgtgtaggcggaggcaccactcagcggtaacggaggcaggccggtggtgaagtcgtagacgcccaacagcggcggcataataggccagccgtgtaggcggaggcaccactcggcggcgacggaggcaggccggcggtgaagtcgtagacgcccaacagcggcggcataataggccagccgtgtaggcggaggcaccactcggcggcgacggaggcgggccggtcggtgaagtcgttgttgttatcagcaatggcggtggcgaagacaagccggcagagtggactcgcggccgatcgaccggaaagctgagacgcttcgagtccatgaccagcatcaatcgcctcaatagtgccgcgtaattatatgtgaacaacaacaaaaaatagcaagagattaatctgagattaaaaatcaatatgataaataatgataaaaatcagattgagtttccccctgactgatttggatcaagtcagagaagaggagcttgaagaagtgatcgacggaaaggaagtgaaaactcccaaagcgaaaacgaagtcggcgactcatgaaattgattccatcgcgctcgttgataggaaactcgacgcaacccctacctggcgcgccaactgtcgaaacatgaattcggcaataataaaagagggtagcgtacgagacctaaagtggatggatgcggagacaaaggatttagacaggttcaggccctctcaatgaaaggtaataccctactcctgtttggggatttgaatccgccgggtgtatatagatctgacgatctagttgtgtcatgccccctagagggcctcctgcccaccttatatagggtggggggcaggattacaagatagaaaccttaaccaatacggtatcggtttcctaaatctactttacaatattatcaaaccaggactttaggctgttccgtaatatataaggaaacgtaatacccaagtcatgatctgttacatattccatatatataagttatcccctatgactagtcggataaccatgccgtatgggtatggggtacccataatatccacatggtgagtctctcatgagaagtctttagctcctcatacaagacctccaaagaagcatgatccttctttagggccatgaacttgacaatctttttctcactataagcatggagctcctcaaacatactcacaagctcatcataggaaacatcattacaattatcattactctcactatcactaagagatgttaccttagaggaaccctttgccatgagacaaagtggagcgaagagtgatagagcctccttgatggcaacaacggccatcttcttcttcttggagcttgcatcatcaccaccttcttcctcggacccggatgaggcggagctctcctcatttgagtcccattccccgatgaaggcttcaatcttcttgccttccttcttgagcttcttcatgagcttgtatcctccactcttcttcttggatgacttgtctccatcatcatctttggaagggcacttggaagcaaagtgtcccttctcaccacactcaaagcacctcaagttggagagagtcttgttgggtcttctatttcttctcctatttgagtttgagccccttcctctctcctttctccttcccaagagatcattgaaccttctagcaagaagggcaatctcttcctccaagtcctcattggcttcattcaccttgcccttgcccttgtcctcaacttcagcttggagagcaatgcacttcttggaaggtgaggcttcctccatctccttcttcttcaacttgtacatgtcattggtgttgatcttccccaagaggcttgccggtgtcatccttgacttgtcggagttgatgagcatggtgacaagggtctcatacttctctggtagagccctaagcatcttttgggcaacctcaagatcggtgtagtttgccccaagccccttgagatcattcacaataacattgagcctcccatacatgtcattcacactctcatgaggcaacatggagaatgtctcatattggatcttgacgaaatgaagcttggcatccttgtactcacttgtgccctcatggatctccgccaacttgttccaaatctcatatgcggtctcaaggttgctcactctatcaaactcctcttggctcaaagagttgaacaaagcattcatggcttgggcattgagttggaggttgcggtgatcaatctccgtcaagggtgtgccgttgatagcaaagcctacatccacaatactccaaatatggaagctcatagctttgaggtgagtagacattttaattttccaagtggaatagtttgtgccattaaacatgggagccttccctacatggttcacctcgttcgacatcttctctctaggcggtgaagcccaatcaagagagaccaagccctgataccacttgtaggatcgagaggtcaactagaggggggtgaataggcgatttaaaactaaatgacacctaatcaaaactaacctaagttgctaggcttggtaagggtcaactctaactaagtaactaagttatgttttgcaaacctaaggtgatagtggctcaattatatctctaggaaaagtaaatcacactcctatgtcaatgtttagcaatcctagggtgatatgatctcaagtatgtctctagaaatgtaaattgcacaaatgtaaatgcgacaatcaaattagacaagtagacaagagatttttcaccgaggttcggaaactcgcctgtttcctacaccccgttgaggcgagcccaactccaccgctcaaccacgaaaccaccgcacgcccctttcgtcaaggggtgggcaaggcgggagcggcccatggagaggactacccaagcctcgatcactagggtagttcttccttcactccgaaggtgctgaactccaaaccactcacaaaccgacgccgggcctcctccacaatcttctcggagaggtcaccgggcaactcctccacaagccgtctaggaggcggcaacctctaagagtaacaagcaatgacccggcgtggagatgatcaatcaagtgccacactagctctacaaatggaagcaatgcacttgactcttggctaatcaaccctctaacacactagatggatgaacacaaagctcaagtgggtgtgagagaggtgcaagggatgtatgcaattgaattgggtgccaagagagtccccttgctgctggtggggaagtatttatactcccacccaccaaaactagccgttaggggtgaaatcccccaactttgtgctctgccggtctgaccggaggtatgtggccggtcagaccgtgctactgtgcaacggctagaaaactagccgttgaagtgctatcagagggccccatcggcctggctggtcagaccggcgttgagtgggcggtcagaccggcctcggctcggtcagaccgccatcggctcggtctgaccgactacggctccatcggctctgtatcggccacccggagcagcaccatcccggcctccagtgggccggtctgaccgcgcatgtactgccggtcagaccggctttatgcgccggtcagaccgccttcttgcggccgttcagactggccaaggtacgccggtcagaccgccactatgtggccggtctgaccgcccctgttcaggccgagcccagtgaaatcccaagtgattgtgtgtgtgtgatgaaaagcgagcacacgtctaaatgcataatgacctaatgtggcaatttaatcatctctttgctaggtcattacccctcttaatagtacggcgaaactagaaaataaactagcaaatttgatcgccctacacctcgatcaattctaaatttgatcgccctacacctcgatcaattggaaaataaactagcaaattttaatccatcgatagtcatccatgcacacacatgatgtggatctaacttaaaatattatcccaatagcaacggttagtccacaattagcgcttgtcattaattaccaaaattaacaacgggggcctagatgcttcaaagcgtatcgacgaagccctgaagcaggagtgccgtcgatcgagccgatatgccggagggcacgtgttggcttgcatacgacatcatcgtccgcaactgcacctcgagttcctccacgaagggttttctcgttctcggtgaactccggtggagatagatcacctggcgaagtcgatggcgctgctggcagggaaggacttccagtctatggactggcattggccttcctggtagtctctgtaccctgtgacaaatatcttagggaaaagtgtaatatagttttgggtttttacggaattgtaagaagtacttgtgaaatagaaaagaaatctatcttaactaagctctcttactctggatgtagtgtgtaagagtgtcttattacttagcgacttcgatcagtcatttgagtcatacactctccctagccccagccttgtcatcggagaattcttctcggaagataaggctcttggacctttgacctacctcggttgaacaagcactgatcctagccccagccgtgaagttagaaaattgattttcgattacatggcttggttaatacgcacgacgagaactcttacacgaccagatcttacatggtctttcgtctctacaggatccgacaaggccttatcggctttgggcgtccccagccaaagatctcttaggttcctcggaggccttgtcaagacggcgtaaagggacatgaggatagatttcaacgctaggtgtcatctgggtaagggatcatcgggaaggaacactttggttgtaatctgtacctgaaaataggctttattgaagctgtaagatgtcttacaagtatggatactattgacttatacatagaatttacgtaattgatcaatgttccagaaatttgccatctcacgaccatcgccgtctgcaattttgaatgcgcctggccgcaagacatgtgtgatcgtgtacggtccttcccatttgggtgagagcttgtttcgccctgcttggctttgaacccgtcggaggacgtagtcaccgatcaaaagcgtgcgtgctcggatgcgcttctcgtggtaacggcgaagggcctgttggtagctggtttctcggacgacaactcgttcacgatgttcctcgagtagattcacatcgtcgtttcactgctcctcctgattctcatcgaaatacttctgtactcgtgtactttgatgtcgtagctcggtggggagcatggcctctgagctgtacacgaggaagaagggtgtttccttgttagacgttgtcggtgtggtacgcacggcccatagtactgatgggagttcttcgacccacttcttgtcctgtgacatgagcctgtcatagacgcgggtcttcattccttctagtactatgccatttgccctctcgacctatccgttgctctgagggtgagaaaccgaggcaaagcagatcttgactcccagcccgatacaataatcctggaagtcggcgctaatgaactgggagccgttgtcggttatgatgtggtgcggcagtccatatctgcaaaatatccctttgatgaatttgatggcgtcggccttgattttccccgtgggtgtcgcttcgatccacttagtgaatttgtcgatcgccacgaataggaacctgtagccgccctatcctcgtgggaatggtccgagtatgtcgagcccccaggacgagaacggccaagtaagagggatagtctggagtgcttgcgctggtagctttgtgtgtttactgtgaaattgacaggcttcgcaccgctgaaccatgtcgcaagcgtctttgagggcggttggccagaaaaacccttgccgaaaagcttttccaaccaatgtgcgaccggctgcgtgtgacccgcagatcccttcatgtatgtcgaggaggagatgtctatcgtcgtcggacgagacgcatttgagaagtaccccatttggcgctttcttgtatagatcgttgccgatcatacagtagatttttgctttacaggttattttgtcggcttcttcgtcgtcctcgggcaactcttcgctgcatatgaatttcatcagtggggtgcgccagtcatctgtggtctcgatatcggcaacggcgcgctctgcctctgtagcccccaagctgatgtcgggggcgactgggctatcttcgtcgcttgcctctttcactgatggctttgtcaggacgtccagaagagtaccgggttcgagtggctctcgtctggatgcacgccatgctagatcatccggctcgatgttgtccttgcggtatgtcatgaccggaattaatccaacgggcgttccttacgtgcgtgtattattccttgtcccaggaggcaaggtacaccaaaagttgatacatttcagagtttatcaagcggaagcgtaaatagttaatttattacatgggcggcgaaggcccagcacacacaaagacaaacgagaaacaacggaagactagggcgacgaccacaggcgcttgacggcaggcacgagctagacaccaacgccttcatcttccaggggctcctcttctgggtttgggaaaaattgagcaagactgagtacaaccaccgtactcaacaagacacacccacaagtgcaggataaatgcaagggagtacaagggggttataatataaagggttagggtttgcagtaaacagcattaaaagacacttagttgctcaaagctattttgtaaacacgattccagagctatacaatattattaatcaaggccgtgaacccacacgaacctgccttaacccaaggcctacgatgattcagaccgaactggcaacccgaccctgggtcccagctcgtcccaagtcaacccaggccaaccattccacattttagttgttaagcaggttttaagaattaaaacactaacttgggtacattgctcggcttgcccataaccgagggcgcagctattcgaatagattatactctgatcagaggtgtacatctttacccacaagacacatcttcctcatgtgtaaccacgtgccgcataccaccacggtatacggacggaagacgtgacatagtttccaacccatcctagccatagacaagagtaccgacccaaccccacctacggccggaacccccgggacaggtaggcaagactgagccccttgcagcaggacaccggccctgtgccatgacatctcgactaccgggccgcagctcgtgtagccttcatttgtcctagagatgtccatcgacccccgacttcgtccatctccatccgtgtacttttgtttataaccagactgagccacaaactaagccttacccactagacatgtggaagtacggtagtgctttgcaacagaggcccgaagaccggtccttatatggccgaggtgctactatcaaaaccatgcaccccgagcccagcctaaaaccattttgaggattttgaatagagggggaggtgtgaatccaattccacaataatccaaccattccatagtgtccaggtgatatgaatatcccaaagtctagagttgtaaaaccacctaatgctgcctaattaagcggcgaaacatctacctaaaatcatactagtggtaccatgagtagagtgtccactagttggggttttgtttattctagggtgaacaaggaaataataacaataacaataataaggtcataacaaaggtaaataggcatggctagataaaacagtgataacgcgggaatttaaataaaccgataatgcaataatttaaatcaacataattttataaactgggattcaatatgttcaaggatgatgtgacttgccttgctcgctttcccaaccgtcggcttcaacttccacgaagagcggatcttccgaagctgcagcgtctacacgaccaacggaaaagaaaaggcttttactctaataaactccatataacaagcaggaacaaagcacaaaaatgggttcttgacttcttaaggaaaaattagagacttgaacggtccaattccgagttcaaatggccatgttatggctatttgaagtttatatgctctttaagtgaatatttgcgaatttcttcatttaaattttaatttaaaaaaaagtttattgcgccagccgaggggagggggcgcgcggaccgggtccacgggagtggggcccacgcggcagcctcacggtccacggtggactgggtgcacccgggctcacaccggccggcgccgtgggccccacgcgtcagccgcacccgagggcgcgggcggctgacagccgggccccacgcggcagccgctcgatgcgcccgaaggcggccacggcggcacggccggcgggaggcggcgcgcccgcgcccctatggtcgccggcggcggccataggcacggcggagcggcggccgagagaagggagggaaagggggaaacgaggcggcggtccacggctcaccctaggtcgacggagacgacgaaaaggcggctggagcggaggaaggcggcggcgcggctcgggtcgacggggacggcggcgctccggcggtcgacgagcgaaacggagggtggacgaggtcggcaaggatgcggcgggaggaaggggatgacgggtgggccccacccatcagcgagggtggcgggcgggcccgcccgtcagtggcgcgcgcgcggggagaggccggatgggccgcggggagaggagagggagggggagggagatgggccgagccagcccaagagggagagggagggaaaggggactttttagagtttttctttttataaaatcattttaactttgtttatttcttaataattattatttgtgctctgaaaattccactaaaatttatttacgcattttaggcttttaggaaatatacaaaaatcctccaagccttatttgacttttaactttgcacattttaattgttggaggctttcacatggattttaattattctaggcataatttagaggatgtattttagagtcgttttgggacgtgacacggtatacgtgtcggacctcgatcccatcgaaccttttttccagcttcctgacttctgcgagatacttggataactcggggctagagcacttatagtctttgtgcacctggttcgcgactagttcggaatcccctttcacgacgagtgtggctgcagctcttatcccggcgagtagtccttcgtactcggctgtgttattggtcgctttgaagttgaggtgaattgcatgcttgaattgatctcctgaaggtgatgtcaagatgaatcctgcccctgctcccctgtgggtttggaagtagtggcgtagctttcttgatgtcatgattaccgcgtagagcagtttttggatctgtggatatcttgtctttgcgtcgtggagagcttcgctgatgtagtagattggtcgttgtaccttctctctctcgacgacaatgacagtgctaacggaatatggcgtggcgacaatatagagaaataattcttcattaggttggggagcaacaagtatagggggatttgatagttagcacttgagtgcaatgaatgcctcttcggcttcctatgtccatataaatttgttttgtttcttgagtagagcgaagaaaggttgtcctcgctctcccatcctagcgacaaacctacttagtgccgccatgcatccggatagcttctgtacttccttgagtcttgtgggcgacttcatattatcgattgccttgatcttctcgggatttgcttctattcctctgctagagatgagaaaaccgagtagcttgcccgatggtactccgaacgtgcacttctctggattgagcatgaggcgatatcgtcggaggttgtcgaacgtttcccgcagatcgtcaatcaatgagtcgcttgtcttggtcttgacaacaatgtcatcgacgtaggcctcgacattgtttccaagttggtcgctaagtgcgccctggaccgtgcgctggaaagtatttcctgcggttatcagtctgaacggcatcttaacatagtagaataccccgaatggcgtgatgaatgttgttttctcctcgtcctcttttgccatgctgatttggtggtaaccggagtaagcgtcgagaaaactcaacaactcacaaccggctgttgagtccacccgttggtctattcgagaaagagggaagtgatccttgggacacgccttgttgaggtcggtgaaatcgacgcacattctccatttcccgttggccttccgcaccatgactggattggctagccactctggatggagtacctctctgatgaaactagctttgagaagtttgtcgagctcttctcatatgtcttgtttttaatctggtgcaaatctccgtagtttttgttttactggcttggcgtcgggtcgcaccatgagtttgtgctcaatcacctccctgggaacccccggcatgtcggacggctgccaagcgaaaacgccagcattgtcgcggaggaaggtgatgagcgcgagttcctatttctcgcctagtgatgccccgatcttgacggtcctgtcggggttagcactggagagtggaacgatcctgattgcgccgtctggtttcggcgtcttgtttgttttgctcactttcttgagtggctcagctgtggcgggtgggctgggcgtgtgctcgaccatgtcgaggctccgcttgtcgcattgcactgccagcttagcgttcccttgaatagtgattgttccctttggtcccggcatattgagcacttgatacgcgtagtgagatgcggccatgtacttcgcgagtgcagttctcccaatgatggcattgtatgctgtatcgaattcagtgacatgaaaggtgatctgctccgttcggaagttacttgcttggccgaaagtcacaggcaacgtaattttgcccaatggttcggacgatgactggggagtgattccatggaagggttgatcggttggtgtcaattcgcttcgtgggatccccatcgcgtccaatgtgctggcgaagagaaggttgattgagctgccgccgtcgatcagaactcgtgcgaccttgatattccgaatagtaggttcgaccacgatcggatatcgccatgggatgacggcagtcttggggtggtcttcttctgagaattctatcttctgttcagaccacttcatcttgggtgtagccccctgccacgtcgaacagacttcacgtttcactttcttgtattctcgctttgaggagtatgccgtggaacctccaaagatgtgcgagacatggagatcggagtctgggtatgatgagtccgattcctaagtagccgtctcagtgtccttctctaccacacgtactcgcttgcttttttccgatgccatgtgctttccgagcgactttttgaagacgaggcaatcttccagagagtgtctgtccgacttgtgtatagcgcaccatgcttccttcgcgtcactaccttgtaggtctgggcgtttgggagggtccgcgtattctgctgcgagaacttccgcttgagctttctttttcccactcttgtgatttttctttttgcttgactcaggtgcgtccttggctggtttcttctctcctgcggtcttcggcttgtcgttcttgcgtctcagtgcgtcatctgcgtgggcgcatcgatcgacaatctcgaataatctccaagtagttgtgatgcgcctcgttgccaactcctgggtagtatagcgatctctggcaccggacttgaaagcgcggattacagaagcgtcggtgatttcggggattgtatttctgcactcattaaagcgctgaacataatctctcaaggattcacctgggttttgtgtcaacgcatgtaggtcgtctttgatagcgtggcgcttgtaagttccttggaagttgacgacgaactgctgccacaggtctgcccacgaagaaatcgagtagggcgggagatgcatcagccatgaacgtgcagagcctttcaatgcagttggcaaataattcgaaaacgcgttgtcatctactccggtgtgcgattacaagggcgtcggccgggttctcgagaatcctgtcgtcgcctcccgttgttgtcccagcgccgatctccattgtcgtcgtcattatggcggcgtcctcgacctgtatcgcccggcacccgccattcgcgatcgtcgtgatcgtggtagttgtggcggttatcacggtctcggtcttcacttgagcggcctcctcgttcttcgttatcgtgacgtcgtgaagagacgcgatgtcaggaacggttcccgttgtctcgtgtgcgtcgtgcctctcggcggccattcaggtgatcgcggagatcgccggtgccgcgaggtggaggggtggctcgatgaggcgattcccgctgttcagggttttcgccattagcaccaccagttggtggctgttccgggtgcgctgtagcgacggcctcttcaaacgcgttactgaggttggttactgattcctgtagccgttctgtccaccgtgcgagatcgtcgttcagaacgggatcgtagggggcctccctcagtattgcgttgatggccctgatatgctgggccagtgtagtcacttgattttctacttccgcattagcgcgcgctgacgtgctagtcctgtcgatagccaatacctcgcgtggcgtacttgttgatgatgagccatagtcttcgagcaagtgtagaactgacggcttgtgaggatcgatgtcgattaccccaacgaatcgatccgagatcagtgtcgctccttgttccttgtccgcatccctaggagagatacatgactgctggaccttaggaggcgccgtcttcatggcgctgagaaagaccttgcagcttgagaggtcgtgattctttgtcttgtggataggacaatagatatcacgggttggagaagtacgctgaattccacgctctttgcaggcacgaatttcggcatgtacgttgagaaaaacccagcaggcttgcaaggtgtgttttctggttttgtggatagggcaccaggaccttatcacctcggaagttatcctcgtcggctcgtgattcttgttgaagagacaaggtttggccgcattaggatccttctcgggctcggatgtcgtcgacgttccgttctccgcttcggcgggaggatccttcgacatgaagtcgtcctgggttgtagccactgtgttctcgcttccagtcactgatggaccagccgagatcggcaccgtggtgtaaatcgggaagacgatttcgccgacttgagtacacaccagcattgttgaagcaggaactccttggtcgaggttggtgttgacgctgttgtcgacgaagctagatgaaatagtagtagaaccttgagcaccaaggccccctacatggcgcgccactgtcgatgggggataccggatatagtgggtactgtggtacgctggtacgaggatctacgtaatacgacatcaagcagacaaaaagcacagattatactggttcaggccccttgatacgtaatagccctaatccagttgatatgggattatatgatggaaatcacaggttacaaagggaacaatggaactcaatgataccggcgagatcgtaatcgagctggttcgactaaatctcccgacgacttggctcctgtagattccgacttcgtaggctgtggtggatgtgttggctatgagattcgatgccttaggtcctcccagggggtcccttttatatcgcaggtcaggcggtttccaagtagaactcggagacatcggaccttgcacgatacagtgacgacccagtcctgtccgagtaggactccttccatctgtgaactccatgatgaatttccttaatgtatgcagagaacgtctgtatacgcgcaggtataccatatcgatatgtgacgtatatcgaagggtaaagggtataccttacccgtaaccctgacatagatagcatgtaagtatgggaaatgggcgatatggtcattttggaaaaaatctaacgatcaactcacggtcaactaatggaatagagatagaggagatcaaaatgaaaactcaatggcatgtaggaatgggacaaaatttaggggtatagaagaaattgtgaaacttttaaggggtatgttgggaattttctcttacttgaaagggatgtccacaaaaatacacaacatacatattcaaattcaactcatgcaagtagaaaaaaaatttaactttaaaaataacatgtaatttggagtcaaatctatttttttattattttagttatactagttttgttcctatccagcaaaaagtaccgcctagtactagtacctacaacctataggtgccaaaacaaatccgactgttcaattcattgggggtatgatgggaatcgaagttagggtggttgcctcgacgcctttgcccttcctagcgtgcgctgcctcgccctttcgcccttcccaacccgcgccgccgtcacttctctgcttccattccccgtgcgcccttctccccttccatcccctttcgcattcccagcgcacgccacccatccctttgcgccgcttctccccttccatcccctcgtagcgccgcggcagcagggtgcaaaatggtggcgcggcagcgagggaaagagagatgacgagcaagaaaagaagaataggggaacggcggtggaggataaacatagcagcggcgagttcgatccaatcctattctaggatttttttttttggcccacctcaacccctcacccatccattcagcctcatccatccctactaagcgaaattactatcttaccttttcacctctcttcaccgtacggtactagataagggacaaaagtggtacctcgcggtactgtacactggcagccgttggatttggtccgatcaatgatcagtatttggtcccgtctctcagtgctgaacggtaaaaaaaaactctaattatataggtcgtacttaaaacttatatatttgtataataatatattacatattaatctattttatcaatcgtttaaaaattttgtgatgacttttatactacatggacaaacgataggatgtccctcaagtgaaaaaaaaatccatcagctacagtagttatagtaacaaagaagaggataaaagcatgctaccactatacagctagggatgaaaacggagcggatagtttccatccgctccggacaaaaacggatacggatacttttcggatcggataattctcggatagttcggaagacatggtatgtggtgggtcatgctgagatttagtcaactactattaggtatgtggtatccataaccctgacagtagcccccgacttcaatgcaaatgaacaaattcatattctcaaccgcagaccctagagtaactgttgtcgtgctcacgtgactgttcttgatgagttcagagataatgttagacttcctttatcagcctcgtgcgggcacctaaagggtttgtctgagtcaatctccaacgtcaaccaagaaagtacagaatatacgactaagtctcttgtcttgctgtaatcgagaatttggattgaaatcaagaaattttatctcggcgggtacaccctctcttcattccgtattccttgtcgagatccaccaatcgttctcgagtgatcgagaaggcgcagagtctgcgatggagccttgtcaacatttgtcgtactcgccttagtcgatcttggtataaaaccatagagacatggagacttcaacaatgtcgaatagaattttcctgaaattaatactcagaaaagaatattagatagaaatagcccccgagcgaatgctcaaagggtgacatgttataatatgtatggaaaactgaaaatgaattaaatttacagaccaatgttttgtatgtgagcgtcttctctcttaccgacttcgatcagtcagtttgttaagtcatacactctgcctagcccccagccttatcgtcagagaatcgttctcgaaggagaaggcttttggacccttgacctgccttggttgaacaagcactgatcctagcccccagccatgaagttggaaaactcaatttccgattacacggcttggttaatacgcacggcgagaactcttacacgaccagatcttacatggtcttttgtctctacaggctctgacaaggccttatcggctctgggcgtccccagccgaagttcccttaggttactcgaaggccttgtcaagacggcgtaaaggaacagtaggataggttttaacgctaggtgtcgtcgtggtaagggatctctgggtaaaacacttggcgatattatgtacctgatatcagttttgttggagtagaggtagtgggagaatcgctacacctctggtcgaggaccaggtagtagtcgtaacttgaccacttaaagtggaaatagtgggagaatcgctacaccgttggtcgagaaccaggtagtagttgtaactcgaccattagatgtagatgtacgagagatcgctacgattaattggttgagaaccagtgaataggtgtctctcgatcatttcgactcgtggtacgaggaccactatgctgtcggtcgaagatcagtcgtagctgttcctcaaccatctgaagttaaggtgcgagagattgctacgttttactagttcgagaaccagcgagcgagtagaattatctctcgaacaccaatagaagtttgtggtgcgagagattgctacgtactagttcgagaaccagcaagcgagtagaattatctctcgaacaccaatggaagtttgtggtgcgagagattgctacatactggttcgagaaccagcgagcgagtagaattatctctcgaataccaatggaagttacggtgggagggattgctacgactggttcgagaaccagcgaacgagtagaattatctctcgaacaccaatggaagtttgcggtgcgagagattgctacgtactggttcgagaaccagcgagcgagtagaattatctttcgaacaccaatggaagtttgcggtgcgagagattgctacgtactggttcgagaaccagtgagcgattagaattatctctcgtacaccaatggaagtttgcggtgagagagattgctacgtactagttcgagaaccagcgagcgagtagaattatctctcgaacaccaatggaagttgcggtgcgagagattactacgtactggttcgggaaccagtgtctcgcccagaaatttaacccaaatttccagactattttgtgtattaaatccctatccaggaccagccagggtacacaaaacgacaaataataaacagttccaaacataaataaagcgtaaaatacttatagaagaggcacttagtcctcacaccaaaagaaaacagcagcagcggaaaaaggcgatcctagcggggcttcagctccactccataggcaaaactcaactgggttctaagccttggtcttctaactttgtcttcagctcagaagtactacacttctgaaaagggggaataatagcaaggctgactacaaccaccgtactcagcaagccacaccaatgatgcaaacgtgcaaggggatacaagaatggcttgtggctatttgcgtaaaggcagttgtaaaacatttcattgagcaaaatagtaaaacagttgagtaattaaggtaatattaaatctccacatatcaacgctacaccacgttgaacaggcccaaccaacccacttgaactacagtgcattgggtcgatttattaagtgtgagactaatcacggtgaatctggtcgatcgcccataaccgcaggcacggctattcgaatagttttactctggctagaggtgcacaactgtacccacaagacacaatccaccggcatgtcaccatgtcatcatgtgcccatgatgaacatgtcaccacgtcgagtgattgtgacaagacccttcatataaccctcccctaaccatccacaccacgctaaggtttcacccccactcctcgcaaggcagcgggcagtcccctcgtgcgccgtggtgaatccggcagctggacaaccggtctccccggccgacccaactccatcacgcccacccttgccaccggtgcctaggaaagggtcgagctatacttcagattaagcagttacccgctcccgcttgtgttaagcactgtaagtcttccagggtttcccgtgaaccggtccttaattgccatggatgcgaccagcaaaaccatgcacccacagcccaccattcagtcgcattttagttggataattacgaccaatgcaacatggtcaggtgtctcgagcacacagctcgttctgatactaaaaaggtctaatactgcaattatcccatcaactgagctagtggtaattaagcatgactaagcatatagttctagctatgtcacataagtaacatgagctagtcgatctattacccacggttgacaaaggatatatatcaagtaaacatggcacaagcgagcagataggtaatacccagatcccatgtaataagcaaaacaattcatatttatttgcaaacggtaaaacatttgtaaagtaggatcaaaatgctcaaggggaatgtatgacttgccttgcttcttcaagcaatcttccgaactcttatcctcgcgaccgcgaacttccgaaacagcgaattctacacgctggcacgtaaaatgaggaaaagctctcataaacaacaaggaaacagtacataaaaagtaaacaaacatgtagatctcaattttagatgaattttgcaagttgaatggcctaatttggagttcgaatgaattagatatgaattttagaagttttgagccattttaatggatttctggaattattaattatttatcgtgcaattattaaatattttctcaaaggaaaagaccatcgctaacgtcagaaaggagcggccggcgccgacacgtggaccccgcacgtcagcgggcaatggggacgggtgcatggttgactcggtccaccgcggccggggcagcaccgtggacccggaccacgggagtggtccacgggaccgacggcctaggcagcatggctagggcacggcacggctcaaagccggccagccgaacgacggcgatgggcagcgcgcggccactggcggtgtggaatggtggcaagcggccgagaggcggcgggaagggggacaggaaaggaagggggacgggggaggagggatcctcaccggaagcagcagccggcacggaggaagacgatgacggcgacgattcggtggcttccgacgaaggaggaggggaggccgaggggcggctacacctggggaagctattggagggattagggaaaagggagaaggcgtgagcatggccggccgaagaggaaaaagaaagaagggactcaccggcgacggaaaacatgttttggtggggttccggcgatgaaaaaaagcaaccgaggtgctcctcggcgttgcgaagcgagtggcgcaggcggcgcggtgcggcgacggctgaggcgatggaggtgcgcggctggaggcgacaggcggtggtggagctcgggatgtgaggtggaaaggtggttgcggtggggtttgggggcggaggagtggatgccggggtggagctcggtacggcgatgccgatagtggtagtggcacagcacgggcgcagctagagtggcggcggtaggtggctgaacgacgccgacgagcagcggaggttggtggcgcggtggggcggctttccggtggctattggggaaaatggagcggctgcagggttgcggcagagagcggcgaacgcggtagcgcaagcggcgtggcgcggggacgtcaggagcggcagcagcggccgaccgaagagctcccgcgagcggcggcgcacggcctcaaggggaggagggggttccgggcatgggggagcttgggagagagggggaaacggaggaggggagcccggggatcttttttatgggcgcgggggagggagatcatggctgagaggggtggaatcaggcggcaaccgaccggcgacgtgggcgacatcgtgggtgaagtggagctcaaattggcgccaaaaattggggaaaagtgggggaaaatgtgtaggagatggtggggagccgatttcatgtggtttgggtgcgagggcgcgggcgggagaacccggaatcggcggcgacgtgggcggcaacggccgtccatggcagcttctgctctagagactgcaggtagaggaagggcctgacaggtggggttgccgggcccacctgtcgggaacggagaaagggaggagaacccagggggttatttagactttgcgcgaggggaaggaagatgggtcgatggcccaaggaggaaggaaggaagaggggagggaacgggtcgtggggagggaaggagggctttgggccggaagtggcccaaagtgaaggaggggagatttaacttggtttttctatttattttaattgattaaatgaactttgtgacttttaaaattatttctcgagctccgaaaattctcgggaaatttttagaaaatatttagggcacaaagaatattacaaaatattcctggccgatgattttcaagggaaaattttaatcctcccattatttcacttgatgaatttgttttaacttttatttaatttctagaaaatgcattattaaacgatttttaatcccgaacgaaaatcggggcgttacaactagcgagcgagtagaattatctctcgaacaccactggaagtttgcggtgcgagagattgctacgtactggttcgagaaccagcgagcaagtagaattatctctcgaacaccaatggaagtttgcggtgcgagagattgctacgtactggttcgagaacctgcgagcgagtaggattatctctcgaacaccaatggaagtttgcggtgtgagagattgttacgtactggttcaagaaccagcgagcgagtagaattatctctcgaacaccaatggagacgctagagttggtttattacatgtgcatctcatgtggccagcatgactcacatacccaacttatagcatatccggatatctgttcgcaatcatgtcgggcaatcaagccgacgacattcgcgaggaattatccgttaacaaccttttctcgactattccagccatggccggtgctatgagataggtcgttggtcttcgttggcaggttgggtgcgataactccgcatttgtcgagaatgttctcgataatggagtgtactcgatgacaacctactcatgtgctcaattgttcctgaaaaatattttctagaaggcaagacatatagcagagaatatcgagtatgtactcgaataactgtatggatcttctagcattatcaggatataacgagcagattaaatatcaagcattatataaaccgtgaacaagcatgatttatacagaagaaaataaagcgagcccccagtattagaccgcggtggtctaatattgaagacgctcgtataacagagattgtataaaaaacatgctctaggtaaacataataaattatagatctgacaatattatattatctgaaaaataagtacagtacattgcatataaaatattgcgtacctgtgtagatatctacgaaattagtagattaattcaaaaaactaatccactaattacccttttctttttacagtctgagcatcaagatcaacaagtagacaagaagccacgtgcatgtaactccttcacgtgccctggtcacgtatacgagtgtatatcctggtttttaccaacaagtgccgtgtacagacatctgttggctaccagtccgactcggtgactcatggacaggatctggacgcacacgcacagtgatatgcatgataatcgatcgatgtcgacttctgtcttccgcgtgctgatgtcctcctgatctctggcagctacatgcaagatggcgggtggctggcgcgccgtcctcctgctgtatatgtctgcatctctcgaaaaccaacgtagggccgaccagtcagggcgtcgcgaggagcactttcccttgtagtcgacgagaagatggttcggagatctcgtcgagtaatatgttgtcggagaatccatctcttgaacccatctcgtcgaaatcctgaagcaccaaaacccccctacctggcgcgccactgtcgacgtttgatgtcgcgattccggtatttgcatagtatggggattgttggtactaggatatatgcgagactgaggtaaaatagatggagacaggatttttatataggttcgagcccttgaattgtcaggtaataaccctacatcctgttggccggagccggtcgttgctctttattcaccataatcataccagtacaatatttggggtagcctatctaactgttgtcgacatggcggtctgaagctctgactcgaagtcgacaacagagtagtcttcctcctcgaatccgtgcccggcaagatcagagatagcgctttcatctctcctgacagtatccggagacaccgtaggagactagctgtgcttatccctgaagtcgatatctggcatcttgtcttggcgtatgttgacttgtatattgatcttgtggtttgatctattgttccgtgtatgttgattgtggtggtcgtgtcccctcttctcctagagggccttgtatttatacccataggtgtcccatttccaagtagaactagggaaaccaaaatggatacaatccgagtagtccttgtcgtttccatgtagaactctggttgtctttccttatccaaaactgcctccatatctgaagtcagtttccgtataagacatggtgtgtggtgggtcctgccgagatttagtcaactactattaggtatatggtatccataaccctgacatcttggtaatcctgttagagacttagaccagagaaaaaaagaggaatctggaggtcaccgtcggaaaacgctgcgaacaacaggggcggcagatggggtgggagctgcctagatctgcgccgacggcaacggccgaagaagaagaggagaaaacgacggttagggagagagccatcctccattcgcgtgatggtgacggccaggtagggagccgcctcaatagggctgctacggtggccgaagaaggagagaatacgatggcagctaggaagggagtcaccttgatctgggccacgcgatggtcgacgaaggagaggaggcgatggagtcgcctcaatttgcgccgcctggatcccgccgtgatggtcgggaaggagcctcgatccgctccgatctcgtcaccctcggcctatgagcttgtcgaccgatagtggtccgttttgcgggaagagcgaagggagaggcggcaccactggtggaaaaaatgaagagggagagaggcggagaagagcaccaacagtgggggattccgtgaggagagcgagcaaggatgggtaaggacaatgaaagtgagaggctcacagtagaactaccaggagtatagggtttatatgtgtttttttattgttatagggtgtgaagtataaaagttttagttatctgaaaataaaaaaattagcagaggctgacatgtaagactgtaggagctaaaataaaaaaccactttacaatagtttccattgtaggggagaattttcactatatgccactcaattcgcagcactatcagattttgccactcagttcgtcacactttcagaatataccatggaggatgcaaattgtttcattccgtaccactccgtccatccaatgtggcatccgtcaatcggtccatgcaagcgccatcgttcgtccatcgggcggggagcagcttgtcggtcctccccgcgtgcgccgccagccgctgagttccttcctgcacgcggcgtcggctgccgtcgaagtggacaaagaaggagtcggatttcccgcgctgccgacgagggcattcatctcctccggcgcgcactcgccgctccggccgcgcagcacgcacccaacggccccatccctgtgtcactagcaccctcctcgtccccatatcgcgtcgcctctgaccatggtcacgagcaagaacaacatgctcacaagcaagaacaccccatgaacgctatgaagtaatgtgtgcatgctcgctgataatgtccaggatgttgaggccatgcattggagaagcgaccgacgcggctggacgactggacctcgtcggccagcacgctgcgtgtgaggggaccccgccggccaatgccgtgcgcgaggagtaactcgtcgatggcggccgaacatcccaatgagcccatcgggagtacctcggtagctggcggttctcgatggcgaccggatgcgtacgctgggcaagacatcgactgctgatggcttacgcgaggaggagctcgccgacggcggccacccatggaggacctcggcggccggctgcgctcgacggcagccagatacgcgtgtgtacgtccttgctggccggcggagcgctgggaggacctcgtcggccgatgggacgagcgagctgctccccgcccgatggacgaacgacagcgcttgcacggaccaattgacgggtgcggcatcggatggacggagtgtcacggaataaaacaattcgcgtctctggtggtatgttctgaaggtgttacgaattaagtggcaacagctgaaagtgctgcgaataggatgacatatactgaaaattctactacgggtggtgtacgagtcgtggaatatagaatatgccagtatgtacggtaaagctccatatacgataagaaaatcggcatgaggttatggaaataattcttatgggcaagtacatagtagagtactactcgaaaaggattgagactagatataccatatcgtgcaacattcacatggatgatagaacgctttcagaagcataagaacttaacatttgccttctgcatcactacgttcagtcaaaaatttatgaacattgctgcgtatttcatggaagcttagcaagtaggtagtgattcgattttggcacaataaacaacctttttgttcctacgctaatgcaaatgcaagaacaaacagcacctttgtccgacccgtcctcctgctccaggcgccagagcacgaggcggccgtgggcgtcggcctgctcgagaagaggcaccaccatgtcgaacaacccggcggtctctacgatgtggagcacccggagcctccgggacgcgtcctcctcattggcgtcgagggagaagagcgccatggtgcccgcgcggtcctgccgctcctcaccctgctcctgcagcgtacgtgtaggtggtggcggcgaggacgtggcggaaggggtggtgcgggcagatccaccgcgtcagcattgccgcccaagtagcacgaccccaaatccatccctccaacgacccctcgccttcccgcacgacgcatctctcggtggcgatagcgccaggagggcatcgtcattgggagaagccattgttgcctgcctcggcgagaaggagaggagagacgcggggagaagcacgcgagggaagattgggagctcgctctccctcaaatccaccgagcgaagaaaacggggaagagaactccaaaacattccaccgagcaaataaaacaagaaagggaactctaaaacttttgtggatatgttggatccgaatttttcaaaaaaaaaatccctcaaatttaattttgggaagaaagtaggatcattggtgatgctcttagtgagatggcaaagaatacacttttcacatgccatacagcaagcatataggttgcttcatgtgagtgatggagggtttgaaaatgttgtgtgcgcaaagagtgactaaaataattactatcgtgatctaatggaaaaataaataaataatgcagatgctcaaatgtttgtggcccaactacgtagaaagaaggagatcaattcatctttcttccaagattttgaagtggacgaaaatggtaggttggtccgtgtgttttgggcagattccataagtagaaagaattatagtcactttggtgatattgtatccttcgattctacatacaccactgttgatgaaaaaacatacactggcctaggagatctgcttagcttcaatgcaggtccaaatcttggtgaggtgcgggtgtgccagtcagtttgatcctgcaactgacaagatatgtaaatagtagatcaaatagacgatcggctgacaagccaatgaagtaattccagccgatagcaatagggtttcgagcaatcggctataattcggatgtggagtctgacactatatgtaaataatgatataaaaacaatcggctgatgatgataaataataatatgatccagtagaaaccaatcggctaacaatgatatgatagataagcatcgatctgaaggttaaagcatatatcgactgaagtttcgatgtcataaaatccacaagattagacaaacagtaaaatctttgttgtgatcggctaaatccaatatgtatgcaatccttgtaagccgatgcaacatctagataactcatcagctgaagccccgatgaaatccttattggcaatcaagaagcaggctagagaatatggttctaaacacaacttagtagatcaaacttaactgatgcagcactaagtataaaaagaaatataatatctagacaatcaagccctggactgatttttagggtggtagatgccttagctaatctaatatagtaaaacaatttagccgataccgacaaaaaccctaaagcgaaaggcaaccgatagagctaaattgagatactaagacaagattaactaagacacatgataaataggaaggcaaatatattaatcaaactggagcaatccaagaggtcaaatgtactgatgcagccttgagcaacaccgacgtagacgatacaattgcccgagccggcgaaacattggacttaccccttcgccggagatcggaaagcgatgcagccccgcgtcaggtgccaaatcccgctggacgatgaaataaagtagaaaaggtaaaaggtggcgatgcactgaaatgtattgatcatggagatagattacaacgaccccgggtgtacatatttatacccatgggtagatactatttcttataggacaagaaagaaactttcctaaagataaaaagaaaacataaagtccttatgggacactaaacacactttcctaaaggtaaaaggaaactaacaaatactggctaattaatagataaactgccatgccgcatactccttgaacacggtcacttctagataagcttcctttaacagattaatttccttaacggaatatagcaggaatccgactattggagacgtgataattttcttaggggcttaccaaatttcattgttaacaaccactaaccaatacgacataatttttgctccatttattggagttaatcgtcatatgcaaagtgtgttctatggtgttacgtaatgagaagatcgagtcttacatttggttgtttaagacctttctaagagcaatgggagagaaatcacctagacttatcctaaacaataaagatgctagcatgaaaactgctactattcaagtcattcggaacacggttcataggttgtgcatgtgacatatcatggaaaagatgccgaacaagattggatcgcggtggagagagaattgtaatttaagagaaagtatgagtcatgtatttagcaatcagaaacacctgaggagtttgaatcacaatggcattctgtaattttcaaattcaacttggaggacaatgagtagttgtcaaataggtgcgatattcgtgtatcatggatactggcctacttcatggacatatctctggcaggtattcttagaaccacttcaagatcaaaaagcaaatttattttttaaccgtttcattcatcgtaagcttgttttcgttgagttttggcttagatttgtcacatcattggaatgccaacgtcatgaagacttaaaggcagacaacacaagcattcatacaacatacaaatctgtaacaccttgctagaagagtttttacacatgaggtttttgagaaagtccaagaagagtttgtagcaactagagacctttgttgtgttaaagacatgacacaaaatgatcgaataaaaattgtgaccttcagcgaggtgaaaatcatattattcaagtcatgagaggtgaaaatcaaaatgagctaccaaatgcatacattgtgaagagatgagagaaaagagtgaaaaggtaaatataagcataatattcaatgttctattttttaaaacaattccaattgtttgaccaccatgttattatagagggagtgtttatgatgaccaaggtaaccttctataagaaaaaactattgactccatagatatggcaatgagagtcagctgcacacgcaacaagtttgaagatctcattcaaaaggccaagcactcagtagaaggcattgactacttaacaacaagtgtgttcgaccttgaggcacctttggaccaaatggtcgctggtggcaaacaaactagttagcaagagtttgagtcttttctaggttgtaacatccaccaactgattgatattcatccaccaactgattactgatattcattaaggggaacaagtaagagaataagaagaagcaaggaaaataataatcagagaggtactacaagtaagaagcaaggtgacaaggaactaacaccatgcgtgtgcaagattttcaagaaaatggtgttttatgatagccacaactgtccaagtaaatcagaactaggtattgatactattaacttctctctatttttttctctaagagaatgacatgacttgcaaaattatttgggtaataatcttttcaggggtaacagaaaaagcacaatgagagatggttgcagcgggatatggaaactactgaaaaagaatgtagacgctaccagtagcactttagttgattagcgctaatgtgcttgccttgtttttattcctgacgtgctccagcctgtagaacatgtatgttattggtgatagttagtgctgattctattttagtgctgccttgggagagctagatgtgactcaactcatgtttaatgagcttgtatgcatgtaggggtatactagcacaatgtgacctctcaatagccaaaacattaacaatttgtatccaatgactctaaacctccaacgtcaattaaacagaaaccggaatgagcacatgtatctcatacttttattcgattagaatatgttcaaactttattgctatataaattaaaagtgtgttttatgtatacactgttgttctctctatatgtgatttttattatatttgtatattaatttgtttcttattcaggagctcaaggtttatcgtgaagtaccatactctttggcgcaccagaacgagacaattaatgagctgaacctagtggtcttgtccgagatcaatgccactgcttgtctatgctaagatgtcctacacaagctcttaatagtttggaggttgcaatctcgatagcccagaagaatgtcaagcttcctgggggagactcttacctatgccacagttctttaacaaatacccagctcagccaaacgagagagatcaaatttttaccatggattctaagttatgtgaataaatgtactaggtcagaattgttctcgtcggaagtagaacagctcactaccaggaccagcttacactcaccacttgcactcctagtggccttaacccctccttccttctgctaatcggcaattgcaatatgcatttccacaagtattcattctggcagttcagttatggccaaaaatctaagaatcccaagtttttattgtacaaatacgctcgtatgaatcataaggtgaatgaaactgaagtgcgtgatgactaaacaacaaactactgaagttgcagaccaactagtgcatgacatacacaattttaaagaacttcatgaacaaaaaagcctgacacgatgcgttgagacttatttgtttacgataaatcttcgtcatcaaaatgaggctcatacttgtccaacagaataaaaaaattaactagggtcagtagctatgattacaaccatgacttatctaaccagcactaactggttccaggcataagagcaactacttaacttcagcgacatagtgctaaacaaaaggagactacagggacacaagcaacaccaacagactaaaaagtaaagactattaggtagcaacatcattctctaaaagagtcaactaaatacctaattcaaatgcaccatatgatgatctaataaagaataaaagtgaaagaaattgttacatagtatacatatagtttatttaattgataaacaacagaatattggttttcctaacaatgatctaactataatgacgaccaccaagaaatgaaattgtaagtgaagaagcaaaacaattgttagtgttgttgaaacgacaatagcttcacgtcgaaggacgtgattctctcagtgggatgattgaacagtagaaacaatgttttaattgatgaatttttttggatctccccattacatggccctagggggctatttatagtcttagtataggctcattccttctaaggtttagtatgtaaaggggaatttacatggatacccttatgatatagacattagtgagggcatgcagtgtccattctagctatgggccctcaggtgggctccttgggccagcccacaggtggcgaacggccttcctaggtcgcaacgctccttaagccctttgtcaaaggtatcttaccttcgggcaaactccttctgcttcgtctcgtggctttgcccgaagtggagacatggcgacggggtcgcggacttggtggcgaatcctatggccttcgtcctttggcttcatccccactggttcgccttatggcttcgcctccaggcgaaaacctctaacttagtcgtcgtcttgtagatccgatggtttcggcaggtccagtcgaaggccctcgtgacatgcctccaacagtttgtaactataaatgaccacaaaattgaatttcttaccaatcatgaaaaactagctaataaacaatgtcacaactatcatgaatgatgcatctaacatgtacctatgttctggcttgcaccagctagaagattcaatcctcgaacttgtatacacaggagttgcatgaaaatatgggaattatgggcctgttcagattatagccaaaataaaccttaccaagttttggcaatgccaaaattttggcaagacggcaatattgccaaaattttggcaagatttcttatgtattgaccaaatttggcaacaaactaaacgtagacatttttttggtaactttgccaaaaaaatggtatggttgaaaatcgcatcaaagtgaacagcccctataatacaaaaatgtcaaaataggtgtaaaacatgacaaaaaaaagagtgacttttcatactgctaaaagcaccagagcaggaataatattattaaaaactcaatttcgaacaaaacgccaccaagtcgactccagtcagtatttgttcagtcaatctatgcaagaaaatgaccagtcccatacatttcggttggtaaagcaacaaaccaatggtcaatacataaattcgttctagaatgcaagctatcagttctgatatgattgaaggagcaacctgaacttgccatatatatgtctaaaattcaatactaaagccactggaattgaaaccatttgatgcactgatgagggagttaggtcccgatcttccaacaggtattaataaatagtcaatttgggcgaagttgcgacacaactcgatccagtttccgaacgaacacgctactgagccccgcaattgcagcaccacatgtcctctggttatcaaccgtgccgaaacccggttgacctcgccgagaaggctaatccctgcatgcgaatcgaagaatacaagcaagaacaagatagattgcaacacaattgcatatgaatgattaagcgctcgaatttggggttctacaaaccaatctagcggcgaactgttcttgacagattaatctaagcaaaacccaactttaaacgataacggctactgaataaatatgattagggatgtcctagggtttccctagggcgcacacccccttaggctaagcccacaacacaatttaaagccccaaaacccaaattagattcggactggatgagatacatggcttgttttgcagatttccggcagcttggcaggaattttgatgtgggaccaaaaccatctaaaagtagactccataagcttttcaacaagtactcatgggcccctaaattccttctagatcagcagctaggtctgtttgaagttgatgctatcaggaggccaaatccgaatccaaaacgcgcacaactttatctcttgtcttctatggaccaaaagtggtgtggtgatatgaaagaagacatggaggtcttggtttggtccccaaacaacttcttcaatcatccatgtatttcgtacgctcggtctcttttctttcacccaagcaagtacctctgcaaacgaaaaaacacaaaactcattatgtagcaacgtttgtttaaatatataacaagtaaatctaatgtagaacatatgcacctttggttgattaataaataagatagtcatggttatatccgagctagttgtgtccttatcatgcacatgcacttcaggaacaaataaatgaaaaaactaatagtatactcaacagttctaatcccagtgggcaaatatatgaaaatagaacaaaggaatttaacatagcagaatctaaaagcagggtcagtcacatatgaataataacagacatgaaattcaaagaggcatttttcatcatcattatgggactaagcagggcaaaagaataaaggaacaaccgacacacaaggacatcacacggcatccttaaaatagacagctctagaacatgacattaacatagaacattcaccagagaataaatctgcacatatttaacaatgagagagttactacccaaacggaattcattcatagcatataacatgtgtcccacatagcctccacattgtaccacattaacagataaggattagtagatagtcattaaaatggagatataacgaatagagacaaacataggtggtgtaactgcaagatagtaggtcacagagaggtataagataagctagaaacatagtttgctgatggacacagtaactgacagctaatacatattgatcgatcgatagataaatagatagataggggctaggctaggtgaatcatccatccacctaaggtcagtcagtcttgtccaccatgagacttgaggctgtgatcgtagcgaacccatacagttggggccattgaagtcatcccagtctgcagtctcgatgccgctccagtcgatcttggcccaaacttccttgaactgagcctcaagctccgcctgaatagtgaagtaggtctcgtcaaccatgtaactcaacttcgcggcggacctcatcctgtaattcctcgaggctgtcgtccgactcccggtcctcaggatgtaatcaaggtacccctctcaccgactccatatccatctgctgcttcggcggtcgtcttctctccttcgtcgaaagttgacgctcccatcggcaccacagagacgtccgaggcggccgcaatactgcttctcacacacttcttgatgattatcaagtgggacgctagctgctgacgttcaacgtcgtcatctccacctgtttcttgctccctcacttctatccctcctatagatttatatataggctgccactgtgttcagatagggatcgctgatcggagtcggagtcggcttcgactctgactcgagattcgggacaggatgcacggaaatcttttttaactctagaacacaaagaacacaaagacgtatttgtccttctaagttgactctagagtacaaatatgtatttacccttctaagttgttagacatacaagtgcatcaattggttataatatggcaattatttgaagttggttgatatgcacatgtatatatagctaaaagaatttgtttgaggaacatatatgtgtgatgatggtggttaaaaatcatgcgactgactaagaattcataccttcaatagctagattaatattgaaatgctatgcatacatgtacatgtcaatcaacttcaaataactgccatattacaaccaattggtacaattacatatctaacaagttagaagggcaaatacggtctttatactctagagttaacagtcaatgcatggccaacatacgggagtggcatgagagtttacgcgaatttgagctagtggcatataagtaattctctctgcataaatatgtgaacatggaaaatgcaataatacaataacaaatgattaaaactagataaaattaacacatttaacaggattaggcgtttggatgacgcacagaaaatgcccctgctgcttcacatcacacgcttctttctcttctctgctcagacatgaccattgtgaaggcaatggaataaaaccaggagaggtacagataacactatggatttttgtccggatgaatggaataatgcaacagaatgaaaggagattgaatagcacaagcaacaactgcgaacattttactttcacccgactgctcgcacgaaggccgcctggaagaaatgcagggatccaccatcaaggaaagcactggactcagcaccaggcgtctgtccacacaaaatcatagcaggcacataaaaaatagcaccattaacttttcagcacaaagaaagaaagtataccttatatgttagagcaatttacggtccttgagcaggtaacaataatttagtgtaaatttggtaccttatagtaactcatactacctaagtactaagaagtactaaatttacagtaaaacaagtgataccttatggtaccttcttaaggaccgtaaaattgctctatatggtatgtttgttggcttcaaccattttaggccattcacaatgcgtcacacaaatctgaggagcctcgaatggcacataggctagagcataggctagagctacaggtccaacatttgggttctatagtgcaagtgactttagtttgtatttcagcccctaacactttttgtttcagttctctttttttaatttatatgtaggtccaaaatttacaattaacaccctcaaatctagaaaaattatttaaaccccctctcccctctctctcccttatcttttaccccttatattgttccttcctcatctagctcgttgtagcgcacctcccctccatctccagctgccttgcgcctctccctcctcctcgggcacctccctccccccccttccgg

SEQ ID NO: 24117 - DNA, 38089 bp, Oryza sativa
agtcggcgacggcttgatgctggccactccgtgcccctcgtcgccagatccggcataagggtcgccggatctggccttaggcggcagcgggacgacggcaaggacggtggcagtcgatgacggcggggcggcgacggtcgacgatgatggcggggacggcgacaagaggaccgttgcttcgcgttttaggacatggtctctccaacgcggtgccgcccctctcctcgcgtgtcacggggcttcctcctggcaagttctgacgaggctcggttggccaaatgatgctctgcgtacttcgcagggactcgctccacgtcgagttggctcggaatctccgcgctggcgaggtgaggccgaacaccacctcaccgcattgtgaatggccttggagagaccgtagtttttggtgcacctttgatgtagcaatagcttagcttgttgattttgaaagcttttgtctcagtggatgcatgacacccaatttcagagaaaatagttaaaactagctcattctgtcaattctacgtgcaatacactatgaagttcaaatagaacgaactgaagtatgcgtctattttgtttttaactatatttggtttctcttaaagttcaagaaaattcagatcaaaaggagagaaacaagtaggttttgctagcaaactctgaactgaagcagtttagtgcttgcttaaatagctaaaatcatgcatgacgcatagttaaatctggaccatatctttttgctgatggttggatgtttcgatactgccaaaattacagtcactgcacctgatccgaatcctcgagaatgttaattgatttttctagacgagtttgcagatagaccataactattcccgtgcatagtttaaggaccgcatacgaagacgagcctcttaacaagtctgcactattttctcatgcggacctcctaagagacccacatgcgaaaatacccctctcttcactcttttttctctcctttcctctccctctcccgttcactccccacactccctctccctccccactcctcaccctccctctccaactctcccactcctctccacactctctcccatccacactccctcacgacgacgatgctcttgggctaaggcggcagcagtaggcttgggcaacggcaggcgagggcgagagggatcccagcgacggcgacgacggaaggggtggatccagtcaccgctcccccccccccacgcatgtggatccaccggcggtggagatgggattggcggatccgatggtggcagcaacgggaggacaatgacaacggtgctgccaccggcagtgatgacgagaggatgaagatgatgacgacggtgacgagaggattcttgggttagggttagggtttcagagtaggttttcaatttttggaattttctattgcattttttcttttcgctccggaggagttaagtgtccgcatgtgaacaaaaatcgatttttgcatgcgggtgacatgtgatttctctatcgcatgcaaaatatgtttttcgtagacaactggatgcaggcgggtcaccggaaaaaatcgaatatatagtagtgactttccccatataatcatttatttcagcagcaagcagtttttgttgctgtcatgactcatgaaccttttttttttgccaaacactactatagaaaccttaattggtgcggttaggaaccccacaaaggtggcagatttgccaaccgacatatagcaggcggcactaatgtggaggggaaatagatgcttgtttaggaaccgacacatttgaggttctacgaataaaataaaacactagctcgccatcacccctgaaatcatccccaccacccagagtccacaaagaagaccaagttcatccacaaaaatccagtagaaacaaaatagcattaacatttgcatgctcatccgcaagttaacacatcgtatacaaccaatatcgacattcagacacaatcagcattggcacatgcacaagaaaattcccaatgcccaaactcaccgcaaactgggaacttcgctgttgcccgcaccatccgccgtcggaggccatggtgggcagatctggccacacccgagcttgggcaactgcatctgacagccgccgctcgtgagggagagggcactgctgccgtcggcgctcggggtggggaggagagggaggaaagggtcgcgagagagagagagagataagagagtcgcgcaagactgagaggaggaagagagtcgtgcaagagagagggagtggcatgtgctgcttaccctatccacaagtgcgacgttgtcgtgagtgttaaggacaacgcggtcggctcgtctctgatttttatacaggtgtcggttttttaattaaacgagattttagatgttccgtcacatgtagtgcccgctctctatgtatcttctgcagtggtgtcaatcaaatcaccaatttgaacggcacactagtaccagaacacattttaaccatggaaaaccacaaagagaaaatcattctgacgggcaagcatattagagagacaacaaccgatgatggtaaaacaatacgcagatagagtcattcagttctttatattaaggaacataaacgctacttaaacatactcccatccagactgcagtcaacagatacgcataacgacatactattacatacctaactagtaatacctatgctacgcaacatttcacaccccaaaggcttaaatataactcaaacggcagggttttttcttgccaaaggaagtagtaaatttagtcaggcggttaatcccacattacgtatatgacaatcaagatatattagcaaaatatatgaatgtgatatcaatatgtaacatctttttcatgttgggcttagcatagtttgttataaccaggggattaaatcaaaagaggaaaagaattagaacttgtaaaagccaaatgcactggtagaggaacaaaacttagtgattctgcgtagtaaaataaaaataataatgaagccatggttcttatcaacataatcacaattaaataatatttaaatataccatgtataatatattcaaagcttgctaaccaagaatatctaagacctcgacttctccttgaatagaacttgacaacctcgaatcggacaccacgaatatctcccacagcatggcccttatgcccaaatccagaaatcaacacctcatcccagataatgagcatgaagaaataagtataggtgacagagcaagcattttctaataaagtaacaggattaagaatgtacattttcaattcctcaatgatgttcaggaaactgtgctagcatgcatggccagaagtcatcaaaattcaggattaaaatagtaactggtctcaataattagaaatggactcgtttatcatggaatcagttgggcgtactgaattacaattatgatggtaacatgcttagctaccctgggcaacttgctaggtgaatcactacctgataaccatatgtcttctgaatggtagcaatcttttgaacaaagccaaatatattaaacaaattctgtaggtgcgagaacagcataaattatctactactgtaaataatctatattacgtacagtgtaatcatctattaatttgccgatgattcatgatccagttactccaccaagaaaaacgtttaatcaaacaaaaatatattggttcttatgattcatgtttcagttaatccaccaagaaaaatgccgcattgaaagaattgatgaatatagtcaggaattattctctaggtaaggagcatcaatgttgttgtcactggaaaatgcttaaactgatcgcacaggaatgggctgaaggagaaagtaccttgatttccttgaacatggcctttgtagcatatgataaactcgtcagttatccggatgaatggaataatgcaacagaatgaaaggagattgaatagcgcaagcagcaactgcgacgaacattttactttcacctgactactcgcacgaaggctgcctggaagaaatgcagggagcttcctcaattgatccaccatcaaggaaaagcactagaaaaatcattgcaggcacataaaaagtagcaccattaacttttcagcacaaaattatatagcctcgatatctcaatttttacagctcatccatagcagaaattttgtttatgctaatcttattatctaaagctggcggttatcgccgcaagctaattggttcattttaccccatttaattttacgccacgtgtccatgaagcattcggcaaaccatcgagtgtctcgtgcatgtattgctgtcttcgtgcggcagaaaacaaaaataacagcagcttctggatgtcgtctcacctcacgtccctgctatttgggatatactcctacaaaagaattcgtataacatattacctacattataattagtaatttggctctatattttatatatggagtgcatatatagtattaagctatctatctaaaatactgtgtctagcatatatgtctaccaattaatagacgtacgtatcctctctcctctcactcacctccacatcaaaaaatatactatgtggcattctctcctacacggtgatcctaccattattcatgcccttagtgctaagtgtgattggttaaaactggaaacatgtaacttaaccatgttaatatcctatattatagaaaagattaaacaatattttaacaaaaggtaaaacaatcgatagcaagaaataaaaaatattttattttaattttgctaattctaacagcttatatacaaaattttaaaattacaaacgtgagactaaattcaccgttttgtttgcgtatactgtcacgctataattctccgtaggaattatacaaacataaaaccaagtacatattgaatgatattttttcaatatatgatatttacatagattttattagtattaaagtaattactctaaaaggtatacatgtgccctaggggaaaaaatcacaggataaattatccagcgcgctaataggcgcgccgattttctagtataatgaaaaatatggacatgctttgttgttcaaagggcataaaagatttttactgccaaactatgaaaaggtttctattatgaactttatttaaatttgaagcatctaaactctatatatgtatacaggcagaaaaatgcactcaaattattcttgatcagaaagcatcacgtgagcaatagctctgctaaatatgccatcttactcgtaaacaactgaactgggggaggagcggcagcaccagccaagtggcgacggcaacaggtggtgacggcagggcagtgcgtagggaccttcagtaacctgtggcaaccaccacagatctcgtgcgtttgcagaggggatcgtgcatggaggaagttgatgatggcggcaggggcactgatttttactgaaaatttatgtctcttttaacaatttttgctgatcatctctcttgtgtataccagatctgctgcctagacagttagttattcatcttggtgcatctggccggatccttatattggtttaattaaaaaaactttcaggagaacatagggaacctatcagggttttttcatcatccgtgcatactgacgttgtcacgatcagagcaaacctcttgctattgtgcggtttgcatttatgagatataaacatgtatcaacacaatcaatgcagactaaattggagggtttttttgttgagaaattcctcatagaaattagttgacctaacacacttggtggcggccacttagaaccatcctaccatcaacaacaaaatgtttgacgaacagcattggcggttgtttatgcgggactcaatcgaacatatcatgtgcatgggcaaaatagtttgctcgttcatcgtagtcaaaatcaaatagtaggcaaaagaaacataatgaaccgggaggaagaagaaactgaaaccgaacagcagaagcaaacttgccgtagagctatggagaccggatgtgagggccggaggtgatagggatgtctgggtgaggcggcacgacagtgaaccgatgaagtcctggcggagagcggacggcgatgggatcgacgacaacttcatgcggtgcgacggagaccggcggggatggcactaggacgagttggcgcggtgagcagaggaggcagatggggcgaatcgggcaatgtgcggaggaatgttccgaaggaaaaggggatgcgatcgatttgcgtgtgcagaaggaaatcgacaatcaagcaatcacgtgtgtgattttccattagtgaccccgtgtgcgcgatttgagagagaggaggggagagggggactgtgggagccgatttttggtcgttggatttgatgaataaggtttctataggactgcagttgctcaaatagattaaacatatcccaagcttatggataagagattactaattttttttagagaagagtatttttctacctggcatctacatccaaccggatatgtgcaatatttttaaattaggaacttaacttgtcaaatagggaacttagtcctcatatggagattagaactcaggatcttaaggtgctacttaagtcactgcaaccacttaggctatatttcttttcacatcagagattattgataacaaacagaacctggtaatttattacgcgtccaccaattaataaaccctaattaaccaaacttaatctagaatatgtagatagggtattaataaaccctaattaaccaaacttaatctagaatacgtagatagggtagtataatgatcttctctccgcgcatgcaggcgcggttgccggcagcccgagagctcccgtccgtacgccgccggtggtcacgccctcagcggcgcggccgtgtatttgcctgcgcgacagtgacgttgcggccgccgatgtcctggccgttcatgccctggatggcggcgttcaccgactcgctgtcctcgaagttgacgaacccgaacccgcgtgacctccccatcacactgtcccaagcgatctgcaaccaaaaagccatcagataataatagatcatctactagttcactaagatttcacgattagttgtagatctgcaaatttgaaaaaacgaacagtgcatagcgatcgatcaaccaagtagtgtgtgtgtggagatcaatttgtgaagggatttgtgaacagatcgatggaatggatagccaatcaatataaaaaagatcaacgaaaacccagccaagatttacaaaaaactatatatccactgtagaggcgctaaacttgggatgaacaggcgagacaaaccgatcggaacgctcgatcgacagttcgacacacacacaaaaaaaagaaaagaaatccgtcaaacttagcgaagaacaaacgacaacacaacccacccggaacagaacggaaacggaagcaggagcggcgaggaaagggttggatacagcggagcaagagcaaacccacctcggcgctgatggcgccgtaattggcgaaggagtccttgagggagcggtcgttggcggagaacggcaggttgccgacgtacacgcggtactccagcggggagcggtccttgtagtcggagtccctccacggcgccgccatatccttcccttgccttcctctctaaaccctaattaactaaaccttcgagagagagaagctagagagcttggacttgacgaaacacgacaatgacaatcccaggtctatatagatctattctcatgggctcttgggtttccgctaccgtccggccgtccgggccgcgcatgccagatgaagaataagttcattttaggtctcctaactttacagtgactttgattttgattcttgaaacgaaataacagatacaaggatcccttaacttagcatagtactccaatgcacccgctcagagctccgtgcttcagcaaatacgttcgatgttagccgcattttattacgttgtaagacgttttgactttggtaaaactcaaactgttttaactttaacaaagtttatatacaaatatagtaataattataatattaaattagttttatcaaatcaataattaaatatatttttagaataaatttgtcttaggttgaaaatgttactacttttttctacaaatttggtcaaatttaaaacaatttgactttgaacaaagtcaaaacgtcttataacctaaaacggagggagtacctttcatagatcaacatatccagtggccatttttttttcccgagcttagaccctgcttagattggactaaaacttttaagtccctatcacatcggatgtttggacactaattataaatattaaacgtagactattaataaaacacatccataatcttggactaattcgcgagacgaatctattgagtctaattaatccatgattagcctatgtgatgctacaataaacattctctaattatggattaattaagcttaaaaaatttgtcttgcgaattagctttcatttatgtaattagttttgtaagtagtctatatttaatactctaaattagtgtctaaatacaaggactaaagttaagtccctgatccaaacaccacctaagacttacataaaccggcaatgagatcgagggcctatttgagggagcttctagcagctgcagcttctcttagaatctccagttgccagaagctctccaaacagtccagctttttacctagattttgagaatatgtagttatagaatctggaaaatgaactagaagccataagctgggtttcccagcttctccagattctcaacatctcagaatcttaagctccccaaacatgccccaaattaattttaggcttctaccattttttttcttgattttagttctagacttttactgctaacgataaaaaaaagagaagacaatgtaatacagtagttgttttgcttctcaaacttgccataaccccctcccccccccccaaaggtagataatgaaggtttagagggaaaaaaaaacttactacaaatgttttcgtaccgtttagactgctaataattggaacaaaccctcaacgttcatgcgtgcaacctcctcacttttaaggtcttgtttagttagagaaaataaaatttttggatgtcatatcagaagtttgaccggatgttagtaagggttttcggacacgaatgaaaaatttaatttcataactcgcttagaaaccacgagacaaatttattaagcctaattaatctgtcactagcatatatgggttattataacatttatggctaatcatatactaattaggcttgagatttatctcacgatttctatataaactctgcaattagtttttctttttatcttcttatttgccatcgataacacatacagtcggcatgagggtcacatgcaggccacagacgggcagacgaacagagattcgattctgcaggaggaagccaacctcctgggccttctggcaaaaagacgacgccgagctcggtgtgttggcacatctgcgtttgtaattgaaaacgtacatatgtcctccaatccttatccaacctgacacacagtaactatggagcggtctcaacatctaggggtgggcaaaataagaccgaacgaaaaaaccgaaccgaaaagaccgagaccgaaaccgaaaagaccgagaccgagaaatttgggtagtaattcggtctcagcatgtcaaagaccgaaagttgttcgggtaattcggttattgggatcggttaaccgaattaaccgagaaaaccgaattgtggcctaataggtccaggaggcccaataggcccaatacaccactaaaccctaaagacaacccgtaggctgcatccccatccatccagccatcgcgccaccctcccttccatccccatccccatcgcgccgccctcccttccatcccgcgtgagcacgcctcctccgcctccatcgcgtcgcgctgccgtcgccgcctccattgcaccgcgtcgcgccgcgccgccgcctccacatcgtcggcgccgtctgcgccctccgcctccacgccgcctcgccggtcgcgccgggccaccggattcatcacgccgcaccaccacctccgcccttcgccctccacatcgtcggcgccatgtcagccttcacgctgtctcgccggtcgcgcgggccgccggcagccagatccatcgcgccgcgccgcgccgccacctccgccctccgcctccacatcaccggcgacgtctccgccctccgcctccacgccagtcgcgtgggccgccggccgccggatccatcgggccgcaccgccacctccgccctccgcctccacatcgccggtgtcgtctccacccttcgcctccacgccgcctcgccggtcacgcgggccgccggatccatcagaccatcacgctatgccaccgcctccgccctccgcctcgacatcgccagcgtcgtctccgccctccggctcggctcctccaaattcagtctgaccgagaccgaaaaaaccgagaccgaatttatcggtcttgatttttttggatgaaattcggtcctgacttttcaaaaaccgaattgaccgaaaaaccgaagaccgagatcgaaattttcgggtagaccaaacgcccacccctatcaacatcaacaggttatggacttatggtatccagctgtacattgtacatatctcaggttgtatacgttcctgaataaaatttatttttaagtaatcattattttggagtttataaaagcaagaagaaacaattatatccgtactaaaaatgagatataattgtattgatttttgtattggtatgtacatacggagtagtatgtaattagtgaaaaacaaacttattttatttcggaaccgagggagtaaagctgccatcgtgagttcgacagcgaatcttccatatcgtcatgacgttcttcttttgcatgccaagccaatcagctcaccaatttgacgggcacactagtagtgccagtacacattttgaccatgggtccatggcatcgcaaaccgcaaagcaacaaccactctgacgtggcagcagatagagtcattcttaacataaacgctagccatcaaacttacacacactcaggtacgtgctgcagagtgcagactgcaattgatgattacaagcataaacacacacctaattaaacaacatatcctaataaggccctaagcttgcatatccaggagattaccaacagagactgattaattaattaagcatccaccgcttaaaccctaattaaccaaactaccaacacgacgaatgactaaaactagctagtagatctgcagcatagatagcttagggtaggtaggtaggtagagtcttctccgctcattcaggtcgacctcctcgccgccggccggccgtccgccggcggcgcggtcacgccctccagcggcgggggcgcatctgggcccgcgcgacggtgaccttgcggccgccgatgtcctggccgttcatgccgtggatggcggcgttcaccgactcgttgtcctcgaagttgacgaacccgaacccgcgtggcctccccatctcactgtcccaagcgatctgcaacccaaaacaattaacacaccaaatcaccagatcaattcataaagatttcacaattagttgcagatttacaaggacggacggccaaaacgttaaaacgtgcatatataatacagtgatgaaccaaaacagatggatagcaaatacacccatcaatataaaagaaatcaatggaaacccaacccccatccaaaatctctacaaagccgacggggaaacaacagcagcacaggtccatcagaaaagcttccaacttaattagcgaagcacaaacgacacaacccaattaaccggaagagaacggaaagggaagcaggagcaagagcaaggcacctcggcactgatggcgccgtagtcggcgaagtagtccatgagggtttgctcgtcgacggagtagggcaggttgccgacgtacacgcggtactccagcgaggagcggtccttgtactccgagtcccaccacggcgccgccatagcccttcccttcctttccctctctaaaccctagtaatcaacacctctctaaaccctagtaataacacctaattcttctttggatgccaaacgagagctgaggacttgacgaggtcacgaggaagacgaccggagtgcctgaccaaccgcatatatatgtataggtcctccctgggtttcggctgcgggccgggccgggccgggacgggtgccggacgaatgggttggtcaaaaggcgctttccgcgaaatgggccggtaaaagatcgggaaatgggaaccaagcttcagcaccgatcatgggaggaaaaactttttgtggctgtgtgcctgtgttttttagttggtggtgggagctatgcacacttaaaacggattatctcattaacgggttatctcattaatatcaatatgaatgaggaaaatgtcagaataacttatatagttatgttttaaaaaataaattaatatgatttctgaaagcaatttttttgtatttttttttaaaatgcaatgtttattagtttgcaaacttgtgtgcgaaaaagagaaaaaaaaaagagtctgagaaagtagagggaggaatacaacctatgactctctttctataaaaccgagtatatcgcttcctcgagtattaaaaccggtgtattttcagcggctttaaggagccctactttggcttcgatcacacattgtacaccaactttggtgtggagtgagccactcgtacgtgccaccgatcacgcatagaaatatactgtagcgtgcagacccacatgcaagggcacagactaacccacacatttctgcagaaacccaccatgccttctggcaaagaccacgcgagctcagcttgccgttttggcacatctgcaccgtacgtgaaaaagtaacaacgtgtccaccattcttagggtctgtttggtttacagagacttatttcaagtctctgtcatatcggatgtttagacactaatttagagtattaaacatacactaattacaaaactcattccataatcttagactaattcgcgagacgaatcttttgagtctaattacgccatgattttgacaatgtgatgctacagtaaacttttaataattatgaattaattaggcttaaaaaattcatctcgcggattagctctcatttataaaattagtttttttactagtctatgtttaatactccaaattagagtccaaacatccgatgtgacatgggctaaaaagttttagccccatctaaacacccctttatcctccaacctccaacactttgtactggagcgctcaactactactactcgactcgtgagcgaatctccttcgtacggaacacatcatacggaacacatctctcgtgctccgcttttggcaccacaccttcttcatattgaaagggtctttaattatgttaaaatataagtaaaaatcatcgaataaataaagccatgaagtcgaacttatagttttctaaattcactaaaaaaaattactcgagattggtataaatatgaaatcttaagtctaaacttaatttcgtttgggaggaaagaaagaaagaaaaagacaaatttcactagaatagagaatgtatttcatgcttataactatctctagtaaatttttttatgaatttataaaactttgaaattcggtttctacagattttcacttattggagcgttttcatcgcacgcgggagaagacagcacagcggtgtgctttctatgctgaggaggagtaggcgaaggcctggccagtgccgcactcttaagcaagcagagggagaagggagagagagtgtgtgtgggtgattgaggaaaacatgggagagagagagagagtgtgtagatgtgactatgtgaagggaaaaaagttgggtgagaatgggtctgactgatttttttttataaaaaactactaactgaattgtcatgtaggactaaaactactttgaattgagtcgggaagttatttgtcctatttaaatattcgagtttataggatacttcagtctaatgtggactttttccttttatgtgctttgtgcttcttaattactccctctgtttcatactatgagtcattttgattttttttcttagtcaaacatttctaagtttgactaagtttatatgaaaatatagtaacatctatcacaccaaattagtttcattaaatgtaacactgaatatattttggtacgtttgttttgcgttgagaatgttgcgttgaaaaaagtcagaacgacttataatatgaatatttaattacacataaactatttgtgttaagtgagttctttattagttagtgtttattattatgtttatatatgataaaatggtacaactgaaattataaattacgaaagtagtataaatatgtcaacgaacctaacgaacttaacaaatcacctcgagagtctagccgagctaggcctagctcgttagagttaacaagccgagttgtgttgttaagattacgagccgaggtcattatccacctataatttcatgattaacttcagtacttaaatatttcatcatattaaatcatcgtattaaatgaatttttattaagctattttagatggataaacctaaggtggaaagatgtaattaggaaaaaaaaaggtcaaataaacaatattcaggatgtgacatcttccccccttcctaaccctcatcccctaccttaatttggcgcaaaaaaaacctaacttgtcaggcttcccactcctacgacctaatccttaccttattgggttactggtgatcgtccgagctgaaggagtgcctcacgaattgtggttcaatccaatggtagaggattcgacggaaatccaccacaaatttacgtgtctcgtttaggtaggtaggaaatgttactcccttgtcctaaatataacaacttcttactttcaaaatttattaaaaatattacttcttcccctacatcttcttcttaaccaataagaaacttacaccattaaaaatttctacacactccatcgttttacttatcggtaggacaagcgaaacgtcatatttgcaaaccaaaaataattataaataaaacttttatatacgtgttgttagcgatcagctatacttatctactcttctcaacaaatcataccatttttccatttaatttcaccaactttttagtacatggcaatttaaatggtactaaattcaaaaactaaatttagtacatttgccgcttgcaacgctaggtactgtagagctgcgataatttcactagatacaaaagcttagatttaggggcgtaaagttttagcgtgtcacatcgggtataatatagggtgtcatggagggttcgagcactaataaaaaaactaattacagaatccgtgagtaaaccacgagacgaatttattaagcctaattaatctattattagcaaatgtttactgtagcaccacattgtcaaatcttggagcaattaggcttaaaatattcatttcgtaaattagtcacaacatgtacaattagttatttttaaacctatatttaatatttttatgtgttcaaacgttcaatgtgatagaataaaaaattttaaaatgagatctaaataaggccttgtttagtaacaagaaacacacccctgctcgtggcggacaggcgcgcggtggagtgggtggactcagccatcgatcgccacaaagcaggggggaccacatgcaaggcagagagacggggcaggtcaggtcgtcagagtcgattcttcatttgcagccttgcagcaagccaccaccatgttctgggccgtctggcaaagaccacgcgacctccctgttttggcacgtctgcattttgtacgtgagaaagtaacgctatactaccatatttctcgtgagcgaatccttatgcctacttggttctcaaaaacattatattgaatctttgcgcacatatatagagtattaaaatagataaaaagaaaaactaattacatagtttgcatgtaaatcgtgagataatcttttaagtatcctaattaggccataattagctacaagtgctacagtaaattacatgtgctaataacatattaattaggatcaaaagattagtatcgcgatttccaggcaagttacgaaacttcttccaacatcaagtcaaacgtcccatgtaacacccaaaattttcaccaccaaccaattacatggcacatcgtaaccaccgaagaaaaagcaccaagcaaaaaatcactcgcaccgtcgtacgtgccagccagtagaaacagagagagatcaatagttgatgagacagatagcaaacacgtctttaatttaaagatcatgcatatggtgctgccgactgccgtcgacgacaaaaggattcatatccaggaggttaccaacagagcctgacaattaaccatcccatccatctcttaaaccctagtacattgaccaaactaccaacgagagattaccaacagagcctgataattaaccacccatatctcttattaaacccaaactacgaaggagattaccaacagagcctcattggcatcaatctcttaaaccctactacattaattaaccaaactacgaacacgaacgcgactctgaaactgaaactgatagtagcacaactagtagcagtatctagataggtaggcttgagcgcgtagtcttcacgccggcggctggtccgccggcgccgtgcgctcagcggcgggagcgcggctgggcctcctggacgatgacgttgcggccgccgatgtcctggccgttcatgcccttgatggcgtcgctcgccgacttgctgtcctggaagctcacgaacccgaacccgcgggacctccccgtctcacggtccacagcgatctgcaacccaaaaccagcaacagcaagtcaccaaaccaatctatctatgtattggagtacgtactagctatagttcatgaagattaaagagatatttactgatctgcatatgaaaacgcacaaagatgaaccaagaaatgtgtgtataaattggcccggcgaattgggcaaatattagatgagatcccaagaaagtggcgaatcttccgaactaagaaaagaaaaagacgatgttgggaatatggaaatgggggcacttcagaacagatgtgacggataacgtgtatcaaatcggccaatcaaagctcgggaaagacgaacaaaaatcaacaaaaacgacgcgaaatggcactgatcatagatccatcacagaaaatcgtcaaacctgcagatgaacagaaaagacagaccgaccggaacgggcggaataatggagcaagcgcagacaaatccacacataccgaaaaaaaaaacgtcaagcttagcgacgaacaaccgagacgacccaaccggaacggaagcaggaggagcgaagaagaagggaaggggctatatatatactgacctcggagctgacggcgccgtagttggagaaggagtccttgagggagcgctcgtcggcgcggtacggcaggttgccgacgtacacgcggctctcctgcccttcgagtcggagccggtgcggccattgtagtcgttgtcccaccacggcgcagacatatccttccctttcccttaattccctctcgaaaccccaactcttccctttttcttcggatgcgaaacgagcgagagaggaagtggagagagatgatcttggacgaaaatggagagatgatcccgggtataaataggctgggaatgggatacatatccaacctgatctgatcaccacgtacggcgcaggtagattagagaggtagggccgaatcgatcggcttcttgttttgtgagatatggccgatcagttttggtagcattatcgagttcttgggctgggtcatatgggatgtttgctttgggccgtgaagaatatgtgaggcaaaggattaagttcactttgaatccctcattttgtcgccaagtccaaaattcatctatggactgcaaaaccggatccctcaacttacaaaattagtaacaaggtctcccgttttagctgttttcaacttacaaaattagtaacaaggtctcctgttttagctgacgtggctcttttgactatgttttcgtcccatgtagtattggcgtggcgtttacgtggcaattccatccgggaaaatctgtgggacccaaatgtaagttacacacaaaataataataaatgagatattagggggggtgagaataggggtggataggctcggctcggtctagctcgttaggataacgagctggctcggctcggctcgtttgaaagctcgagccagctcgttagactcgtgagccaatccaacaagacagcaagctccggaggaggggacatgtgagtgcgccttctccggcgatggcggtggcggcggctggcagcgacggcggcggcggccctagcgccggctggggaagtgcggctggcggcggcggcggcggccctagcgcctactggggaagtgcggctggcagcggcggcggctagggaggtgtgacggcaacggcggctctagcggcttgcagcggcggcggcggcccaagcgcctggcgaccacgtcggcgcggtctcgtacggcggagcgattccgatgtggatgtgcggtctcgactctcgtctcgtactctcgtgtggtgcggctgccgccaggactaggagtgaccaagccaggactagggttttgcttttgctgttgtattgggcttgggcctttgctattgtattgggctgggcctttacggttgtctgattaagtcctggctcgttaaggctcgcgagccagctcgagctggctcgttatccctaacgagctaaaatgccagctcggctcgttagcaaaatcaaacgagccgagccgagtcgagcctgtcacaagtcgagcgagctaatccacccctaggtgagaatctacatggaatggaaaaggccaaccaatgccacgcatagctatcatctttttcaatggaggaataatatttggtccactaggaagtgatagaaaaagccaaaacccccacaagaacgtgaataaatgacacaagcttagtctgtccagttcacaccaaaggaatctatgcaaagatcaataatttcttcttattttaaatgaatatactatccgctttaaaatataagtatttctacaacataaactttatagtacatatcaaattacaagcatttctaaacactcattttagtgcgtgtaaatccaagcattttcaatcaattggaagtttccaaatggaacctaagggttcattccgaacgctacattttcggaacatagggataggaaaatgttgtactcgagtgccttggcacctttaaattctattgaaaaaaaacacagaaaatacaagaataaccattttaatggagacaaagaaaactgtagaaatcagaaaagagcgatagtcatattaaaaatcatccaaaattcatatgatttgaggcaatcttctaaatttgaaaggaatttgggagatttacttccttgtttaaaggacaatatgaattctttccacacgaatccaattctttaaaattcctttgttttcttgactaggggtgacaatgggacaggctggggtcgggttggataggaatgtcgccctcgctccatgcattctcctctgcccccagcgccgcagagctaactgggtggaaaatgtcacccatcatgtcctcgcagttcaccccggtgcttgagggtgaattagcgaaattggctgctacgacggcttggggccagcaacgactagtcgattactgaaggcgcaaatgataggtcgacggttggaaagggcttcgatgatggctaggggcggtgataatgggtcaatggttggggatgaccgggtggggatttgacgatgaagacagcatttgtcacccccagaaattctcgaaccagaatttctaagctgaatgtgcattaaatccctgtccaggaccagccagggtacacaaacgacaattgttgacatacagacccacgtcttacaaaaatataaaagattacaaatgcagcgggaaagataaaagcgagctaaaccgggaagcttgacttcagcagcgggcgactccactccacaggcaaaccttgacggcagcgacgaaaccaacctctctgagacggctccaactgagaagaacttcaactctggtgtgggggaaaagagagcaagactgagtactacccactgtactcagcaagtcataccggaagagaaggtatgatgcaggatataaccaaaggaagctaggggttcttttgcataaagcaggcatttcaaagtagtagttgaaagcagtaaaacagctgtagtaattaatcaatattaaccaatcactgtccaacgctacaccacgttgcaacaggcccaaccaaccacctgtactacaccagttcaataagctaaactaggggtgagactaatcacggtgaatctggttgatcgcccataaccgcgggcacggctattcgaatagttttactctggccagagatgtacaactgtacccacaagacacgattccacacatgtcgccatgccccgaagtatcaccatgatactgcaaagggggaaatcgtgacaagaccttccacataaccctcccctaaccatccacaccacgctaaggtttcacccccacccctcaaaaggcagtgggcggtcccctcttgcgtcgcggtgaatccggcagctggacaaccgaacacctcggccgacccaactccatcacgcccaccctcgccaccggtgcctaggtaagggtcgagctgtacttcagatcaagcagttacccactcccgcttgtggtaagcacggtaagtctcccagggtttcccatgaaccggtccttaactgccatgggtgcaaccagcaaaaccatgcactcacagcccgccattcagaatattttaattaactgacacccttgcggtggcaccaatctaaagctatgccaatagtcagagtctatgtaataatgtgatccccatttgtgtcctagttgaactaagcatggctaagcatttcctaagccaacatctagtcattttgatacccaagttatcaatggcataaggtaaccaatatgtggctgaggaataggacccatcccacattacattgtaaaagaatgcaacatttaatagaaatgcgggatattggtaaattgggtacaatatgatcaaacgtattgcatgacttgccttgctctcgaactgatgagacctcaacaacgtcttcgagaaactgcggatcgacgaaacggccgaaacctacgcgacaaacaaagcacacaagcaaaacatgctataagactactgaaacaggaaacaaaaccatttttaatggattctttgcatttttcttgatttactgagacttgaatggacttaaacggagctcggatgaattacttatgaattttagaagataaactatgtttttactaataaagaaaaagtccttaattaattattgcgcaataatacccagggctgacgtcatccgagggggggcggcgccgacaggcggggcccacgggtcagcggctcaaaggggagaggaagggggcgccggcatgtgggccccacgggcagtggctcaaggtggccggtctaccgtggaccgggaccacgcgggtggtccaccgccggtccacgggaccgacggtccggatcggccgggaggccgatcggacggcacggcggcggctaggcacggctcggctcagcttcaaaaccggccggccggccatggcaaccggcggcgacgcgcacggtcgccggcgacggcaatcggcggcgcgggaagcgacggcggacggggtacaggacggcggcgtcgaccgtaggcgacggcgagcgtgtggagagaggcggcgcaaacgagagagaggggaagagggaggaggggggatcctcaccggcgagtatggcggccggagcggaggatgaaggtggcggcgacgacctggcgacgaggaggggcggacgggcggcggcggcacctatggagggagttgagaaggattaggagtagagagagtgaccacggcggccaccattgttggccggagacgaaggagaatggatagctcaccggtgtgcgaggagaaccggctccggtggggtttagcggaaaccgagcggcggccgaggtggctcacgcggcggcaatgctaatggcggcggcggcttggcgcggcggcggctctagcggctgcggcgcgcgaccggaggtggcggcaagcggcggcgctagtggcgagcggcgcggcggcggtaggaggcacggaagagcgcggcgaaaaggggaaaagggagagggagatgcggggaagctttataggggctcgagaggggcggacatggccgggaaaccccccgatttggccggcgacgtgggggggagagagagagagtgggggggattcaaatcgaatcccgcccatttgcgggcgcgcgtgcaggcgggaatggcggggagggcggcgacgtggggacgcggagtgggggcgcggcgtggagcggagaaggcggcggcgcggacggtttcggcggcggttgccgtcgtggggcgggcgactagaggaaggggacgacctgacaggtgggccccacctgtcagcgttccggagagaagggataggggaacgggccggcccaaaggaaggaggccgagcgcgggagggagtgggccgacggcccaatagagaaaaaagaatgaaaagaaaaagaaaaagaagaaaggatttttcctgggatttaaaattgcactttggtgatttttaattggttaaaattatttccaaggctctgaaaattccactaaaaatcttgttaatgcattggagcatggggaactcaagaaaaattccaccacgctatttctgattattaattgcatttattaactagggatttagctctaggttaattaagataatttcttcgggcaatttatttaaccaatttttaaagcaagaaaaggggggaaacttcatggtgtgacagcattgcagacgaacgatgaggcagcgcggtgagggtcgttgacgatgagagatgaggttgtgtgtggttgattgatgagtagcgtggcggcacagcaaggagcagcgaggtggcccagagaagcagccgtcagcggtgtccttgctagcgttacatgcctaccgagagctgcggcggctgcggggttaggtgagagacctgaaccccgctaggtcacgcgtagcttagttagaatccatgctcccacctctatccccataaattaatttgcggggtcatgccccactcacccacgagtgagaattccccatggccctagccctagcttcgtaggtaggtcctagctccaatggaagaagtgatgcaaaactagaagtgcatactgcagagtaaggccgtgtttagttcatgtgccaaaatatttttgaagtatacagacacacatttgaagtattaaatgtagactaataacaaaacaaattataaattccacctgtaaactgcgagacgaatttattaagcctaattaatccgtcattagcaaatgtttactatagcatcacattgtcaaatcatgggataattaggctcaaaagatcacaattagtaactcgtaataattttggagagttttatcaatttaattaattgttgcttagtggcgtttatattttcttctgaatctgattttattagcatcgagaatgcttgttgataggttttaacgctgaaactgaaggcgaggatcttgacaatgaggttgatgatggggttgatgatgaggatggagaagttgccaatgtaattggtgcaggttcggtgaaggtaaaagaaagtttaggtcaaaggcttggcgggagtatgtgtcaatttatgaagatggagaaattacagaaggagagtgaatgcattgcactacttaattggtgccaatagcggagcaggaactagcgttttgcggaatcatttaaagagatgcaaaataaggattgagaaggttagagtggtggatcagctcattgctactcttatgtcgcctaattgagttagtatggggaagtggacttttgaccaagaagtatcacgaagagagttggtaagaatgattgtgctgcatgagctaccttttagcactgtggagtatgatggctttcaaaagtttgtctcaagcttaaatccactctttaggatgatatcaacaagtacaatgagaaatgattatatgaaaatgtttgaggaccaaaagaatgttctcaaggaagaactcaaaatgttcaaaatcaaggatgtcccttaccatggatttatggacatccaaccatactttgagatacatgtgcatcacatgtcattacattgatgctgattgaaagctgtaaaaaaagattatcaagttctctgtcttggagacgccacacactggtgtagtgattttcaatgctgttctcaaatgcattcaagagtggaacttggaaaacaaactatttgcaataacattggacaatgttagcaactatggttcgatggcaaaggtactgagagagaatttgctagctaagggagtaatagttggtcaagggaagtttttgcatcaacgttgtgcagcacatattctaaatctcatatgtcaagctggattgaagttcattaaaggcactgttactaagatacgggagagtgctaaatacgtccgtagttcgtacggtcaaaaagaggagttcaatgagattgttacatagcagggtattacttgcagcaaacatcgatgttgtgatcagatggaattcgacatatctaatacttgacgtaacacagcaatacataacaacatttgatgctctagctttggaagatctgttgtacaaatttaggcctacacctcaagaatgggaaaaagtagatctagtttgtagattattgaaggtgttctatgatgctactaacgtgatatcagccacaaagtaccctacctcaaatctatacttccataaaatttggcaagtcatgcagaccttggaaaatgaattatcagaagaaaaaaaatgaaggatatgcttactgacatgaaggacaaattcgataaatactggaaattatcatggatggcactatgtattcctatcatcttgtacccacggttcacgttatcctttcttgagtttcactttggccctgcctttgggaaacgtgctaaacctaggcttgaaagattaaagacaaccctcgagggcatgttcaatgaatatgctcagcaaacgatcaaccttggttctgcgcaacaatggggtggtaatgttgagataggtagttgtgatgaattggcttattgggatcaacacgtgagcctcactgccccaccaaggattgtggcatcatcaaaattaaagaattatctgttaaagcctccactccctcgaggtgaaccctttaatatcttaaaatggtggcaagcaaattttattgagttccccgtacttggtcggatggctcgagacattttagctgtacctgctaaacttgagagactatactaaactctagagactatactaaacttgagagaatgtatgaagcttcttgcttgaggtgtgtcttgaaatggaggatgagagctcctttttatagcttcccaatgacggttgtggtggttggaatggtcggaaataccctccaatagtcattgggatgcaatcctggacgtccatgccgaaccctggcctcaaccgtggagatgggggttcagccgaaccagggggttcggccgaaccatgggctggcccaatccagcccattttcagctggcgacctcttattcttcttttctacgtagacttgtgaatgttggctgttttggtcgtgtcaattcgatgtttcgaacccacttgtccgtaagtctgattctcgatagcgttcgattgattgatcgtccgtgttgctgtcgattcttctccattttgtgtttatgctttgcaagaggttagaatcctagtgctagtggaatatatgttattttgacacatatgcattgtaagcataacttgttctccttaattttagtaatattgacaggtgaaactgatcactaatggccgtcaacagtgatcttactgcaactctgctcttttatggtgaattggctgtgtaattagccatgtgatgtgatgtactcctttgcatatacgtagccctaggattccttgcgttttatatgtgtggccccatgaatctgtgaattaactattatctgctaggttcaataggttaaccttttgctccattggataacctatttatttaatggaatcattaagggatgccctaattgaaccatggatcagcatgatcacgtgaaatggtttaggttcaatccagaacctaaccattcccatcctgagtggagagggagccatcccatagcagcgctgtgatgggactgtagcactgccagagaaaggatgcgtaggtggcagcgacgcgtcaattcagcattgacgccgaggaggaggcactagagctgggctggaaggtcgtgccgagggagctcatggcggaagtgctacgccgactggggccaggggcgtcatggctgacaccgcggtcagccatggctagctcaaatgaggggaagggggggtggcgcgcagtggaggagctacgtctccgcgccactagcatcagcctcattggcgctgctaccacggtgacccatgctctcgcgtctgaggggggtggagagagagagagagcaatcccgttggaacgatatcccgtcccatagcatttctaaaaaatgtgaatggcttggtgactatatagcaagctgcatcttcagccatgagatcgcgggtttgatccctgcatcacatgatcgttgctgaattttttaattcttccgcaccttgcacaaatatcaatatcaatatgatggctgataaatgaaattttttttggaaaaatgccatcgacaattatatactccctccgtccgtaaatataagcgaccttatatttagggacggagggagtaggaatcctgatttttatttttattttttttaaaaaaaccctcaaaccagcggcccagcgttacagcgtgatccaaaattccacgttaattttatataaaaaagaaatccccaccaatcagctgttggctgttccgtctcgtccatgcgatcccaacgcggttcagaccgcgtgaacagatctgtcactctctcatgcacaaccaatggacgcaaccaccacccacaagtgatacggtcggcgcacacctttcgtctccgtctccccaccacgcaaccccccatctaatcaccccgtacacaataccctgacgtggtggtcctgcccccgccgagccgatccttctgggccccacgtatcagtcgcccccgcctccccccccccccccccggggtgcggcctgcgacgatttttcggtcgcttccgatgcttccgtcacgagacgggggtttccccggtgctacgtgcgcaccacccgttgttctactcgcaccaggtaacctatcactgacttgtgagccccaccggtctgtagctctgtaaaccccgcgtgtcggtgtcggtgggcggggattcgcggtagtggtggaatcacgcgtagcttcgccgctacgtggcctcgcgcacgttacgcggaataaaaaggtggaggaggaagacgacggagacgggagaccgaggcgagagggaagagcacatggcgagcggcgaggaggagggggtggggtggcgtcgccgacgccggcgaaggtggagggcggcggaggaggaggaggaggggggccggggatgccgatggcggagctggagcaggtgttccggcggtacgacgcgaacggcgacgggaagatctcggcggaggagctggcgtccgtgctgcgggcactgggggcgcccctcggtcccggcgaggtgcggcgcatgatggacgagatggactccgaccgcgacggcttcgtcgacctctccgagttcgccgccttccactgcggccccacgccggcgcacggcggcaagggcggcgacgccaaggaccaggaggccgcgtcggaggcggagctgagggaggcgttccggatgtacgacgccgacagcaacgggaagatctcggcgcgggagctccaccgcgtgctccgccagctcggcgacaagtgctccgtcgccgactgctcccggatgatccggtccgtcgacgccgacggcgatggctgcgtcaacttcgacgagttcaagaagatgatgggcggcggcggcggccggcggtaggctggaggggactgactccgtatggttgcccggtcaaagttttatctgttcttgcatggtttccgtaattagaagcttataaatcaagcctaatatttagcatgtgaacaactttttaagtagattttaaaaaagccccccactgatttgatgggtagtgatgtaatcatgcaaaggtagtggagtgacatgctgtattactgtttctgatatatactgtacaacttgactaatgttcaaactgatgggtgtataaacaagcttgggcaaagggattgccgtccagcctgggcaaagaatgtcgagttttatagcattgtttgtttaatatttgtaacaccagtaaaaactcggcaaaaattctaggatatattttgaatggacgactcctaatttatgggacaatgtttggaagatgaaaatgaaatctttgtttcactttcaacagaaatggtatctttattaggtgctcagaataagcttaactttttttcaatgataagtttgttttttttctgcttcggttttttcaaaatatgtttattttttcatattcattgcatcggagtttatgaaaataaatacgatatagatatgttacgagtagataaaagaggtttaataattatactgatatttgataaagtaaggatattttaattttttttaaataaaagtaaacttatttcgaactagaggttcaccaaatgttacacacaacctcaccaaagtgccattacaaccataaaagacatgtcaacatttattcctgatatagtatgcagttagtggctttactctatgatcaatcacatgtcacatgttcgacaagtgtcaaatcttacatgtgctactctctaaaaaaagcacatgctaaggctgtgtttagtttctgaaattggagagaagtttggggaaagttggtagtttcgataaaaagttgggagtttatgtgtgggaaagttttaaatgtgatgtgatggaaagttggaagtttacgggaagtttggtgtgaactaaacaggtctaaggccgagtttaattccaaactttttcttcaaacttccaacttttccatcacatcaaaacttttctacacatgcaaactactaacttttccgtcacatcgttccaatttcaaccaaacttccaattttagtgtgaactaaacacatccatagtgttggaattaatagatgggctaaggcccattcgaagattaattctttggaaaatcacaaaagcccacctcatgggatggcatgcatgtgaagtttagtaccatcttgcttattctagaagagggggacctccttaaaagggaggatgccctcctagccacttgaagcatgtgtggtggagagaagaggggaaacacagtaaccgaaccggataagtcgcgtgcacgacgtacgcgtcgaatggttcgcaaaattggttcctcacccttgcacagatgcagcctccttttgcagttttgttttgctgcgggaaattcggatttgttttgttttggaaacattccgaaaaatccggtgcgtgaaaacggcgtggagtccggataagttacgcgcgacttatccggttcggttacgcgaagtggagatcatgcgggcaccctgatcaagcgacctatctctatataaaccgagccgccgccatcatgcaccacaagcgaaatcaatcttgggtttgcctcctactctgtactacgccgtcgctcatagactactcaatcccacttgccggcatgcaccggcgatcgggagagcaggtctccggaacctctgccttcgacgtcctgcaccgggagaaggcggcaataaggtttttgggaagcgcttcgcgcgactactccctgttcgcccgcgacggctcgtcttcctctccactcgcgtgctgcgcgccttcgtcgacgcccgcaaccgcgagtagtttctgccgagcaaccggtctttccgccacctcggtacgtgttcgatatgttacgtatatttgatctgttcatgttttactgcttagtttacatgtgtagatctaatgatgtgttcatgctagtttacatctgcaatgtcatgatttatttatgtaataaattaaatcattatgtgcttataatttcaacaatccaagaaccttattataggcgctatgattttactatggctggttttgccgatgcactgaggccggataaattcaccggtgtgcactttaagagatggcagatcagggtcactctgtggctgacagatatgaaatgcttctgggtgagtactagcaaacctgaaggaattcttactgctgatcagtagaagcaattcgaggaagctcctcgaaggagtaagagacaaaggacggctaagtcctttggcgatgatttcgctgtgtacctcgtggatgacactccttagtcaatttcagaagcatatgcatctcctaatacagactactggaaggaggctgtccgtagtgaaatggattccattatcactaacgggacttgggaggtgacagagctaccctatgggtgtaaacctgtggggtgcaagtgggtgttcaagaagaagcttaggcctgacggtactattgaaaagtacaaggttcggcttgttgctaagggctatactcagaaagaagtgaaaatttctttgacacttactcaccagttgctagattgaccacaattcatgtgctactttccctagcagcctcacatggtcttctcgttcatcaaatggacgttaagacagcttttcttaatagagagctggatgaggagatatatatggatcaacctgatgggtttgtagttgaaggtcaagaaggcaaagtgtgcaaattgttgaagtctttgtatggtttgaaacaagctcctaagcaatggcatgagaaatttgacaaaacgttgacatctacaggctttgcagtcaatgaggtagataaatgtgtgtactatcgtcatggtgggggtgagggagttattctgtgcttgtatgttgatgacatactgatatttggaacaaaccttgaggtgataaatgaggtcaaatcattcttgtctcaaaattttgatatgaaggatttgggagtagctgatgttatcttaaacattaagctaattagatttgagaatgagattacactcttgcagtcccattatatggagaagatcttgaatcgctttggctacattgatagtaagccttctccaacaccttatgatcctagcttgttgcttcgcaagaacaagagaattgctaggaatgcaccggaatactcccaaatcattggctcgctgatgtacctggctagtgcaactaggcctgatatctcctttgctgtgagcaagttgagccggtttacctctaatccgggagatgatcattggcgtgcgcttgagcgagtaatgcgctatctgaaaggtactatggaattggggcttcactattctgggtatcatgcggtactggagggatatagtgattctaactggatctctgatgtggatgagatcaaagccactagttgatatgttttcacactaggtggtggtgctgtttcgtggagatcttgcaaacagaccattttgacgaggtcaaccatggaagcagagttgacggcactgaatactgctactgttgaggcagaatggctgcgtgatctattaatggatgtgcctattgttgaaaaaccaatgctggctatccttataaactgtgacaatcaaacggtaattgtcaaagcgaatagttctaaggataatatgaaatcatctagacatgtgaaaagactattgaagtctgtcaggaaattgagaaactccggagttataacattggattacatccaaatagctagaaacctggcagatcccttcacgaagggcctatcacgaaatgtgatagacaatgcatcgaaggatatgggtttgagacccatgtgagttttactatggtggtaacctaatctatatgatcggagatcccgtgaattagaatctgggaagaacaaaccattagtaaactagaggagagtgccaatctataccctctctaagtgaagatgcatgtactctcgtgagctgcaaggcaggttggctatgccttaatgagttctgttggctttaattagcgaagatgctgtcctgcagagcattcttgaaagaacccacctttgtgagcttgactgttggtcgcagtctatggagattttgggtgaatcttctaggaagcttactaaagacctaggagtatgacttatacgctccacccgaggggtagtctacagacggtctagtatcagataagactcttagtgaaacttgcttgcataaaacttgcaattcaaggcagagtccattgttcaagttgtgagtaagtgtagcttggagttctaggtggatgttcaaccttaatatgtctccatcgaaccattggtatataaacagtacattggaaaaggcaaatctcagtgggattttaagatttggtgggggattgttggaattaatagatgggctatggcccattcgaagattaattctttggaaaatcacaaaagcccacctcatgggatggcatgcatgtggagtttagtaccaccttgcttattctaggagagggggacctccttaaaagggaggatgccgtcctagcctcttgaagcatgtgtggtaaagagaagaggggaaatacacgcgagcgctcgctcgcctcgcctggcctggcctggcaggcggcgcgcgcacgatgtacgcgtcgaatggtccgcaaaattggctcctcacccttgcgcagatgcagcctccttttgcagttttgttttgctgcgagaaatacattccgaaaaatccggtgcgtgaaaacggcgtggagtccggataagttactgttgacagaaaacacgaggcctgggagatctgcttaactccagtgcaggtccaaaactcgccttcggatgtgtgagcgtgccagttgatttgatcctgcaatcaacaagaaataaagacaaaagaaccgtggttaaacttataaatgatagccgatcggccagaggccgatgacacatcatttatatctaagccgatgtcatctgtgcatcgatcggcagtcatgaataagtaaagaatgactaaatctacttgatcagctatagatattaacgatatataccccttatatcgatatatacttaaatcaagtgattgggatagatcggtcatcatgccgagacagtataaaccacttagatcaaaatatatatcaataacaggactatatatgttgatagcgtagccgatcagatagatctagtatgtatcggctaatactctgatactactctatgttaggatattaaagcaagaataatatatcgaacaagagcctaatatacttagactcagcaatatcttgatataaagggcagatttaacgtatcaatgaagcacatagaacaaataaagttaaatcagatatgatcggctgaaaccccgatgctattctaatcggcaactagatagcagggtagaaatcaatattctaagtacgacttaatagatcaaactcaattgatgcagcattaagtatgaaaagaagaacaatatctagacaatcaagccgctagaagattcatagaatggtagatatcttatataatctggatcaacatcaagatctaacctaatcggctgccttctgcacacagatgttggccggtagtagattagataacaatattgctgaagattatataagatatatgataacttgacgaattatataaataagattagagtgtcataaagatgtaagcactaatcctaagaacacgattcgtgatgacgaattttacctcttgttgaagatcgaaaccgatgcagctcaacccgaaagtaagaactcgtcgaaataaaagcaaaaggtggcgatgcgccggaattgtattgaatgtgtctcttttttttgttacatagggctcggggtctatttatacccgaggattacaagatatgcccataccggacacgaccattatctctaacaaactctaaaatatcacaagtctttgcggcagacttttgcccacacttatctataaggaatttacataaaatttcctaattaatagatacaatttccttcccaggactctatccatgcgtggcaatcatattgaagtatatcaacttgagcctgacgtcgtgcacaagtcgtattgtcagaatcggctatatcggcttatttagctcaactcaatctcagccgatcctagccgtagccgatccggactccagccgattcctgctctgttccagaactcgatctccgcctccaactcttctttgatcaaatcccctttcctgatacaaatgttaccaaatttggttgttaacacttacgcgcgacttatccggttcagttatgtggagtggagatcatgcgggcgccctgatcaagcgacctatctctatataaaccgagccgccgccttcacgcaacacacgcgaaatcaatctagggtttgcctcctactctgtactgcgccgtcgctcgtagactactccatcccgctcgccagcgtgcaccggcgatcgggaaagcaggtctccggaacctctgccttcgacgtcctgcaccgggagaaggcggcaataaggtttttgggaagcgcttcgcatgactgctccctgttcgtccgcgacggctcgccttcctctctgctcacgtgctgcgcgccttcgtcgacgcccgcaaccgcgagtagttcctgccgagcaaccggtctttccgccacctcggtacgtgttcgatatgttacgcatatttgatctgttcatgttttactgcttagtttacatgtgtagatctaatgatgcgttcatgctactttacatttgcaatgttatgatttacttatggaataaattaaatcattacgtgcttataatttcaacacatagagcttgattatcaatcctagtacaagagattaggtgttttttttacctaggggatccaagatgtctttaaatttgatgtatgtatgtatgtatgtatgtattattacattcatcctaaaatataataaatttgaagcatgtatgtggatcctaaaatataaacttttaagcatgtatgtagatccgtgcctatctaaatgtatgtaaatattatatatttaggtgtcgtattttttttaaaaaaagaacaaataaaggagtaccacatcaatatcttcattagcagcgaacatttaatgtaaagctcatcgagcaaaagggctgcagctacacaccatgtgaccatgtggagataaagggcaacagtaacgcgaaagaatgtaggtgtcaccgcgggagaacaaggcagcatggcgtggccgaatgggccataaatacgtaggttttcattgaatccagggttataattggattgaggggatatttggttgatatctaaccttaccataactaagtttaggctagttatgctatagtggcacaagtatggcttacaaatagttggccacaagtgtggtcactactatagaaaagtccaaagtaccggttcctaaaggctcataggtgccggtttttcatccgacactaaattggtcggcaccaataatagcaaccgacacctataacaaaaatagaaccggcacctttaccattgctcgagccaaaaaaaaaaacgagagccggctcaaatccgagccgaactcaccaagcggcgccgtcaccgggcatgcgccccaaaccccaaaatcatccacaaatcatcaccaaaataaaataaatcacataatgaacatatttaacaataaattcacacaaacatcaacaaattctgccacccgctgccttccccccgtcgggcaccatcgcaacccgtcgcccgccgcccgccgcctcccctcccgccggatctggcggaggggagaccgccgccgccgccggtcgcccgccgcctctcctcctgccggatccggcggaagggaggccgccgcctgtcgcccgccacgatgcgccgccgcctgccgcacctcccctcccgccggaggagaggccgccactacccgccgccgcccgccgccgtcgccacccctcgcacgctgtcgcccgccacaatgcgccgccgcctgccgcgcctcccctccgacggatctgggagaggggaggccgccgtcaccgcccgttgctcgccgcctccccttcagccaccgcctcgcgctgagatttttttgagagagccgaaagcgagagagagaggcaagagagagacagacaagagagatgggagaggggataaggctctcatataggccgatgtgtcactcactcgtccgtcggctagattggctcggcggctcggcttggtttggataggtgttggtttttcaaaaaaaacacctataatttattataggtgtcggttaactaaaaccggtacctataatatattaaaggtgcctatattatctatactataggtgtcggtttttctttagaactaacacctatagttgcttaaaggtgtcagttttatatgttctcagcctgtggacgtggtaaaatcactatagatgccggttagttgttccggcacctatagtgccgatctttatgggctttttttttagtagtggacaagcttagctctaaatttgagagcatgacgtgggtcccaaagttaaaaaagtgtggcataacacaattatagcaacgaaccaaacagacgcctaagaaactgtggcatgactaaagtgtggtatgacaaagtgtggcaactaaccaaacaacccctgaatgcgtctgagtagttcatctgtaatctttattttgtgatgcaggggagtacatactaaagagtactgtaatctttgagcgagcaattttgtgattttatcttgattattaaaatgtgcaaatggtgaactaattagaacttacagggttcctttagaatagaggaaaaacataggataaatgcccctttaatttgtaggattttaatcctacatgaaaagttcgtaagaaggcttctgaaacataggattgaatcctatagtttccttttaaaggacattccagatttctatgaaagttaacagtaactccaaagttttgacaaattttcttggagtatatatctctcattaccatagaaaaagtttgcctagatgatacataagctatttacacgtgttttccgctttgcctgcaaccaagggcctatggaaatcgtggatttttgcgggtgcatcaagaactgccggagaaaatatatttacgcagtcggacatcttcagtctttgcctatgaaatacgttttgtacgggctgttactgaagtctgaagacatttaacagtggaaacacttttcaccaggcggatctaaacgcttgcattgttgtattataacaaaaataaaaaaataaaaatctagctgctatggagcaattcatgcccatgcaaaactagcatatttcttttcagtatgtggggacacaaattagtagccacattcacgttcactgaacattcaaatagataaagagatagtacttctaattaagttggtcatacacattatattatacacatcaatacttggaagcaagatatatattgacatagacagttttaagtcatactccctccgtttcaaaatgtttgacactg

SEQ ID NO: 24118 - DNA, 13746 bp, Oryza sativa
cattttgaaacggagggagtactaatttagggtctgtttggggaagtttctagctgctgcaacttctcccagaatcagaagatctccgaatagtcaaggttttggtacatattctgagaagttatagttgtagaatctagaaaatgaactagaagtcagaagctaagaaatccagcttttctaaattcttagaagctggctacgaaccagctgcttctccgaatcttaagctcctcaaatagaccctcaatctgcatccctgaatcgtataagatataaagtgtaattactatctacgatgtcaacttaaaaaatgtcctcaacagttagtaatatgcatgtatgagagcaacttttgcttcaacataccgatcctttacatctctgaaaactgtaaattggtggtaatccaaattaaaatagatttacgactagagcttgtagtcaaccaaatagggataagctagagtgaatatagccaagctcattcatcacctgacatgagatgtattgcaagctagtttctgttagcaccttaagagcttcaccctagctacacataggacaaatacaattactagtactatcaatacaattcgaaagaatgcaacacgtattcctcatcaattaagatgtcggccattctaaaaagtaagcaaaaacaaatagtatgaagcaattttgttagtgcatcgtactctacaatatgtgataatttgataattaatcaactaacattgtcaaaaaaaataacgtaattctaggtcaacgacatcttctaaaactatatcgtccaaaccacgtggagatgttcgtgactactattatgtcataatttgaaaaaaaaaaccctcatattgtatgcatgctcctatgtagtgaacataaacttcctgagtgaaccccgctctaccaaaaattaacacaattccagttcaacatgatcttgttgcatcttagttggttagtataggcactaaaccgtccaagtttgacaaaataatcaactaataatgtatacaagccattgcatgtcaaaactctaaaccttaggaaacaaaccgagtagatctattggcaccccatatactgacagcggaaaccctaaacactgaggaaaaaagagtatcgaaacccaaagaaccatcctcatacaatctagagaggtccactctatcacagtgtaggtcaaaaccttaccttagacaagaaaccaagtagatttgttgccaaacaatatatcctgccatcggaaaccctaaaccttgaactaaaaaccaagtagatctactgccacaccctacacacatgctgctagccaaaccctacaacagtcactatagaccgagttgatgtactaagaccccaaaatgaactacaaagcaactaaaccggatggtgtaagcgggacgatgtacctggataatgagccggtggagggcactaacgacgatggttgtctcaaatctgtgcatgggtgctggagacccacatggagcctaggggcatgggggcaacgacgagtttggcctcccctctgacgaaggtcgggtgagctcgagctcggatgggctcgctagccgcctcccccttcctctcccgccttcctcgcgtggaggccgggcaaagctcgagtttagatgggcttgttggctgcctccccctccctccaaggctcgccggctgcctctccctccctctctcgcctccaccttcctagaggccgggcgagctcaagcttgtacatgctcgctatccgcctccctcgttgacaacacctgagctgcgtgcgtggttcgaaagaaaaggaaagaaagaagtgggcgctaacacacgggccctgcatattttttcttctcacttgcacatgggccccatattttttttattttctttttactaactaggatgccatatcaacaaaaatagatatccatgctaccatgggacccaatttaacttggttttataagttaaggggttataaaatttctagtattgtgctttaggaatgtcgattaaactcggtgtaaagataaggaagggcaagtagacttatctccttacaggtgtaaccaacaatttagtactgtatagtccaaacggccgattgctacagctgacatataaacaggggctagcccaaaacgagtccatctacacatgaaaacctgtggcaaccgaacggtatatgtctgtaggaaaaagtacaccgaagatacctcaacttgtcatcgaattacaaaatcatccttgaaccgtgaaaccggatacaacgcttccctcaacttacaaaaccagtataaactaggtccctcggcggttttgactccggttttatccgacgtggtagctgactcagcgtgggacccacgtgggccccacactcagggtgaccacatcatcatgtctttcctttcttctctcttagttttctcctcatcccggccgcctggtggggcgatgtgggacagggaggccagcgacgggcggtgcggtggcgtggcgacgcggcggcggcgggccgggagcaggcgggggaagagctgtgcgtgggcgacgggcgacggaggaggagcggcagaaggcggagcgtaccccggcctgtgctgctgcttgtctctccctcttgaccgcatttctctctggctcacggtgtcgctgctgttgcaggtggcggagcagctacgggcggtgactgcgcatcgccggaagacggagcgtgccgagggggaggtgctcgccatcctggagtcctagggcctcgcccacttctccgacgccgcggattccggttcaggttccgacgatgaggacgacttctagtctgccgagagcggcggcaaggctcgcggggaagcggaggatggatgccggggtctgaacttggaagcagtgctactgcggaggcggcggccagggggctgtcgtggaagggccgcgccgcgagccacgagtcgcagaggcggcagcagcagcaactgcgtcgataatgatgccgccaccacgagaaagggcatggtctcggcttcatttccggtttgtccgtctagctaagaagctcatcaacggctgcaacggtgcgctcacttgcgcccagctgcaacggtgcgtccatcgcctgtagccactgcgccaaactcatagtgttgtcacggtgcgtccacctctgcgtagtgcctacccaattattgatgcaaaaagtacacactggcctaggagatctgcttagctccaatgcaggtccaaaggttgatgagatgcgggcgtgccagtcagtttgatcctgcaactgacaagatatacaaacaacagatcaataagccgattagctgtcaagccgatagagtaattccaaccgataccgataccagccgatagcaataggatttcgagctatcgaccatatgtccaatgtatattccgacacttgatgtaaataccaataaaaaggcaatcggctgatgataatataatataacaacaatataatccagtagaaaccaatcggctaaaaatgacatgatagaataagcactgatccgaaggttaaagcatacatcggctagaggtccgatgtcataaaatccacaagattagattaaacagtaaaatctttattgccattggctaaatccaatttgtatgtaatccttgtaagccgatgcaatatccagataacttatcggctgaaaccccaatgaaacctttattagcagtcaagaagcaggctagagattatggttctaaacacgacttagtatatcaaacttaactgatgtaacactaagtatgaaaagaaacacaatatctagacaattaagccgttgactaattttcagggtggtagataccttatctaatttaatctagtaaaacaaattagtcgataccagcagaaaccctaaagcaagaggcaaccgatagagctaaattgagatactaagactagattaactaaaacatatgataaataggcagacaaatatatcatccaaactagagcaatccaagaggtcgaatgtactgatgcagccttgaacgacggcaacatagactatacaattgcctgggccggcggaacattggacttacccttcgtcggagatcgaaaagcgatgcagccccgcgtcaggtgccaagtcccgtcggacgataaaataaagtagaaaaggtaaaacatagcgatgcgccgaattgtattgatcgtggagatatatatcgtttacaatgaacccgtgtgtacatatttatacccatggagagatactagtccttgtaggacaagaaagaaactttcctaaagacaaaaggaaaacataaagtctttataggacactaaacacactttgctaaagataaaaggaaactaataaactattcctaattaatagataacttgccatgccgcatccttcttgaactcggccacttctagataagctttctttaatagattaatttccttcaccgaatatagcaggaacccgactattgacgatgtgataattctcttaggggcttatcaaatttcactgttaacaccaatcccaaagtaatacgacgattaagcaattcgttgtctgcgtggtcaaaagctcgggctttatgagcatacacgaacttgtggatagtccatcaaattgaattaatcggaggaagggggaagaaaaattaggggcggaaggagaaagagagagagagcgagctatactcgactatggagaggagcggcgatgatgcggtcggtggaggtcgggatccagtgcagcgcggacggccacgccctcccccacctcgaccccgccccgggcgtcgcctccgctaacgccgtggcggtggcggcggctgtggatatcctcgtcttcgccgtcacggccgcggcggctgctcggtgcatgcaagattctcgaattttccctccctcactccctcgatcggtctctcacccttcttctcgcggagttcttggtggctttgccgccggcagaatcgagcctcgccagccgcccagtggctcccccgccgctcgcgcgctgcgcctcctcccgccgcgcaccgcccgcctgctcctggcccgccgccgctgtgtcgccccttctcccgcgtcgccgcgccaccacaccgccgggcggcatgaggagaaaactgagaaagagaagagaaacagagagaagagaagaggggaaagagatgatgactaggtctgacgtatggggtccacgctgagtcagctgccacgtcaaataaaaccggagtcaaaaccgctaaggaatctagtttgtactagttttgtaagttgggggatgccttgttagttttgtaagttgggggatgccttgtatccggttttacggtttaaggatgattttgtaattcgatgacaagttgagggaccttcggtgtactttttccatgtctgtatgtatagtctcggccggccgacatcgggagctggcaacagacggttgccctcacgcgcgaattcacgtgcgcgcggcttctctgcagcctgcatgcaggtactcgccgtactgcatctcttggagtcatgggcttggcctccaccagatcgtcgcgcggccacccgaggcctcggccggccgcgttgctggaattatagatggaaaatgatacgaaaaatttccgaccatatcaatactgttttcgtttccgtaaacaacaataataaccaactaataatagttttttattgtttttactgtaaaatttatttatttttcctctgcatcatattgaaattataactaaatatctgataccacttctataaaaaaaataaaaataaataatgtcatttccgacgttttcatccatagcttgattggaaaggttgggttcagctgacctgagctcaacactattagtagtggttttagtttcacggattgttaatttacccaggcttccgtgtgttgattcatctgatcgatcgctacctctttcgctgtactccgtcagtaccctgcatatgcatgttccagagctggctgtaataccatgcatcccatatcgtgcatgaatgtcgcgcaaccatgaagtcacgcagagacagatctacagcatatgcattggtgtcaggcgacaccgatgactttcaacaaaatcatacttaaactgcttatccatatattataacactatcatctaaatataattagcacactatgataccactaaacatattatgacaccaacaaactaattttctggatccgtcgtcggagtcacgcaaatgcatgcagataggcctggaaattcctccatgctattgaaacagaaaatgaaaatatttgagagaattgaagccattaagttacatttatgtgttgccgctgctgcgttgggaatttgggaccgtggcgatggacacgacggccgacgttcgtacggcgcatgggtgggcagccggccggcgatgggcacgtacgtggggatggggacggatccagagcatatgccacgtcgtcggcatatgcctgcagcctgaatactgctggatgaacatgcatagtatgatgcagcatgggcggactgctgcatctgtaaagtttgtcaaaactttggtttggcaaaaagtttaatgttgtcaaaagtacgataagaaacgaagaattagcttcaatccaaacgagccctaaatataatcaaaagcatacagagcagcaggatctgcttactgaccccgttttcggtagctgcttccagtatgttcagtagtttatttttgtcctccgttgccctggggttggttggaccgttttatcaatgctgtctactaatttttttccctcttggctgatgttctctttataattcttaacgttttaaattatgatatgatctttaaaatatattttaatacattttcccattaatatatatatatataataataaatttttatttttattatagtatttcataaaagaatctatatatgtttctagtgtcattatactaaatattttgaaaactattgatagtcaaagttaaaaagaaattgatctcgatcaagattacccaaaacaacaaaaattataaaattagatggattagcttattagctccagcaaaaaaaattaactttaaaattgaatttagagttcttccattgtaatttatttttcaacattcgcttttaaacatctaataacacggatacaaatgttttacctcaagactgaaaataaatgcaagttcttcggttggctcatggtccatagaaagattctcacagcggacaagctcctcctccacggctgggataacagccacatttgcctactctgtggagtggagccagagaccgccactcatctactcatggattgcgccttttacaaaactggtctggagatccatatggcagaaagccgggcttcatatgcctatggcttcctcctttaatggggatatgcttagctggtggacagcgtgcagaagagaaatgatcaaggatcaaagaagaagttttgatggccttttcatctacacagcctggggaatttggcttcaacaaaatgcaaggatcttcaatggtgcctacagcacactaccgcaagtcgttgactctatcatcgccatgcgcaaagcctacaacggagctcatagtttagatgactagtacccggttcctctttttggttgctatgcattgcctgaaaatcctcccatccgttttttcttgtttcccgggggatctatggtttcctcttgttttccatagtttgtaaaaactatatatctcttcttcttcttctataatgaaattggcagagctcttgccgtttaccctaaaaaaatgttttacctccaagttttatgactttacccctaaaattgctctagcatttttatgacttattatcagtcacatctcaaatgatctatttttcaactagtattgtctatcaaaaatctttataatataaaacaactattgtagatacaaaagcctctgcagaaacaggtaggaggtcaaagcctaattaattaagcttggcaaccatcaaattaaaccaaaccggaaccgaaagcaacaaagctatctactgacatgactaacacaacctctagaacgagtagagtttagctggagaagaaattaaggacctgtttagtcccacctgaaaattttttatcctcacatggaacgtttgaacatattaaatataggctaaaaaataactaattgtatagattgcgactaatttgcaagatgattcttttaagtctaattgcttcataatttgacaatgtggtgctacagtaaatttatttgcttaataaattcgtctcgcggtttactaacggattctataattagttttcttattagtgtccaaacacccacacgacaccctatgtaatatctgatgtgacacgataaaactttacacctctatatctaaacacccctaaaatagctgcgcatatctgcaccagttgagacgaccatacaaaaattagcttattggtagtacgtactattaccaataagctagctacgtactccctccatattttaaattttaatgtataacgacgttgactttttaaccaacgtttgaccactcgtcttattcaaaatttttatacaaatataaaaatacttatgtcatgcttaaagaacatttgatgataaattaaatcacaataaaataaattataattacataaattttttgaataagacgaaatgtcaaacgtttgttaaaaagtcaacggcgtcatacattaaaatacggagggagtacaagacggcgttatacattaaaatacggaggtatacattaaaatacggagggagtacaaatatctctctccctttctgcatgatgcaattacttctatcaacaacatctatactcgcagcctatcatcagtcgcctcagtcgttgttaataaagcctggaagctgggaaacgtactacactatctcgaaaagcatttgtacaaccacacacatacgacacgtctcattcgatcgtggttgcgagcattgtgacagttggttaggcgttgtgcggcggccagctagaccgaatttagagccccagagacaagggcatcgctcacattgattttgggacttaatcgagcacaattgctagccccctcttcgctcgtgcctattatttctatgttcttggtcccaaccgtgctctcattggtaggaccaatgttaaggacgacgttgatggccatctgtgtgttcttcagtttaattaattaactgtgtgtttttaatgatttcgatagacataagtacataaccatataatctgacattacttgaaaaagcaattttcccaaacagccttttcatttctctactattataaaaattgaagatgtttttgtcggtattttggtacgtcgtccgagcatgagtcggtttttaaatttgttcgtttttgaacatacatatccgtatttgagtcggtttttaagatcatttgcttttgtaaatacagaaggaatcgtataagaaatctcttttaaaaaactagcatgctaacttaagatgaccgcacttctaattgcagctcatgatttattaaaaatatatatatgcaaacgagtttccacggtagatttcaccataactaaaacgtataacaaaagaaaagacctaaagaaaagaactacgccatgagctagctagctccatttatgcaaggaaggaccgaaaggaggtagctagtgagcactaaccagtgacagtgtgacgacttctacagtgaggctgtgctggtgcacgtactacggctttagctcctggctcgatcgtgttgtgatcaacttaactcgggctggctttgcagatactcctgcctttggccggcgacaataatgccgcccatattctgttcgtgcaaccaccgcgtcggggcgatcctattacatggccccatgtcgttgaggcacagcttgtgatttctgaatgactctgttgtttgtttgttagtagctataacgtacggcaagaaggtgaatccgccgcatatactgatcgatgtggaggttggacagatcgatcactatggatcaaacctgatttaacttattcgaacccgcagaattcttcttggcaacaacatggtctcatcgaaaatcaatctcttttcagttttcaccatgtcttcagcttttggacacgagatgtgtctgtagtctggagtgtgaccacacttgccagtacagctacatttacatagcgttgtgccgctacggtgagggccacctatctgacgagcatctgagggagcttgctaggggcagaacagtgcacaccaagaggagaggctccctcaccctctcaaccctaaacaccagcctgttccgctgtagcatttgtcgtcggtcatgtccctgccatgggtgcacactactgtatacgacaccctggaaggatttgaacttctagttgttttagcttatatgaactataattaagtagagtactaggtagcctataggcatgttttgatatgtttaggacgtcatctttgctattcatccgtcgatgaaatttggggtgctcattctctccatcttagatggcgtgtatgtgggtgaggcaagaagacaggagatcacaaagggaggaagatggaggcctcacaggcgatggtgatggcaaaaccgagcattggtgctgatgagactcctgttagagtttgtgtcgaataaaactagtcatttgagttgtgtagatccagaatctaaagttgtgattttggttgggtctatggtggagcaggtccaatgtgactagggtggtcttccgttggtgggtttggctgtgcattctaacaaatggtatcaaaacctgcaggagatccattgatagaggcgtgatgaggtgccccacagtgcgccgctcgcaggttatgcccagggagggacatgtgcacaaggtggagcacgtcggcggatctgtggatcgaatacttcaggtggcgatttgaaccgttcaatggctgccttcaagcttttaacagtgagatgactagaagcaattgatgacacagaagcaattggcaaactgttgatgtgaaaaacacacactggcctgggagatctgcttaactccagtgcaggtcgaaaggttgatgagatgcaggagtgccagtcagtttgatcctacaactgacaagatatgtaaacagtagatcaaatagccgatcggctgaaaagctgatgtagtagttccagccgatatctgataatagccgatgccgataccagcctatagcgatagggtttaagcaatcggttgtatgtccaatgtagatactgatataaaggcaatcggctgatgatgatgtaataaaataacaatataatctagtaaaaccaatcggcttagcaatatgatataatagaacaagcactgatccgacggttaaagcatacatcggctggaggtccgatgtcataaaatccataagattagattaaatagtgaaacctttgttgcgatcggctaaacccaatatgtatgcaatcctcgtaagccgatgcaacgtctagataactcattggctgaaacccttattggcaatcaagaagcaggctagagattatggttctaaacacgacttagtagatcaaacttaactgatgcagcactaagtatgaaaagaaacataatatctagacaatcaaaccgttgactgatttttcagggaggtagatgcctaagctaatctaatctagcaatacgatttagccgatactagcagaaaccctaaagcaagaagcaaccgatagaggtaaattgatatgctaagattagattaacatagacatatgataaaataagtagacaaatatatcgtccaaaccggagcaatccaagagatcgaatgtactgatgtagccttgaacgacgctgatgtagatgagacaattgcctgggccgacggaacgtaggacttaccccttcgccgaagatcgaaagccaatgcagccccgcatcaggtgccaggttccgtcggatgataagtaaaaacctcggtaaagagggtggcgaggcgctgagagtagttgtattgatcgatagattgatagattacaatgaccccgggtgtacatatttatactcatagggagatactagtccttgtcggacaagaaagaaactaaggataaaaggaatagataaagtccttataggacactaaacacactttcctaaagataaaaggaaactaacaaactgttcataattaatagataacttgccatgccgcattctctttgaactcggtctcttctggataagctttctttagtagatcaatttccttaaccgaatatagcaagaatccgacaactgacgacttgataactctcattggctaatcttaggacttcgaagccgatgctgactctaagtcgatgattactttgggtttaccaaatttcactgttaacacaaaccattcggtggaatttgacactttcgacaagtggcttgaattttttggtgagctactcccaataggatggcgtgtagccacatcctcaggtcaactgaagctaaaggaggtcggcgctctcgattggtggaatcaaatgctccggattgggtggcccgggcgctttcggtgaactgtgttcgatagggagatgactagacatagcacttgggtcgttcggtggctgggaagatgacatgcgatttgtcagcttcagctcgtgactagattcattgcgttcaattggaagtcagagcaggtggttcgtagaggctggtttggaggtgttgacgaggtatttgtgtgatggactactacagagaaagcgtacatatgacaagaggcaaaatcaagctaaggatagccaattcagaccatcaaagtacaagttcaatcatgttaacacaacaacttgcattggttgcaataaaccgatggtattcattgatggtgagattggacggagttaccgggtggctgcattgcactagaggtcgtacaagtgcgtggaggctgaggaggtcatgagaggtggcagtgtgcatggtcgcatgtcaaagccaaagaccatagagatgactagagtctagaggtagcagaatgactctgttcgagtcaggattttgtaggagattgactcggcttgtgcaggcacagggaatagactcggacctcgagtcctaccagccatatgcatggaggaagcaaagtcggggacctaattcaacatgaaattgggaggacatggttttgttttggactctaaatcgaaccaatctcccaaaccctatcttcctatatagttggaacccactaaggggcatctactcctataaagcaagaatgcaggaagccacattatcaataattttaagccattagatcatattagtataaagataataaccattggatcaagaagctacttattcatccaattcaatcatttattagttatccattcacctccctttgctctacctcactgtcacacatagcactgttacatattttgtgcataacaccatgttttctgaatacaactcaaattattgtttattatgtgattattgtttaatatgtgtgttttgttttattatgcatgataagatagcatataattattaggtatcgttacctgaatctattttcagaaaaaacttgagtgaagtagagaaatgcaaattgtctacctataacgaaaccatattgtgtatgaaaataatattcatat

SEQ ID NO: 24119 - DNA, 661 bp, Oryza sativa
gtagagatactcagtgtcggccaactgatcactgtagcgatcgcggagctctcctatggcgatccttgccacctcctgacatgcatggatgtagtttcttcctccagcttcgaacatcactgaggggatatcttcactattactgttcaaggtgactttgactcggcacttctcttcgtgacgatcatgaggaatctgggcataaaaaggggtagtcccaaatcctatggcaaaggacatcgtacgcaactcctggacaaatccctcaacaccaaacaagtactcaggcttgtagcacggcatctaaagacaagtgaaaggagggagttaagacatttatccaattaatagcacaagtttttggattaatttgaataaagttagaaaatcaaagaaaaaggtaagtaaataaagtaaaccaagcttgcaagataagttgaaacagttggaaataaggtcacaaattttgtacttttgaacaacaggttccaaagaaataaaagaaagttataaaatcaacatgctaaatttattttattgcagcaagattaaataaaaccatattgtaaaacttttgctggtaaatgagccattagtacagtaatagatgtacagtactaataacgctggaataaattttgaacgagaaccactaaaagag

SEQ ID NO: 24120 - DNA, 3870 bp, Oryza sativa
gtcttaaagctggagcaaaaggttatcaaatctcaacactcaaatttcaaatagtaatgaagttctgacaacccttgatgatctggaagaacaaagacctctagctctgcaggaatggaatttcagaataattctcaaagaacatattctcaagcttttgaattacaaaaatgagttctggaaaaaaagatgtaccatcagatgggtaaaatttggggatgagaacacaaagttttttcaggcctcagcaactgatagtcatagaaggaataaaatctcgcatctcagtttggatgatggaagtatagttactactcatgctgaaaaagaacagattttatatatggcctacaaaaacagaatgggaactcggggctcaatggacatgatcttaaatttgtctgatatggttcgtagaatggaaggcttggagtgtcttagtgagatcccatctacagaagaactggacaggatcattaaaaacatgcctactgatagggctcctggaccagatggtttcaatggcttatttttaaacaaatgttggagtatcataaaacaagacttctatgagttggcttttcagttctttaccaacaatgtctccctcgagaatttgaatcactccttcataacgttgatcccgaaaaagccaactccagaaacagcaaatgatttcaggccaattgcacttcagagttcagcacttaaattcattacaaaaatcttggcaaacagattgcaggaagtaattctgaaactcattcatgataaccaatatggtttcatcagaagcagaaccatacaagattgcttagcctggagctttgaatatattcatcagtgtcatcagtccagaaaagagatgataattttgaaaattgactttgaaaaagcttttgatttggtggaacatgaggcaattctccaaattcttcaggccaaaggattcaattctacctggttagactggatcaaaaatatcttgtcttctgcatccacttcagttctgcttaatggaatccctaggaaaagtttcaagtgtttgaggggagtaaggcaaggggaccctctttctccattgttatttgttctagctgcagatttattacaatccataattaataaggcttcctcaaatgggttactctcaactccaatcccaactagcggtaattcttttccagttatccaatatgcagacgatacattaataatcttgaaagcagatcagagataagttttttgtctcaaagctcttcttaacacatatacaatgtgtactggattgaaaataaattatcacaaatcaaacatgattcccatcaacactgacagtcaaaaaatggaaattttagctggcacttttggatgttcaataggtgccatgccttttacttacttgggtctacctcttggcacttcaaaaccaaatgtcagtgactttgcaccattgattgatagagtggaaagaagacttccttcaacaacggtttatctaaattatggacaaaggctcaccatgatcaattcagttctttcttctttaccaacatattatatgtgctctcttaagctgccaaagaaagtaattttgcacattgatagggcaagaaagcactgtttgtggaggaaacataatgagtcagaaactaggactcattcacttgctgcatgggatctagtttgcaggccaaaaaagagaggtggtctgggaattatcaacctagaaatccaaaacacatctttgttgcttaaacacttgaacaaattcttcaacaaaaaagacctgccttgggttcatctaatatggaataaatactatattggtttggacaagcctccacatgcgcaaattgagaagtgatcattctggtggaaggatattttcaggctaatcccgttatttcaagctatcacatcggtgactgtaggaactggagattctgctctttttcggaaagataattggagcaatcacaatttggaaaatgaattccctgtcttgatttcttatggaaggaatgaagatgtcactgtacaaggatttctgtcagccacagatattggtcaaaactttcacttacctctgtccaaccaagcaattcaagaatggggtaatttaaacaacagattacaaagcttacagattgtcactgaatcagacaaatggtcatatgtatggaactccgattgataccaatccaaaaaagtttatttgatgttctttcagcatcttcaggttgctagaccgatatctatactctggaaaagcaaatgtacaatgaagcttaaagtttttctctggctcatgttgatgaatcgactcaatacaaaggaaatgttgcagaaaaaaacaattcaatatacaaggtggtgtcaactgtttgctatgcagctccatggaaacagagaacatgatacacttatttttcagttgcccttttgctcaacagtgtttgcaacaaattggtattcagtggaatgtaaaccaggaattcttgaacatgatcacttcagctcagatctcttttcaacatactttcttctttgaagttttggcaataggatgctggcacatatggagtagaaggaatgatctcatctttaacaatgttgctctcagcttcgacaaatggaaggatgattttcagaaagagtttgccttgcatatgcacagggcaagagagagggacaaaacagattggcaatcatggatagctaactttacttaatacttctcctttttccctttttgtaaattcttgcatccttgtaactatgttttatttatttatatttaatatagcacagtaggagcctctcctgctgttttcagtcaaaaaaaaaagagatcggtattctcgagccagtgtacctacacaacatgtttcctttcgagaggtacatgggcgttctgaagaagtatgtttgtaaccgtgctcgtccagaggcaagcatcgccaaggggtatggaaaagaggaggtcattgaattctgcgtagaatatattgaagaccttcgcccaatcagggtacctgaatcacgccatgaagggagactacggggaaaggggactcttggaaggaaagcaataatgacggtagacaacaatttattccgtaaagcacatttcacggttctgcaacaatcttcattagtggctccttacatcgaggagcacttggctctagttcgcaccagaaacatcggtaagtccgatgcatggattacacggcatcacattgatactttccccgcgtggctgcgacaacatctcatgggtaacgagacgattaaccaacaactggccttcctggcaaggggaccatctggctcgatcgcgacattccagagatatgagatcaatgcgtacacattctacacgagagcccaagacatgaagagcatgaaccagaacagtgttgttcatatcgatgccatgggacacgatggtacaactggcacgtattacggtgccatcaaggacatatgggaacttgactatggacctctcaaggtccctctgttccggtaccaatgggttaggttgactggtggaggcgtaacgattgatgacagtgggatgacaacggttgaccttaacaaggttggatactcagacgaaccttttgtccttgccaacgatgtaacgcaagttttttacgtgaaggacatgtctagcaaaagaaagaagggcaaaaggcctgacaagccgaagcgccacgtggttctcccaggcaaaagaaaaatcgtcggagtagaggataagactgacgaggattacgatcagtttgatgggcaaccccctttcacggtgacgattgaccctagcatcctcctattaaatgaagacaccccttactcaca

SEQ ID NO: 24121 - DNA, 3751 bp, Oryza sativa
cccgcgccgacgccgccgtcgtctctcgccatcatctcgctgtcgtcgtcgtcatcaccgccgccgccaccgccaccatatctctggggttgccgccgctgcctgcgcgaactctctctctctctctccaaaccgccgccgcctcgtcgtcgtcgtcattgctacgcctgccgacgccgaccccgactccgccttccgccgatgccgaccccgacgtcgacgcggccgccactgccgacgacgcccccgccgcaccgcgccatgccgccgccgctccttttcgctgccgacccatcaatgccgaacgtgaacgaatgcgaacggacatgaacgaacgcgaacggacgcgaatgaaacgtgaacaaaacgcgaacgaacgcaaacgaacgtgaacgaactcgaacttaacgtgaacgaacacgaacgaacgtgaacgaaacacgaacgaacgtggaggaaacgtgaacgaacgcgaatgaacgtgaattcacttgaacgaaacgtgtgaatgaaacgtgaacgaacgtgaaggcacgtgaacgaaacgtgtgaacgaacgtgaaggcacttgaacgaaacatgtgaacgaacgcgaacgagacgtgcacgaacgagataattaaacgattattaaacttagcatatatatatatatatatgattatatacttgaaaacgtgaacggaaaatatatgttcctttgcgtttagactaatacatttttttgcatgttgcagataagagacttcgtcgtcgtccctcaagccgaagtggtagctaaccctcggaggaatttgcgcaggcaagtgatataaagatatgattatctagagttctaatatacgaaacttagacttagcatatatgattgttagagttttaatataagattattagagttttaatatacgaaacttagacttagcatataagattattagagttttattatacgaaactttgacttagcatatataattatttgagttctaatatacgacacttagacttagcatatatgattgttagagttttaatataagattattagagttttaatataagattattagattattagacttagcatatatgattattagacttagcatttctgattattagagttttaatataagattattagagttttaatatacgaaacttagacttagcatatatgattatttgagttctactatatgattattagattattaatatataattattagacttagcatttatgattattacagttttaatataagattattagaattttaatatatgattattagagttttaatatacgaaacttagacttagcatatatgattatttgagttctaatataagattattagagtttttatatacgaaacttagacttagcatatataattattagaattagcatatatgacctatagaattagcaaatatttcttgtatgaatagatggttgatcgcgatgacgaacagatactataccatacaatcgcagagggaagcagccagtactggaacgaagaagaggggaacgaggatccaaaccagtacttgaacgaggaagggaacgtggagagggatgcggaggggaacgaggatgaggaggctagtggaagtcaaccctccgctagacagaagagggcacacggacaacgaggtgccgcgaagaagatagagggttggcacatcataactgaggtggacgaagacggctgacctagtgccccggcagaagcagccaagaattttgtacgacatagcggttgggttgtaagggataacgtgcctgtcagcaaggtgtactggcgcagaacaagggcacgcggggattatgacagctttgtcccagaatcagagaaagagatgttgtggaccacaatgctcgagatgttcacgctccctgcgggtacggagaacatagtgaaacagtggactcttaagaaaatggcagaacagttccagagcttcaagggagatctctacaagaaatacatcctgaaggggctgacactgaacttcgacgtattcccaaagctaagggatcattgggacgagttcattgcttacaagacagggcaacaagggcaagcgatgatggacagaaacaaagaaaataccgccaagaagaagtaccatcaccacctggggtcaggcggctatagcgtcgcaatgccgaagtgggaggagatggaagcaagcattattgagaggggtatcgaacaggccaccgctaaatggccgtatcgatcgaagttctggtactatgctcacggtggaacgcttaaccccgttgatggctccctgatgttcagcgatcagatacgcgaggctgccagtcgactaacggatgcagtggaagcctcttctcagggcatgttctgacccgacagagagaaggacgagctgtcactcgccctgcagactcccgagcatccaggacaaacacgagggaaaggcgtggttccttggaagattggattcaaggaggacatccacacatacaggagtcggatgaggagcaagagagataccgaggcgaagattgcagatcttgagtacagggtatcgagctacgaggcaagaggaggtggcaaggaaggtggatgaacgcatggccgcacatcggtcccaggatccccagctgtacattcctcctgtaatggttagcccctcaggcaatcgtagcagctgcgcctcaacggggcaggtaggatcacagagcatggacgccatgcaaactcaggatgaaaccacctgccccgttgatgagatcacgcagcggacaccatgtgagctgcatattcccttcaagaacttatcaatcaaggtatgttcgtagttttatgatttatgctcgtagttttatgatttttgacttgtacattccgcaagttgctacttaggttgattactaatagataacctctcatcacgtgaaggtggcgttggaaatggccatcccaacggacccttcagggacttaccactgtaggccggttccagcaggatactcaagggtcgaagttgagctggtggaagccgcgtacgaggacctcgagttggactaccctggaggagacggtgagacgcatctacgagacacaagccacgccattatactatggcgcaagcggtacatcatcctccctaggcgacaagcggcgtctcgtgcaccatctcctccggctccgccatctcctccgccacctcctcctgcaccatctccttcggctcctccggctcctccacctccactgtgtccacctgcacctctcaagacaaggtctcgccaagctccaccgcctgcccgcacaagggcaacgaagaaggcgaaagttgacgccaccaaaaacaaggagtcgccgtacgattgcagtcaagaggagcttaatgcttatgtggcaggagaagtgaagaggcaactcaagcctcggagtcctgaaaagaagatacctgttgacccgagcgtgaagaacttattcaagaaaatgtccacaacaaacaaggaggtcttaaagctatcggactatgaccgaacacttaagaaagcctattacaagaagtccaaactagtcccttagcttggagaacaaccataccaacaggtcgagccgttggtgactggcgaagaaattggcatagcagaattcatttctgacaccagtctaactgtggatcagttgattagaggcgcaccaatcctgaaggcggaagtggcatacaagtttgaactcggtaa

SEQ ID NO: 24122 - DNA, 2195 bp, Oryza sativa
ttgtttcgttcaataattaactccttgcatatatgtaaacaataataacttcctttttatcgttgtagaatggagattaaaagggctcgacggtggggggtttacgatactgggttcatcgaccctcggaaaatcaacgccgaaatgatcgacaagtacgagaaagacatagaggacaatctcgtccatctcctgacgcagcagcatttcaagacgttcatactactgccgtacaacacagagtgagtttttactatcgttcgaacaaatttcattcccatacatataacatgtacattttcatatatatatcatcacacgcatattgcagattccactgggtcctgttacttttcgacttggacgcatgcagagtcaatgtctataactcaatgaataaagaggagaagactttcgacaaggttttccaacggatagacatgtaatataattgcatctattcaaaagtcacggggatttttcctattgctattatgcgtatctcggataataattaatcatagcttgcaactgcatgtagggtttgggattggttccgtcaattggtccccgggacttggaaagaaaaacttggatggaggtttaattttctagtgagtacatgcatgatccaaaattatattgaattgaatctctaattacagttaatataagtgtatattaaatctctcgtcctttctcatgtactgtgtaaagcaggactagggaactaacttgtgccgctactacgtatgcgagtatgcccactgcctatcaacccaaatctacaccacacgagagcttgatgtacgtatatataaaccattcaaaatttcattgcgtatcgatttgttgtgtatatatatatatatatatatatattaatcagatttgaaccgaggttcatttgcaccaggaatctccaccgtagatgtgtttcaggattcacacatatgtatcagttggttactgcaggaagtgtctcttcaaaccatttaatcatggtcaaaaggtggtatggtcagatggagaggacagacatgcatgtgctgtattttctccgtgccagaaattcattatgttcacagggtgtctttttttttttccaatcggcacgttaaaacgatatatacaaattaatgatgaatcgagtaatctaattagccttttacgtcagagctataaatgagaaaatcattatgtgtgccatacgtatatggtacatatactatatatatgtatgtgtgatgttagtatatacgtgcagtttctgctgatcactctgtggtgtcatgtgggctgcagggagggcataatcgagaatgcaacctgtaccattcaacctaccaacgcacagccctatatagcagctcaatgaggttggtacatcttgatgctcattagtcacatgatggaacatgtctatgcatacacgcgtcaatcaggtgattggggtgcatatgaactgtggtctatattatccatgtcatatatatatatatatatactagcaaaatgcccgtgcattgcaccgggtaatgccgcgttggataatgtttaactgaatgattttgaaaacggtctaatatgacaataataatcacaacagatttctttttgtttggacaattattccacatatacgtgtatgatatgaacgatgttcctaacacgttagcgtaatgattgtaccatgggaggaacaaatggtgaatgcattaggttactttcatgcaagaatagatggacgaaaatttgtatgattaacaaaaaattctatatttaaaataggtaagtttatcataaaactaatgacaatcacgacagataagattacttttgcatatttactcagtctcatagtggtgatgcatgctttcttaagctgtcaactctcgtgttgcaagcgtgcgatctggtttccaaaatcatatgtcgactcacatggaggaagcaaggcgagtggaagggagatgtccattcagcgccaagcggagcgaagcggcggcgacgcggcctaagcggcatcggcggtgggtggggctccatctctcctcttcctcctacgacagatggtgagcagcacagagcggcctaaacggcaacaggaatccacctctcctcctccaaccggcagcgagcggagcggagctctggtggcgtggcccaagcggtgcctgggagtccacctctct

SEQ ID NO: 24123 - DNA, 2291 bp, Oryza sativa
tccaccactctatgacacatccaacggcttgattgtctagatattattcttcttttcatacttatagctgcattagttgagtttgatcttatgagtcgtgattagaatctcaatctctagcctgcctttgattgccgattagggtagtatcagggtttcagccgatcttacctgatttaactacatttatcttatatgccttattgacatgttaaattcgccctttatgttaatatcttgatgcatttaagtatattaggctttcgtttggtatattttacttgctgtgatatcttaatatagagtggtatcgaagtattagccgatacacgctagatctatcttatcagctatggtataaacacatatagtcttgttattaatatatatttcgatctaagtgatttatactgtctcggcatggcgaccgatctatcgcaatcacttgatttaagtatatatcgatataaggactatataccgttaatatctacagccgatcgagtatatttagttctttcttacttattaatgattgccgatcgatgcatatatgacatcggctcaaagataaatgatatgtcatcggcatctagccgatcagctatcatttatagatttaaccgtggtttctttgtctttgtttcttgttgattgcaggatcaaatcaactggcacgctcgcatacccaaaggcaagttttggacctgcattggagttaagcagatctctcaggcctcgtgttttcacatcaacacgcttttggcacgcccagtgggacccattagaagtcagagtcacaacagcggtctctaatggctgagaaaccaccagcatcactgtcctcagctggcaaagaggggactcctaaatctaaaatcccgaaacctggtacatctgaagttaatgagagtaacatcgtgcccatcactccggactggttgacacccgagcagcagaaggatcttgaggctatgatgcagtaagcacggaaccaattcttgaactcattcatggagacccgcaagggaacagttgttcagaagtataaagtaaaagtaattgctgatgttcccggaacaggttcttccaaggatgcagaagtacaacaggttccagatggtacaactcaatcaagtgataaaggtgttgcagatggttttcaagggattcaaggtgatggctctcaaggggttcaaggtgatggttctcagggatttcaaggtgaaaatcttaaccaagatggcgacactgcatcgctacagtttaacaacttccaagatcggattgactatgccgtgcaacatgctttgattaatcaatctggagtattagtcaacacattatcaaacatggtgaagtcgatggttgatggcttgatagctgaatatcaggctacaggaccggtttatttgccaggaggtgttttcccaaactatcggcccttaatcactaataatcaaccagttgtctagccaattcctcccaatgcaccatcggctcaaccgacagcaccagtatcggctcctgcacctgttgcaccatcatcggcactgggtcaattaattaatcctcggttgttggtgagagagcagccacagtatagtggacaaaatgtgaatcggctaactcaagatcaagttacaactatgttcctaccacctcaacctactgttgacacaatccagcaacagccgattcaacaaacaccaccaaggcagcaggttgtgcagccgattcaacagacaccaccaagacagcaggttgtgcagccgattcaacaaacgccactgaggcaacaggttgttcagccgattcagtagcaaggtttgatgaatgcatcggctgtgtttggaacacctgacgatcagctaaggtagcacgctgcgaatcaagttgtcctagagcatttggtccataacgtgcaaccagatcaaactgtggtacctcaggttattcccgaacatttggtgcgcaatatacagccgaactttcagaattaccattggggcaatttgaattatcagtattagcctccatcgccgtaagttcaatatcagcagggaggaccggctcagccccagtttgttcctcaatacaatcaattcgagaccgtgccacaacaagcacaaggagtgcctcagcaacgaccatgggctgtatgattgcagatgtgatgagagaacagtttaggcttaagccgaaagatgctgaaaatttgtatcggcatccttaccccgagtggtttgagagagttcctctgcctaaccaattcaaagttccagattttt

SEQ ID NO: 24124 - DNA, 1991 bp, Oryza sativa
gagtcttggcatataccccagttgagcgcctgtgaagatggagccgtaggctgctagtccgctgctgtttatttttgattgtcaggcctgaagcgcctttgtaataatgtaaatattatcgatgtaataaagatgtgtcttttatatcatgtttgtatggtgtaccccggcttttcctgggacggggattaatacactagcgttcgggaaaaggcaattttcccggtcgcgacaagatggtatcagagccatctcgactgtaggataagccaagtggataaaacctaaggacatattttataaatgaaactatttgcgaaagctcctctttttctccttcccctaatgctatttgcaaaaggtttactcttttcttccttcaaatttcaactagtactagatggtcagctttgctaagaagaagatatcgccaattgtttgccgaagctccggaagactgcaggatccgctagcgaagcaaaggaagcagtgaagccagatgtgaagcaggagtgaagatcttggaaaacccatcgcagaacctaagccgtcctctagggtagagtcgtttgtcgtgtgtttccttgcttgtgtgtgtagcgcgtggtttgcatcagtggggtgtgatgtaaccatgctaggttgtttgcttaatcaacttgcagaataagcctaacatacatcataacagcaaaagacttagatctgttaaggtcctatccttagtttctaatctttctctcccctttgttttccctctctccctctccaaatctttgcaacagatggctgacaatgagaaaggcaataaggtcagaagtcaggacattggtacctcaagctcccgagtgaatgaagcaccagacaccagttgtgtgacactggtccaacacctgattaaccagaaccgattgcttatagagatactacagcagcatcagacgccaattctgaacctgagtcaaatacaacctcaagtgcagttggaggcagtccaagcactcacaccacaagtcagcatgccgccagcatcccgaaggactcatggtgacgtgccacatgttgacccaaaagaagcaagtaacatttgctttatgtgtgatgagcaagggcactatgcaagggagcgtcctcagcagaaaagaaaaacaccaatgcgaaccgaagatgaagtccgtaagatgatcattaccagcacagaatggcctccaccaggaatgacaagacgtcagagaagaaataccttccgaggtgcaccacagttgacagagcatcttttagctagtggaggtagagtgtctgatagtgaagattcagatcaagtctcctcagatgatgaagatgaaatggaacgtaaggcatgctctcgttgtggagaagtcggtcatgttgccagctcgtgtgccactacatgcgttcattgtgaggaagaccatccacccgacaggtgtccaacgagcaggatcacttgtttcttttgtgaaggaactgatcatgtaccaaaagattgtcaattcagttttctgctgacgaagaagatggccaaccaacccgccagttccaacggagagaagcatcaaggcaacacaaatccccgccaagattaccgtttcagcctaactccagtgccaggacagaggaatcgaaatgagaaaagaaaatgccgagtccgggaagacatctgttgcttcaattgtcaaggaatgggtcatttcgccgacaagtgcccaaaaccgagaaacatagctgccggcacgtcagtccacgcaactccctgcaatcagaagcttgctcctcagcaaattgtcatccatgcatcccgaagcagtcctatagcccgcgttgcaacagctctaactccagcgagtgcattactgtcgcgaccgggaaaattgccttttcccgaacgctagtgtattaatccccgtcccaggaaaagccggggtacaccatacaaacatgatatgaaaggcacatctttattaacatcg

SEQ ID NO: 24125 - DNA, 9898 bp, Oryza sativa
cgagagttgtggatgcttctggtgacgatggggtcctttggcttgctgcctttcagtgaaaccttgaagtgtttcgccaaaagctatactaactgtcgttgcctttgatccgaaaaggactcatctgtaactcttagtccaaacaaatgtctctttggttaatcacttgatttttcttttccatcctcaggttggttattagctcgaggttagaatatagttcctctgacacgagaccctaggtctcctttgtcagtaaacaattatacacatgatcacatatccgcatcttccaaaagaatcctcttagaacttgtttttattaccaatttctcccatattacatgaatacaaggcactgtcttaaacaaaaagggaaggtgcttaacatcggtacattgtttctactatgggttatgattaacacgaggcctcacaggtatgacgtttgctccagtgaccacaaggcgagtgacttgtcttcttcttgcataatggccggagtgatgacgcaggttacgcttcggctgtggacaatctctcgagaaatgacctggttctttgcagttgtaacaaatcaacgtcttctttgctgagttgtccgcctgggaacgatcgtcctgactaggagttggaattggtggttggaaatccttgctaacattggcatcagtggtaccattattgctatcacccttggagtctttctcagagtcaaaattgctagggttgccattctgggtgccttcattgatactatcgtcgatatcttggtgaatgatgttgttgttgtctacattgcgttcatcttcttggggcaggaactcgtgatacccaacagaagatccgatgatctgaagtggctcagtgcgctgtctttggttaccacctggaaatactgggatgttgacaatccttctcttgcagttcgtcatccgattatgctcactttcaagttgcatggctttgtccacaagtttctcaaaattttcataatcctctaggagtagttgcactgcaagctcatcttttaacccctggagaaacttctcttgtttttcttcatccgtttccacatcttctggtgcatggcgagccaaacgatagaactcgtgcaggtactctgtgacggtcaaatccccttgcttcaggtagcgaaactctcgttttcttagtgtgatcattcctgcgggaacatgtgatctcctgaatacagatgaaaactcgttccaggtgatggtatgtccttctggccgtgatgcttcgtagctatcccaccactctgaagccggtccaaccagctgatgagttgcgaagccaacccgctcctggtcggtgcactgaatcaaccctagcttcttctcgatggtgcgcaaccactcactggcttccataggatcgacggcaatggcaaaggttggaggctcagttttgagaaattctgataacttgcactgttgctggactgtaggcacttgaacgttggttgcccctgctgggttgttccaattctgtaatagttgaaaggctgttgccaacatgttggtttggttaaccacaacttggattagctctggtgaggttgcgttgatgcttctctcattcccattggcttgggttcttgagtcatcggatccatcattcccatagccttggttaccaggattatccatctgtcacaaggtagaggttgagaggggaagcatacaaggagagaatagaccagaactagagacaagaccttaaaggaactaactcttttttttgttgatgtgttgtttgttttgcttattctgcaggttgattaagcaaacaacctagcatggttacatcaccacccaccgatgcaaaccacgcgctacacacacaagcaaggaaacacacgacaaacgaaacactagagggtggcttaggttctgcgacgggttctccaagattttcactcctgcttcacagctggcttcactgcttccttcgcttcgctagcggatcctgcagtcttccggagcttcggcaaacaactgacgacatcttcttctttgcaaagctgaccatctagtacttagttgaaatccgaagaaagaaaagagtaaaccttttgcaaatagcattaggggaaggagaaaaagaggaactttcgcaaataattttatttataaaatatgtccttaggttttatccatttggcttatcctacagtcgagatggctctgataccagcttgtcgcgaccgggaaaattgccttttcccgaacgctagtgtattaatccccgtcccaggaaaagccggggtacaccatacaaacatgatatgaaaggcacatctttattacatcgataatatttacattattacaagggcacttcaggcctgacaaacaaaaataaacagcagcggactagcgggcctacggctccatcttcacaggcgctcaactggggtataagccaggactccacctaagacatcttctccaaagcttctcttactgaagaggggaaggattgagcaagaatgagtacaaccacagtactcagcaagccacaccggcagatgcatgattaatgcaagggggggtacaaggggataataataggggttaggttttgcagtaaacagcatttaaaagtcacttagttgcccaaagccattttgtaaagacgatcctagagctacacagtattattaaacaaggccgtgaaccctcacgaacctgccttaacccaaggcctacgatgatttggaccgaactggcaacccgacctgggttccagctcgtcccaagccaacccaggccaaccattccatattttagttgttgagcaaaattttaagaattaaaacactgacttgggtacattgctaggcttgcccatatccgagggctcggctattcgaatagatttactctgatcagaggtgtacatctttacccacaagacacatctttactccgcattccatggccttggaacccgtcgtaaagatgtgacataacccttcacccatcctagccgtgaacaaaagtaccgacccaatcccacctacggccgggatacccgggacaggcaggcagaactgagcccctagcagcagggcaccaaccctctgccatacgacatctcgactaccgggccgcagctcgtgtagccttcatttgccctggagaatgtccatcgacacccgacttcatccatctccaatccgtgtccttttgttcaggactagactgagcaccgagttaagccttacccattagacatgtggttagtacggtagtgctttgcaacagaggcccgagcttaatccttatagtggccggggtgctacttcccataactggcatgcacccaaaccccaccgaaaacaggttttaggggttttgaaagagaaagagaggtgtatgtccaattccaccataatccaacaattccatagtgtccaaatgatatgagaattcccaaagtctaaagttagaaaaccacctaatgttgcctaattattcagcgaagcatctacctaaatttatactagtggaaccatgaatagagtacccactagttggggtttttattttcctagggtgaacaaggtaataataataacaataacaataataaggtcataacaaaggtaattaggcatggctagataaaacagtgataacgcgggaatttaaataaagcggtaatgcaataatttaaatcaacataagtttacaaactgggtttcaatatgttcaaggatgatgtgacttgccttgctcagagagaacggccttccgaaccttcggcgacgaccacgaaccacgctttggaaacctccggaacgacgaaagctacgcgaagcacacaagcaaagctacaagcctataaagaagcaataacaatacataaaaacaaagcacagggttctttaggttataacaagcattaggagacttgaacgggtcgattcggagctcgtatgaccaggatatgatcatccgaagtttaatgctgttatatggagatttgcgaattattataattaagctttgcaattataaaacatgtgtaagcgctagcccggaaaggacaggaaggctgcgccgttgacatgcggaccccacatgtcaacctaaaggaccgcggtagaccgagtacacagaggcggtccacgggtcgacggaagcggatcccgtgtgtcaaccgaggcgagtggccgacaaacggactccactagacaccacacggactgcacatgtggaaaccacgcggctaccgagcggacacactaacacggtcaccacgcgcacaagctaacgactgccgacgccgatacacgggtaccggggccgacaaccgcacaacgggcacgggggacaccgaaaggacgaggacagggcagcgagggagagggaaccttaccaccacgcgacgaggcgtgggaacgacaacgacgaacgggcgcggcggaggcagacgggcgcaacggagacgaacggcgaggggacggcttcggcggcgatccttgggcgaaggcgagacgcggccggcacgaggcttgacgacgcggagccgaggacgaacacgaggacggggctgcagcgatcttgacgaagcgaggacgacgaacgagaacggcttgacggagggacgaacgccacgacgatcgggaacgacgagaggacgaggacgacgacgaccggggccggcgaggaggctacgagggcagccggcgaggagacgacgagggcagccggcaacggctgcacggaggcgaggacggcgtggaacacgccgcagcgatgacgatgacggaggcggcgccgcaagacgacgagccgggcgaccgatgggacgtcgacgacgagaacgatcggagacgacgatgaaacgatgatggcaggcagcagcggctgagcggaggaggggacggcgtggaacacgccgctgcgatgttggtgaaggtggtggtgcagcggggcgacgagccgacgaggaggaaggagaggccggcgcggagacgacggcgttccggcgaaattcgggcgaggaggaggtgatgccggggaagaaggcgatgccgcggtgtcgaaggaggagacggcggcgtcgatcggcgcaccggcgatgaacagcagccggctggagggagtacagtggcaccaatgccactggttgccggcgggggcaccgttccggcgagtttccggcgaggagacggtgaggccggtgaaggggacggtgttgcagagccgagggaggcgacgacacggccggacgatgctccggtgaggagggagaggcggctggaggccggccggcgtcggagagggagaaggagaaggcggggagaggtgatacgaccacggggaggctcgggaaggggctaaaacgatagaacgaaggatgaggatcccattttataggatgggggagagagccggccacgggaggagcgggaacggcgacgggaatggcggccggcggcaaaggaaggcggccggacttggcgcggccgttcccggcgattgggggcaccattcaaggggaaattaagggggaattgaagaggagggaaaggggattaattccccctaattaatttggaaggaacggttggatccggggcggatttggaggaggaaacgagctagggttccacgggagtgagaggagccgggcgggaggaggaagacgacgcccgcctgacgcgcgggccccacgcggtcgggcggcggcgtcagcgcgcgcacgcgcgcggcacgtgcgggaggggagcggctcgggggctggggcggcttgggccggcggccggcccaggaagagaggagggagaggcggcctgggccgggcaggccgggaggggaggggaagagagaggcagcccgggagggagagggaagagggaggtgggccgaggggaagggggcccaagaggaggagggagagaaaaaagggaggagaggaggacttcggactgggcttggcccaaaggaggaagaggagggacttttaggttttctttttattgaactttgataattgtttttgttgtttaataattatttccggtgctctgaaaattcaagtaaaatttgagggctcctttttagaccaaggagaatttaacaaaaattctccgggccacatttgaatttttcttgcacgtattttagtgtttgccaatttctttccgaattttaattaattctattattccttttagaaaatggattttaatttggaatggatttatcaggacgtgacaattaccacaaggtgtcaatgctcactttcagccccagccatcagttgacaagacagaggccagtatcggcattgtacctttggatgttccagcacagcagccaagaaatcaagtaccagatggagaacccgagcataagaaagttattgtctgttacaactgtggtacctgttaaggaagcggacatgcccatcgccaagtggtcactggagcaaatgcagtacctgttaagcctggcgctaatcagaagcaaccataatactcttatatcagtgttcaaatacttttgttttatagttgttccccgtcaatcatgtaataacagagaaacatgagataatgaatgagcttgataagtttattgagggatccgtgttaggattgcaagtgctgtgagttgtgtacattttgttgctgattagggagacctagggtctcatttccgtaagctcataatctattatgaatcaaataacctagcgattgatggcgaagcaaatcaagtgattaacccaagagacatttgtttggactaagagtttcagatgtgtcttcttcggatcaaaggcctacacccgttgtggagaaattggacacgttgctagcatgtgtctcacactctgcactcactatgaagaagaccatccaccaggggagtgtcccactcgcaaggtgacatgttttctgtgcgaaggaacaaaccatgtgcccaaggattgccaactcagtgtgttgttgaccaagaccgcagaaatccaacgaacaatcctacgattgtctcgtcagctagtcagctccaacaacaacatcgatgatatcatccacagcaccaatgctcctcttgctccacctaactctgcaataaatcatggcaataatacctacagcactaaccattctctgcaccgacagccccagcaaagaattgtcgtcgatggaagaagttgtgtctctccccgacctactccaggccaagcaaagggcaatcgacctccggagggcgataccaagcagaagaccgtcatccgcttcaaccagcaatcagaaggaagcttctcctgtgaatgatagcattatgcagtcctatcacatcatcacagaaccaatcaaggatgcagtcactagaacaataccagctatatctctccagaatcaaaatgagcagccatgtttgtggtttccagttcgctacttatcatggtgtaatcgaaagtttgcagcaatcatgtaatacagaaatatattcatgtctataaacagtgagcttgctatgcttatggatgattcatgttgaggatacaatgtaccgatgttaagcaccgtccctttttgtttaaggcagtgccttgtattcatgtaatatgggagaaatttgtaataaaaacaagtcctaagaggattcttttggaagatgcggatatgtgatcatgtgtataattgtttactgacaaaggagacatagggtctcatttcagaggaactatgttccaacctcgagttaataaccaacctgttgatagaaaagaaaaccaattaaactgtgttgggttaaaaagccaatgagacagtagttgggggtaggagtttggatacgccttttacagatcaagataaggattgttggatgaaacccataagggtacctgccatgcctctacattgataagttcggatatacctgcaaacagttaagaagatccaggagacatcaatgtttgagaacatagtagtcgatggttggtaattagtctatcaggtatcagaagagggtcaaaggtgatatggcagaagaacaatttggatgctccccatctcgaggaagcactaaggatgatcatcggcaattaaaccctagtggcatagatacagatagcaagcaatgtatttccctgaaggtagtcagtacagctttctgacaaaccacatcaaggtgtcactgaaaggcagcaagccaaaggacctcatcatccccagaagcgtccgcaatccacattaaagaataccacctgttagagataagccgaaagaagattgataaaagagattggcaaagatgttctctagcatgaaagaagtaggccgaaaggtgattgataaacagaaacatgctctgcatcgctcaaggaagacccctaattgtaattgccccgcaacagtcaccttgtcattaagtaagcaagatgacctaggtaaaagtgtttttatgaaggcaaagagtgaaatcttcaactcggtatcagatgctacacggagtgaaaagtacaagcaccggttaccaggcaatgccatgacttgggagatgatccaatgggaaagaacacatcaaggttaaaggtgtaaaggaatacgttgaatgctaactgaggacaacctgaagataataaggggaagtaaactgaatgtaaagaaagtgaatccgagttgattgttcgtgagggctattcccagttatgaatcaagtgatatgttcgaagataatctacaggggtcagattaaaagcacatctaacaacgaagcctcagatttgacagggtaatgattagacaataacaaatccagcaataaagccattggagaagacgtcaaagtatgtcaagtgggataaactggttctcttgggaagcataacttatagttagagtggttgacccttgcatcgaatagcagaagtacctagcaccggagaccaggaaagctaatatgagacagttggtggcaagttagaagtgaatgacaggcatgatatccttatgatgacaaacctggtaccctagtaatgacaagctagtgttgacgcatgacataaagtggtgacttgtatgaggttgactccgaagatatgaatcatgagaagttcgggaacggaagcatcattgaactaccgcaacctagtctgagtcagccaaaaggtgcaccctggtccaagtcaggtgaagagaagattccatccgcaacaggaggtcaagccaagcagttccgagtggtgaagttttgctggaagtttgtcaagacgcaacggaagaagtcagacaagaagagaagaccgcccaacctatcttcttgctagcctcctcgaatctcggggacgagattcttgtaaggggggtggatttgtcacgtcctgataaattcatcccgaaataaaaatcatcttctaaaaggaataatagaattaattaaaattcgaaaagaaattggcaaaccctaaaatacgtacaagaaaaattcaaatgtggcccggagaatttttgttaaattctccttggtctaaaaggagccctcaaattttagtggaattttcagagcacaaataataattattaagaaataaacaaagttgaaaaggttttataaaaagaaaaatccctaaaagtcttcttttccccccttcctctcttgggccggctcggcccaactctccctccctctctctcctctccccgcggcccatcggcctcctccccgcgggcgcgccgctgacaggcgggcccgcccgccaccctcgctgacgggtggggcccacctgtcatccctgacctcgcgccgcgtccgccgcccgcccgtgccctagcgccgccgtcgccgcctattccgccgtctcccgccgtccccgcgcgcattaaagtggggggaatcactcc

SEQ ID NO: 24126 - DNA, 1158 bp, Oryza sativa
atgcatatgcaaccacttccccatctggcatcagaacacaaccctaacccaagttgggatgcatcacaatacacttggaaacccttctttggatcaggtaaaatcaaaataggagctgatattaagcgattcttcaactcttgaaaactctgcttacattcttctgaccacttgtacttcacatccttttgaagcaatcgtgtcatgggcttagcaatcttggaaaaattctctataaacctccgataatatcctgcaaggcctaggaaactgcgaatctctgaaactgtctttggttgtttccaattggttatggattccacattactaggatcgacggcaactcctcctgctgagatgacgtgaccaaggaacttcacttcagacaaccaaaattcacacttgctaaacttagcatacagttgatgttctcgtagcttctctagtgcaaggcgaagatgttcttcatgctcttctttggttcgggagtagataagaatgtcatcaataaagaccaccacgaacttgtctaggtattccataaacaccttattcatcaagtttatgaagaaagcgggggcattggtaagtccaaaagacataacagtacattcgaacaatccatacctagtggtaaaagctgtcttaggtatatcttcctctttgatcctcaactggtgataccctgatcgaagatctatcttggagaaaacgatggcacctttaagctgatcaaacaaatcatcaattctgggcagcggatacttattcttgatagtcacatcatttagtgcacgatagtctacacacatcctctgggtatgatctttcttttccacaaaaataaccggagctccccatggagatgaactcggtctgatgtatcctttctgaagcaaatcgtctacttgcctcttgacttctgccaactcattggctgccattctataaggtctcttatggatcggagtcgttcctggtaccaaatctattctgaactctatatcccttttaggcggcataccaggtaaatcgtctgggaacacatcgggatactcccggactataggaatctcttccaaagttatttggttcagtcttgaccttaaaggctcagaagacaatgcatgaacagttacaactcgaccatcattactg

SEQ ID NO: 24127 - DNA, 1739 bp, Oryza sativa
aatatcatgcttgtcatttacttctaacttaccactattcacttcatgttgtcctcagttagcattcaacgtattcctttacacctttgaccttgatgtgttctttcccgatttctcttatcaatcacctttcgacctacttctttgcctggtaataaacatctttttcgatacctcctatcagtcatcttttgacctttgtcactaagtactcttcactccgagagttgtggatgcttctggtgacgatgtggtactttggtctgctacctttcagtgaaaccttgaagtgtttcgccaaaagctatactgactgtcattgcctttgatccgaaaaagacacgtctgaaactcttagtccaaacaaatgtctctttggttaatcacttgattttcttttccatcctcaggttggttattagctcgaggttagaacatggttcctctgaaatgagaccctaggtctcctttgacagtaaacaattatacacataatctcatatcgacatcttctgaaagagtcctcatagaacttgtttttattacacctttctcccatattacatgaatacgaggcactgccttaaacaaaaagggaaggtgcttaacatcggtacattgcatcctcaacatgaatcatccataaacatagcaagctcactgtttctagacatgaatatatttatttattacatgattgctgcaaactttcgattacagtgataagtagcgaactgaaaatcacaaacatggttactcattctgattctggagagatatagatggcattgtcctagttactgcatcatccttgattggttctgtgatgatgtgataggactgcatattgctatcattcacaggagaaaaattccttctgattgctggttgaagtggataatggtcttctgcttggtatcaccctcctgaggttgatttcccttcgctcggcctggagtaggtcggggagagaaacaacttcttccatcgacgacaattcattgctgaggctgtcagtgcagagaatggttggtgctgaaggtattattgctatgatttattgcagagtcaggtgcagcaggaggagcattggtgctgtggatgatatcgtcgaggttgctgttggagctgactagctgatgagacaatcgtagggttgttcgttggatttctgcggtcttggtcaacaacacactgagttggcaatccttgggcacatggtttgtaccttcgcatagaaaacatgtgaccttgcgggtgggacactcccctggtggatggtcttcttcacaatgagggcagagtgtgagacacatgctagcaatgtgtccaatttctccgcaacgggtgcatgcttttaattccatctcttcctcgccgagacgtcggggggactcatattcataatccgaggagacttgatctgacccttcactatcagatactctgccaccatggcttaggaggtgctgggtcaactgccgtgcacctcggaaggtatttcctctttgacgtctaggaatagttatccctgctggaggccattcggtgctggtaatagtcatcttacgtacttcttcttcagttcgcatcggcgcttttctcttctgattcttactcttcttgcctttggcgtgcttagtacgtgaccccacgtggtacgaaaggctaggaggaaagcaattcccgggattcaatggattctcttcattgggctctctgctttgcacactaggctg

SEQ ID NO: 24128 - DNA, 15207 bp, Oryza sativa
gagggagggcaaatgggggggaaagagggagggaatcacggggaatatttcccccctcttgattgcacgcgggacggacgggagcggcgggattcgcggcggcggcggcgctagggcacgggcgaggcggcgggagcggcgggaggaaggggatgacgggtgggccccacccgtcagcgagggtggcgggcgggcccgcccgtcagcggcgcgcgcgcggggaggaggccgaatgggccgcggggaagaggggagagagggaaagggatgggccgagccggcccaagagggagagggggagggaaagggaactttttagggtttttctttttataaaaccattttaactttgtttatttcttcttaaatattatttgtgctctgaaaattccactaaaatttatttacgcattttaggcttttaggaaatatacaaaaatcctccaagccttatttgacttttaactttgcacattttaattgttggaggctttcacatggattttaattattctaggcataatttcaaggatgtattttagagtcgttttgggacgcgacattcgagcatatcggctttgcatcttctcggaggttgttgatgtggtctaacccctcgtttgataggtagctgatgttcaacaatcgatcggctgagtcctggcatctcataatactcccaagcaaagcaatatctgaattcctttaacagctctatcaacttggttctaaattctgaagataagttcttactgataaatctcggccttggtcgatcacctggaccaatgtcaatctcttccaaatcatcggccgacatgaaaccctgtccttgcttgtcatcgagatcatctactatgtccttggtgtagacgtttgaaccctccacgacgccctcaaaataatagcttgggctctccatcttcaattggctgtttatcacaatcggacacttttagaaaatctccatcccaaacttttctagataagcaatcgagaccatccatctcccaaagagctaaattggcactggcaacgttgactgacctgtcggctggcacgatttcaatcttgtcgccttgccactgaatcaagcattgatgcatggttgaaggaatacaacaattggcatgaatccaatccctaccaagcaacaagctgtaagaacccttcccaccgatgacaaagaatgttgtagggacagttttgctaccgactgtcagttccacattcaaaactcctttggtttctgatgtattgccaccaaaatctttgagcgctgttgtcgaaacaacaactgcatacgttgaaagacgtggttactcaacggtggttggaaagaaagtaaagtgtattgaattgagaatttttcttaggatccccctgttacatgaccctaggagactatttatagccttattacaggttcttgctactagggtttaggttatacaggggaatttacttggctgcccttatgaaagggacatttatgtgggtatacagtgtaattgaggtacatgggctcctaatgggccgtcaggcgattgttggctcaaaggccactgggccttcgtgaggccgaacttgctatggcgaagtcgtctcccttcgacatacactcttcgccttacatccttcgcccaagaggtctttggctctgcgaggcacccgcgctattctccgcccttcgcggtctttgctccatagtcttcaccatgggggcttcgccccaaccgatcttgacgtcttaggcttgaatccttactggtcgcatggtttcggcaggtttggtcgaagggcctcatgccataccgccaacaagcccctcacgggcaagggtgagataggagcttcggccgagaccgtgcagaccatgtggtatggtatgtggctccccctttcgaccgatgctcctgccgaaacctatcttattcgtgcaaagaaagtgtgttgtgttttttcggttggtattgttttgtagctttcgcctcttgcggatggtggagttattttttttatttttcccgggccgaaaggaacagtaatgggctttcccttcatgggcttattactgtgcggctcggtcgatggaaatttaccgtttcgcctaccctcgcgacacgtgacgctttattactggtgggtaggcgaaccattgcctgggtgggctatatattctctccctcttttcccttttcactgccacacttgtcattttcactgcgcgcgctctcttccaccgttctatcctttcacggcgccccttgacccctcatatctttcgcccgttctctttgttcgccactgcacacacccttcgccatggctcctcgcaagccaaaccacgggccggattgacgacgacaccacagcctttttggggatttctctcatagatgacggcgagctggcgaagttggtcagctctggggtgttggttgaggggcaggctttcgcccctgggaaggccgtggtaccgaagcccgtcgacaaccagacgtggtgttcgccggcttttttgagcggggcttcggtttccgtgcaacatgttgttgccggagatccttcaccttttccaggtagagttcccacagttgagaccgtcggcgctagtccggattgccatcttcgactaggcgtgccggacctccgggtttgaacccagcgccgaactcttcggcgccatattttttgccaccatgaattcgaagatggtggtgaccccggccggaacgaagaagacggtgttcgggagcgtgaacttcaacgttcgccccaagcgctccgatctctggcctgtgaatgccgccatgtcgaagtgcgatcgccactagatggcgaggtggttctatcacaccatccccttcgaggctgggtccgagtcggcgaaggccctccgatgtcggcgcatggtgattgcgccgaaccggaaacccaagatcgccgtggacggcgcaatggaggcacggttcgccttgctacgcaaggtctgctcccgcctcagctgccgcgacttggtggaggagttctgtatgcttcacatttttcccctctccctgtcgtggcaagtcacggttgaccaagacgaagaggtcgacggtttgccgaagctggttcttcctgaggggacgaatggtgagaccacgctttcgctatgcacttctgtgttttgctattttcccggttcaacgcttaatatggctacaccttttattttcatagtgttgactctcgatcaggccgacgctgaagcctggaagatgatcggcgatgtgtcggtcatcgagtacagccagctgctcacacgacaggctgccggtcgggcgaaccttgtttatgacggcgaactgcctccccgggcgaacccccacaaggccgacgacgatgcagggccttcgcgaaagggacgcgtggacaagtgaaactggcccctagaaagcgatgggtccctgcttgctccgattctgacgccgacgacgaggatgacgtcgaagagcgtgacgacgaggaggaaggggaggaagaagagggggcggaggctgcggccggaaaggctgcgaacgaggcggttgaaaaccgcgccgagacccctggctacactcctactccaagtccagggcataacgagaccggggtggagtcgaatagctcccaccttgatcgaaaggatttggagggagcgaaggtgctggttgcgttttcggcgggcaaggtggcgaagggggtagtccggttaagaaggccgccaagaagaaaggactcgtcgatgttgctcgtgtttttagcgacgacgagtcttttgacgaaaccccgacttcgcccgccagtcgcagcttagatctttcgaccgcccccgttgtttcgatcgacgctggcggcgcaggtggcagtgccgccgctggggcctcagcctccgctgatcgtgtcgtgaaggctgcagctagggttttcggaagccctttgcgtctgccagttgtttcgccgctagagaagccgaaggggaaggggggggcccatcgaaacatctgcctcggagtattctctcgcggcgccccacttcgcccccggcgattttgagacccgggcggaacttattccctttgttgagggggtaagcaaccttgtctctcctgccggcaccccgagcctattcaccgagctgaatgagttcgacgaagggtgttctgctattaaaagcttggcagttcgggtatgctattcgctctctcttcttgtttgtctttattttcatattacagatcccacaactaacatttgctctcttcatccgttttaccttacatccaaattcttgcggctcattgttcgacagagcgaaccgtgcgggcccatcttgacggatttaggaaccatcttcgggccaaggatgatgagattggccgcaagaatttggagatggaggccctcgccaacaccctcaaggaggcaaaggtggaaaacaagcgactccaagccgaactggagaagggaagagaggctagagctgaggtcgatcgcctcaaggccgagcttaaaaaggaaaaagcccattccgccgcgctaaccgactattacaatcttactgagccgaagatagaggctcttcgcctggaggttagcaaggctgaggcaagcgctgcagaggagtcgcaacggttttcgtgggagatggcgaaagccaccgagtccgcaaaaaggcatgccaaactctccgccttgccctttccgacatgggtgcgagggtgcgaggagtccctgccaaagatgcctctatctttgacttttcggagtggacgcaataggccggtggtgcggtttcggactacgccactgcgtacggtgattcctgtgcacatgtatcggcggcgttcactatgggccttctacagtagtttggctgtgagcatgtcgccgagttccctaactatgcgaagggggactgggaggttagtgcacaggacgtttcgcctacgctccatgcgtggcagaagcagttctggcagaaggatggccgatccactgctaaggcgcgccttttggagcaactggcgaaggccgaggcggcagaccaaggcgaaggcaaggatgcggcagaaggagggggtggaggcgatgcccaggatcacccagagttgtgaggccctccgccctttccttagatttttgtagtttttcttcttgcgtttgccgtgaaaggcgaacaatgtatatttggctgatggccccttacccttcttattgtagccgaaaatgaccttttggatatttggaatgtatgacttagtcttagtcactttttatggtcgatgcctttggtgcatgtgcttgcgccattttcgcattacgtaatatttgctctttttcgcccattcttactatgcaattcaccttttgccctatctgcactgtttagcagggtgttcgccgaaaattgtgcattcggcccctctctgggaattggcaaagcaaaaacgagaaattcgtggtgttgaagggtctgccaaaagtgcgatgctcgtttcggcctgtttatcgcgagatggtaataaatggccacagctataaggtttttaaggttgctggctggctgcgggtgcaccccgggcgaaccttagaagattacgatcgtgttcatacaaaatgtttggaggatatggttcgcttttggcgaagtcatcagaagaccgatcgacaggaggcgatctcccagcgtcgttacagtctagtctgtgtttcgcccccttctccacttagggtcgtgtatgatattagtagcgatgatgatcctagttcgcccaaccattccttagagagtgaggacggttgtgggggcgaagatataatttatctgtaggctgggctgcagagccatcgcttttctttacttgtaccatgttgtatggtttgtattcttggatgtgtattttcctcgaagtcaataaagatgtgctttatttccttttcactattttttgcattgtcacttctcgtgctttcgttaggtcggaacatgtcggcccctttgcgtgtattagcgaaataggtctatgacttttcagctttcggcttccgttttcgatctgttttattctacattgaaggaagcacttgtgctttcgttttgatcgaatgtaacggtgttcagttagttgtttctcgaaacaagatgttgcggtttcaacgttcggcgagcggtgcttcggccgattcgtttcgccccctggcattttcgctgatcaggcgtttgccttagggtttttccacagattatcaatcacacaaataagaaggcgagagacacaaagattttatactggttcgggcctccagggtggataatagccctacatccattttttttgtcttttttttcattttcctcttttttttgcatttttgtgtcgaagggcttacatagtgccgaaaggcttacataacaatatgtacatttttacatgttggcgatctgggtgccacccgttctacacatagaaacgctggagagaggcagcgttccaggaatggtcgaactcttcgccttccagtgtcgccaggcgaaaggagcccgtcctggacttgtgcttgatgaggtacggtccttcccacttcgattcaagcttgccaaccgccactgggttcgctttcttccttaggacaagatggccaggcaacagctccgtcggtcgaacttttttgttgtaagttgccgatgtgcctgtggcgtatttgcgcatgtgttcaagtgcttcgactctcaccccctccaagagttcgagcgacacttcgcgcccctcttcgcccccagagaacatcacccttggtgatgaaagatctatgtactagaattgccttgtaaggggagattggaatatctatgatcctaagagtgtggtgattgttttggtgattaatgacaacccattgttggaactaactatttccatgagttggtgagattaggttattccggcatcaagttaaaagattgaagctagaagatggacattataccttgatgaggagtaagtgaagacattgatgatgcgggggtatgaaatggctatctatggcaaaccggtgaagagaaagaaaggctcagctagaagatggacattataccttaatgaggagtaagtgaaggcattgatgatgcggagtatgaagtggctatttgtcacgtcctgataaattcatcccgaaataaaaatcatcttctaaaaggaataatagaattaattaaaattcgaaaagaaattggcaaaccctaaaatacgtacaagaaaaattcaaatgtggcccggagaatttttgttaaattctccttggtctaaaaggagccctcaaattttagtggaattttcagagcacaaataataattattaagaaataaacaaagttgaaaaggttttataaaaagaaaaatccctaaaagtcttcttttcccccttcctctcttgggccggctcggcccaactctccctccctctctctcctctccccgcggcccatcggcctcctccccgcgcgcgcgccgctgacaggcgggcccgcccgccaccctcgctgacgggtggggcccacctgtcatccccgacctcgcgccgcgtccgccgcccgcccgtgccctagcgccgccgccgccgccgattccgccgcctcccgccgtccccgcgcgcattaaagtggggggaatcactccccgtgattccctctctcttttccccctcttttctctctctctctccctcggatccgtttggaatcgctcccgcaatcttcgccggcgtcttcaatggcggccgagatctccgcgcccgtttcctccctctccggccgcgctctccccctcccgacgctatataagcgttccccgtgctctcctcctccgtttccgccactcgccgcctctcctccccgtcggaatcgagcccgcaccgtcgcaccttctctccgccgtcgccaccgagctccggttcgccgccgtcgtcgctccggacctcctccccactcggcgtcacctccttcggcttcgccgcgtccccgtcgacctcggccacccctccgcttcgctcgccgaccgccggagcaccgtcgtcctcgccgtcccgaaccgcgccgccgccttcctccgcttcggccgccgttcccgtcgtcgccgtcgacccggggtgagccgaagaccgccctttcgcttccctctcctctccgctctctcgggcgccgctccgccgcgccggtggtcgccggcggtgaccatcggggcgcggtcgtgccgcctcccgtcggccgtgccggcgaggccgccttcgggcgcgccctcgcggctgccaagtgggcccggccgtcagccgcccgcgcccgcgggtgcggctgacgcgtgggacccacggcgccgaccgccgccagccgcgtgctcccggtccaccgtggaccgagaggctgacgcgtgggccccactcccgtggacccggtccgcgcgccctctctctcggctgacgcaataaatgagtttttaattaaaatttaaatgaagaaattcgcaaatatccatttaaagagcatataaacttcaaatggccataacttggccatttgaactcggaattggaccgttcaagtctctaatttttccttaagaagtcaagaacccatttttgtgctttgtttctgctgttatgtggggtttagtagagtaaaagccttttcttttccgtcggtcgtgtagatgctgcagcttcggaagatccgctcttcgtggaagttgaagccggcgtttgggaaagcgagcaaggcaagtcacatcatccttgagcatattgaatcccagtttacaaaattatttttaatttaaattaatgcattatcgctttgtttaaattcccgcgttatcactgttttatttagccatgcctatttacctttgttatgaccatactattattgttattgatattattaccttgttcaccctagaataaacaaaaccccaactagtggaccctctatttatggttccactagtatgaatttaggtagatgcttcgctgattaataggacaacattaggtggttttataattttagactttgggtgtattcatatcatttggtcactatggaattgttggtttatggtggaattggacatacacctctcttcctctttcaaaacccctaaaacctgttttcggtggggtttgggtgcatgccagttgtgggaagtagcaccccggccactataaggattaagctcgggcctctgttgcaaagcactaccgtacttccacatgtctagtgggtaaggcttagtttgtggctcagtctggtcataaacaaaagtacacggattggagatggatgaagtcgggggtcgatggacattctccagggcaaatgaaggctacacgagctgcggcccggtagtcgagatgtcatggcagagggttggtgccctgctgctagggggctcagtcctgcctgcttgtcccgggtgtcccagccgtagggggattgggtcggtactcttgtttatggctaggatgggttgggaactatgtcacgtcttccgtccgtataccgtggtggtatgtggcacgtggtaacacgtgaggaagatgtgtcttgtgggtaaagatgtacacctctgatcagagtataatctattcgaatagccgcgccctcggttatgggcaagccgagcaatgtacccaagtcagtgttataattcttaaaatttgctcaacaactaaaatgtggaatggttggcctgggttggcttgggacgagctgggacccagggtcgggttgccagttcggtctgaatcatcgtaggccttgggttaaggcaggttcgtgagggttcacggccttgtttaataatactgtgtagctctaggatcgtctttataaatggctttgggcaactaagtgacttttaaatgctgtttactgcaaaacttaacccctttattattatccccttgtactcccttgcattaattatgcatctccggcgtggcttgctgagtactgtggttgtactcattcttgctctatctttctcccccccttcagtaagagaagctttggagaagaagtcttaggtggagtcttggcttataccccagttgagcgcctgtgaagatggagccgtaggccgctagtccgctgctgtttatttttgattgtcaggcctgaagcgcctttgtaataatgtaaatattatcgatgtaataaagatgtgtcttttatatcatgtttgtatggtgtaccccggcttttcctgggacggggattaatacactagcgttcgggaaaaggcaattttcccggtcgcgacactatttatggcaaaacggtgaagggcaagcaaggctccgctacaatggaccatgcgtggggtgaaggtcaagcaagaggcttggcgccgatggaccgaatccggtggtgaagggcgagtgaaggctttgtcatgatggtcgtggtggaccgtgcgaggccatttgaagctatgagtaatccgtatcaattataagaagaccgcaagatggaatgccgaggatcaagaggatttggttcttcgatgaacatcaagtcaaaatccaaagtgggcattgatcaaagcaaaggtataatttatttgggactaatatgcttaatgagtgtaggtgagaatagtcccaatagcgaaatggaattgacgttgacaaccctcaaggtgaagcaagaagatgacattcttagtggtgtattagtcccaggttgcttaggagtgggctaggatgcttggagaccccccaaaacaaagcggcaagaagacttggagccgagttagactagtttactttttcgctttgagtttaggaaaaaccgtactattaagaggggttccaagtgtggttctgagataacacaagtgctcttagtggtgtccaagtgttgaaatatttttaggagctgtttttgaaaatggctctactcgggacagagagtcccacctggaggttctgtccggaacttcctggcaccaaggtgaggttgaaaaatttcataagtgctgcccagaagttcctggcacttttacccggaagctcctggcaggtttccagttcaaacttgtgagtaacggctagatgacgtcacctagccgttatatatatggatctcgtccccaggtcaccctttggccattccactttagttcttgtgttccctaacttgttctagcatctcccaatgtgattttgcttcctccacccaaatcttgtgtacttcttgagtgagagagtgattttgagggtggtggtgaggattggagaaggttttgaaggctaggatgacttgagcacttggggtatctcgttgggctatcatttgaagcttgttactcttggagggtgacctcctagatggttaggtgtcgcccgcgagtttctaacaaggttgtggattgacccgggcaagtttgtgagggtgctattccacctccgaaaggaaacgaaatactcggtgagtggaatccgaggtgaggtttaggatgtcgtcttggtagagcaagcctcacttgtggtgttcttttggtgttcaagttggggatcttagtggtcacttgaaaccaaagagaagtacctaggggtgttggcttgaagaccagagacctcttcctaggccttttcttggtgaggtaaggggttaatcaagacccggctctttggagctcctcaacggagacgtaggattctcggtggagaatccaaacttcgggaaacaatcgtttgtctcctctcactctctttatctttgtaattgtgatgcttatctccttatttgcctagttgtgctatcatgtctcccattgtatgatcacttgtgctatcttgtgtattttcatgtgtattactcttgtttgagacatgttgtacctctctatggtttaggcttccttgtgatttaatttacttgttgtgaggtgcttgaaatagcaattcacaactgctaggaagttcctaggaagaacctcggaagttccgggtagctttctctgcttgtgagaaaaagctgccaggaagttccggaccttttgccatgaagttctgggccctgattttaaccgctgtgatttgaattaaattttaggagcgcctattcacccccctctaggcgacatcaaggccgtttcaattggtatcagagcctaatctccggattggcttaaccgcttggagagaagatgttgggggatggcgagaaaagtgtgaagggtaacatggttgatagtcaagatgctacaatgtcaacacgaggtgaaactttccttgaacttctcatgctagatggttcaaattacatgtcttggagtactcgcatgctttatgtgtttagggtcatgggacctcaaatatagcgagttgtagatgtgagcatttctcctcctagtgatcaaatgatatcatttgaagcataatagaaatgcatacatctcaatgctcaagctactaatattttgtttagtgctttgagtgaagatgtgttctaatccatcatgccacttgaggatgctcatctcatttggaacacactcgaggagagatatgacaagtccgagtgtgatgaggcaaagctcgctatagaagaaccacttgtggagtgctcaaattcatcgacaatttgtaaagagcctcaagtgattctatccaatgagcaagatagtcttgccacattcacctcctcaccaacacatgtctccattaaaggtaatgaaatggtgagtagcgtcaatgtggatacttctacttcctatagtgcttgtcgaactaatcttttgaaggtagaagtatgtgggaaaaaatggccaagtgaagaatttacatctccaagatgctcatcttcacacttggatgaatattcttgcatcatggagaaatcatatttggagaaagaaaatctagagcttaaagctcaacttgtggagctcactagcaagcatgtggacctacaagaaaaatatgatgagcttttgtgctctcatggaaatcttgtggattcacatgccatgctagaagtaactcatgaggtgatcataataacggtaaaatcctatgtgcctcatgttcaagttgactttacatgtgctaactcttgttgctctcaagcaaatatttttctgcgcactacatgtgacttggattatgtagggaaaaaggataaatacatcgatcatggatttgtttgcaatgctcaaccttctcaagataaccgtgaaagcatgctgaagaagcttgagaagggatcaaccgtagcttgcaccaagttctatcaagaagataacaagtccaacaacaagagcaaggggcaagatcaaagcaagaacaaagcttccattacttgcttcaagtgcaagaaaatgggacatcatgtgagagattgcccttggaagaaacagaagaagttgagcaagaatgaggatcttgctcacagttcttcaaatccaccaaagagggacactttgcctcaagttgtccttgcaagattgatgatgaagccacacttccaagaaagacatcaagaatcaacagaaggaagtgctacggttgcattgagaaggggcatgaaattggattttgtccgcacaagaaggatgatcatagcaatcgatcaagcaagaggcaaaccggcaacaagcaagtcaagaagcaagataaaagcaaaactcaactttgctacaattgccgggcaaagggacatattggtaaaaattgtcccattggtaaaattcctaagccaaacctctcatttcatcacaatttgcttaggaaggccaaaaatggcacttgtgctactagggtgattagttcgctacatgctagcacaaaggccatttgggtccctaaatctcttgtgactaacatccatggacccaacgtgatttgggtaccaaaatatgcttagattgtcaattaggtacttggaggtgcattggaggctcaactcatccttgaagaactaactttgtgcaatgagcaaaaaatggaatcaaggatgtgaataattgttctacattaagaaccaatgtcatctcggtaacaagtatttacattgaaatttctatatcctaaccttgtgtaggttattacttgtgtataatgtctatcctttaatggtgcttaattgattggcaaatttgatcttgagtaatgttttggttatctcatttagggggagtgttataacttctcatatcatttgcatcccttaaatgtgttttgattaaattgatgctataatagtcttcaaaattctattttggttaaaaagtaaaaatctataaagttagttgtgaaaacttggttttgtttgttcaaaagggttccttcacctaattgagaggtattttaaaagttgattcaaacaaaaatgagttttggcaagaaaattgtcacgaccggaattaacccaatgggcgttccttacgtgcgtgtattattccttgtcccaggaggcaaggtacaccaaaagttgatacatttcagagtttatcaagcggaagcgtaaatagttaaattattacatgggcagcgaaggcccagcacacacaaagacaaacgagaagcagcggaagactagggcgacgaccacatgcgcttgacggctggcacgagctagacaccaaagccttcatcttctaggggctcctcttctgggtttgggaaaaattgagcaagactgagtacaaccaccgtactcaacaagacacacccacaagtacagaataaatgcaagggagtacaaaggagttatactataaagggttagggttgcagtaaacagcatttaaagatatttagttgctcaaagctattttgtaaacacgattctagaactatacaatattatttatcaaggccgtgaacccacacgaacctgccttaacccaaggcctacgatgattcagaccgaactggcaacccgaccctgggtcccagctcgtcccaagccaacccaggccaaccattccacattttagttgttaagcaggttttaagaattaaaacactaacttgggtacattgctcggcttgcccataaccgagggcgcggctattcgaatagattatactctgatcagaggtgtacatctttacccacaagacacatcttcctcacgtgtaaccacgtgccacataccaccacggtatacgaacgga

SEQ ID NO: 24129 - DNA, 6968 bp, Oryza sativa
agcacagacgctgcggacctgaagcgtccctgcggccttgaccagactgcgcagctggcgtaggaggacggggcacacgggtcccttgctggctctgctgttgctgcggctgtgggacgcgcaccacgaattgaggtcggggcgcggagcgaggttgttgctgctgttgctgctgcgaggacgatccccctggatagggattggtgtagcggaccctttggttagcaccctgttgattgcggacattcgccaagcggcgcttgtgcgactccagttccttgtgcttggcttccaagcggatgctcttgtccaccagacgttggaaatccggatagtcaccggagactagacggacggacagctcagggtccattcctgccaagaacttctcctgcttttcctcatcttcccgcacatcctccagggcgtaacgggccaggttgttgaactcatgcaaatactccatcacggagcggttgccttgcttcaactctcggaattcccttttcttaagggccacgactccggcgggcacatgggttctccggaaagcggcggtgaagcgagcccaagtaataggctgcccctctggctgcgtagcctggaaatggtcccaccatagagatgcgggcccctgcagctggtgggcggcgaagatgactttctcctcatcgctgcactgcacagtgtctagctttttccccacggcatgcaaccaatccaacgcatccacggggttattggagctagagaaggttggtggacggatgcggaggaactcggcgagtttacagtgttgtgggggtggtggaggagcattctgttgtggcggattttggaggtggtggaggaaagcagtcatcatgttggcctgctgggcgaggatttgggtgagaatagcgttggtgtctggtggtggtggtggaggcggaggaggaggtggaggtggactgccatggttgttgtggttgctgccttcgggttggttgccatcaccggtattagcacttctcctggtcgtcaccatctgaaaaccccacacaggaccagcaaacagagagagctgacaattaaagctaaccacccacgactaccataattcttgaatttattactgctattaaattagttcattaaagttcaagttgcttaagcaaataaaataaagacaggctccgacacagttataccacacaccggcataaccatgccccacacgactccaacaagaagacaaacgagaaagaatacacgcgcaagcctactaactgctcgtctaccgctgcgacgggccaggacggaaggtgagcaacagcgcatcctccgtgctaccaacgccggaggcttccccctcctgaggaaccacgggcgcgggctcggcacgaggggtctcgacgaagcaagtccacgccagggactgacgaacaagctcgggcctggaggtgctcttgcgggcggtgatcttctggctgcggcagacgcggcgacgcttggggcgacagacctctccctgggcgatcttgagctgatgcagctgcgcctccactgcgtctagttccttcttcagctgcagattctcttgacgcagctccaggatcttcatgttgttctcgaccatcccacggcgcaccatctgatggaagtcgatacgagccgcgtcgtacgcctccaccatgcgcgccaggtgcatgatggtagcgtcatcctccgagctagcatcccggaaggtggcgaagtcgcgggctcctccgcggcgagggtggtagcggtagggcgagtgctgcaactcgtccgggtagcgctggtgaagagtgccgatggcgaggagagcggcgttctggcaagcggcggggaaagaatctccacccgcggtgactgccaacgaagtccgctcgggagagccagtgaggatcactgcagtaacctcccaagcagcgtggggctctgcatcgtcaccctcctgctccggaagcggcctgccctggtagtccactccatgtggataccccaggacaacgcacatgccccgcagctccaagacgaaaccagtcaggtccagaccacgacggctgatgctgccggccatctacaaacaaaaacaaaaagaaaaacaacattttaaaggtcagattttggcgataaatgaagcaacaggacagagagagactagaggattttcacaaataagacaggatttttttttatttttgaaaatattgctaaggcttgggatctacggctcgtcctagggtcaaaggtggctctgataccacttgtcacgaccggaaataacccaacgggcgttccttacgtgcgtgtattattccttgtcccaggaggcaaggtacaccaaaagttgatacaattcagagtttaacaagcggaagcgtaaatagttaatttattacatgggcagcgaaggcccagcacacacaaagacaaacgagaaacagtggaagactagggcgacgaccacaggcgcttgacggcagacacgagctagacaccaaagccttcatcctccaggaactcctcttctgggtttgggaaaaaattgagcaagactgagtacaaccaccgtactcaacaagacacacccacaagtgcagaataaatgcaagggagtacaaaggagttatactataaagggttagggttgcagtaaacagcatttaaagacacttggttgcgcaaagctattttgtaaacacgattctagaactatacaatattatttatcaaggccgtgaacccacatgaacctgccttaacccaaggcctacgatgattcagaccgaactggcaacccgaccctgggtcccagctcgtcccaagccaacccaggccaaccattccacattttagttgttaagcaggttttaagaattaaaacactaacttgggtacattgctcggcttgcccataaccgagggcgcggctattcgaatagattatactctgatcagaggtgtacatctttacccacaagacacatcttcctcacgtgtaaccacgtgccacataccaccacggtatacggacggaagacgtgacatagtttccaacccatcctagccatagacaagagtaccgacccaatcccacctacggctggaaccctcgggacaggcaggcaggactgagcccctagcagcaggacaccggccctgtgccatgacatctcgactaccgggccgcagctcgtgtagccttcatttgtcctagagatgtccatcgacccccgacttcttccatctccatccgtgtacttttgtttataaccagactgagccacaaactaagccttacccactagacatgtggaagtacggtagtgctttgcaacagaggcccgaagaccggtccttatatggccgaggtgctactatcaaaaccatgcaccccgagcccagcctaaaactattttggggattttgaatagaaggagcggtgtgaagccaattccacaataaccaaaccattccatagtgtccaggtgatatgaatattcccaaagtctagagttgaaaaaccacctaatgttacctaattaaatagcgaagcatctacctaaaatcatactagtggtaccatgagaagagtgtccactagttggggttttgtttaatctagggtgaacaaggtaataataacaataacaataataataaggtcataacaaaggtaaataggcatggctagataaaacagtgataacgcgggaatttaaataaagcgataatgcaataatttaaagcaacataattttataaactgggattcaatatgttcaaggatgatgtgacttgccttgctcgctttcccaaacgtcggcttcaacttccacgaagagcggatcttccgaagctgcagcgtctacacgaccaacggaaaagaaaaggcttttactctaataaactccatataacaagcaggaacaaagcacaaaaatgggttcttgacttcttaaggaaaaattagagacttgaacggtccaattccgagttcaaatggccaagttatggccatttgaaggttatatgctctttaaatgaatatttgtgaatttcttcatttaaattttaatttaaaattggatttattgcgtcagccgaggggaggggcgcgcggaccgggtccacaggagtggggcccacgcggcagcctcacggtccacggtggaccgggtgcacccggctcacaccggccggcgccgtgggtcccatgcgtcagccgcatccgagggcgcgggcggctaacggccgggccccacatggcagccgcgggacgcgcccgaaggcggccacgccggcacagccgacgggaggtggcgcactcgtgccccgatggtcgccgccggcgaccaccggcgcggcggagcggcgcccgagagaggggagggaagggggaaacgaatcggcggtccacggctcaccccgggtcgacggcgacgacgggtacgacgaccggagcggagagaggcggcggcgcggctcgggtcgacgggcacggcggcgttccggcagtcggcgaccgaaacggagaggtggacgaggtcggcgaggttgcggcgaacccgaagaaggcgacgccgaagcgggagaaggtccggggcgacgacggcggcggaccggagctcggcggtgacggcggagagagagagcgacggcgcgagcttgattccggcggagagagagagcggcgagtggcggaaacggcggagggaggcacggggagtgtttatatagggttgggagggggagagagcggccggatgagggggaaacgggcgcggaagatccggccgccattgatgcgtcggcgaggttagggggaaagtttccgaacgaatccgagggagagagggagggaaaaatgggggggaaagagggagggaatcacggggaatatttcccccctcttgattgcacgcgggacggacgggagcggcgggattcgcggcggcggcggcgctagggcacgggcgaggcggcgggagcggcgggaggaaggggatgacgggtgggccccacccgtcagcgagggtggcgggcgggcccgcccgtcagcggcgcgcgcgcggggaggaggccgaatgggccgcggggaagaggggagagagggaaagggatgggccgagccggcccaagagggagagggggagggaaagggatctttttagggtttttctttttataaaaccattttaactttgtttatttcttcttaaatattatttgtgctctgaaaattccactaaaatttatttacgcattttaggcttttaggaaatataaaaaaaatcctccaagccttatttgacttttaactttgcacattttaattgttggaggctttcacaaggattttaattattctaggcataatttcaaggatgtattttagagtcgttttgggacgcgacaaaaatgattttagcctctaaatctagatgctaagatcttgtttttgcttttaaagtgtgtttatgtcaaaatgtatctgaaaaggtttttgcaaataatccttttgacaagccactagagttggtcatttcaaatctttttggtatttatatctattttatatgataaatgatttgaaattatttgatctcaaaattcacatgaaaatttatattgaccatatttggtcctattatagcatcgagtgagtttagccactagaaccatatattgtgatttatattggttcatggacgtatttcaaactcataaaaatcaaattgtctccaaaacatctcattttgctcaaaattgcatttgggtcattttgttggaacttcaactttttatctttcttcgagcaaggaattaaacatgaatcctttaaaagtgattttattgatgctaggtcaattgtgaacgaacatatggtgatcctcaaacaaatccctcacacgagcaccatggattttgatggttttccaaaaactcggtttttacctttggttttccaagttctttaaatttggtgatgaaatattaaatattttggttatttcttgtttcatctgatttcccatgttgttgtgagctcgtggttcaaatttcgtgaaattccgagtttgtttgggtgattttgagcaaaatcttgaaagttctcgcgtgctgattttgtctgctaggaagttccagacaaagtacaaggaacttccggtcaggactctctgtggagacaaagagggccgataggaacttccggacaaattggtaggaagttccggtccaacttgcctcaaaacattgttttaaaatattggtttaaccttaaagtttgttttggcccaaaaacgtttagctcaagcttccaaaatttaaaagttcaaaagtttagatgacatgttttctaaaagggtctcttttggtaaaaattcaaaattcttatttgacggtccaaaatttgtgaaaaatgtttcaaagggcttcatcttttatttcaaatgttctaaaaagcttttggagtgaaatttttgtttttggaacaaaatgtcatttatccaacatgttgttttgatcatatttggtctatatttgcatatggtgggtttaagcaatttgattaatgttctttgtgaacattggctcaatttggtatttctaacccatcttaagtctttccaaatgtcaaacttcataaaaaatcttttggttgaaattcattgttttaaaagtcattctctttatcgaaaactcatttagtgaaattaattttggagaagtttctctcaagttcaaagatcttttttgcaagcttgaattatttcagactttttctctcttttctcaacttgtagaaattttcagtaaaacttgactttgagctaatttgtgatctttatatctcaaaatgggttgtgttgttgtgatttggaaagagcttacattgtgactttcgattctctatagttggacttcactgccaaattttgtctaaattatcaaag

SEQ ID NO: 24130 - DNA, 5439 bp, Oryza sativa
  unsure (1)..(5439): unsure at all n locations
aactaactatttccatgagttggtgagattaggttaagttccgccatcaagttaaaagattgaagttagaagatggacattataccttgatgaggagcaagtgaagacattgatgatgcggggtatgaaatggctatctatggcaaaccggtgaagaaaaagaaaggctcggctagaagatggacattataccttaatgaggaataagtgaagacattgatgatgcggagtatgaagtggctatttatggcaaaacggtgaagggcaagcaaggctcggctacaatggaccatgcgtggggtgaagggcaagcaagaggcttggcaccgattcaccgaatccggtggtgaaggacgagtgaaggctttgtcatgatggtcatgatggactgtgcgaggccatttgaagctatgagtaatccgtatcaattagaccgcaagatggaatgccgaggatcaagaggatgtggttcttcgatgaacatcaagtcaaaatccaaagtgggcattgatcaaggcaaaggtataattgatttgggactaatatgcttaagtgtaggtgagaatagtcccaatagtgaaatggcgttgacgttgacaaccctcaaggtgaagcaagaagataacattcttagtggtgtattagtcccaggttgcttaggagtgggctaggatgcttggagaccccccaaaacaaagcggcaagaagacttggagccgagttagactagtttactttttcgctttgagtttaggaaaaaccgtactattaagaggggttccaagtgtggttctgagataacacaagtgctcttagtggtgtccaagtgttgaaatatttttaggagctgtttttgaaaatggctctactcgggacagagagtcccacccggaggttctgtccggaacttcctggcaccgaggtgaggttgaaaaatttcataagtgctgcccggatgttcctggcacttttacccggaacctcctggcaggtttccagttcaaacttgtgagtaacggctagatgacgtcacctagccgttatatatatggatctcgtccccaggtcaccctttggccattccactttagttcttgtgttccctagcttgttctagcctctcccaatgtgattttgcttcctccacccaaatcttgtgtacttcttgagtgagagagtgattttgagggtggtggtgaggattggagaaggttttgaacgctaggatgacttgagcacttggggtatctcgttgggctattatttgaagcttgttactcttggagggtgacctcctagatggttaggtgtcgcccgcgagtttccaacaaggttgtgaattgacccgggcaaatttgtgagggcgttattccacctccaaaaggaaacggaaaactcggtgagtggaatccgaggtgaggtttaggatgtcatcttggtagagcaagcctcacttgtggtgttcttttggcgttgaattacgggactttagcgctcactacaaaccaaaaagaaggccctgggggtgtcggctannncccacatacctattcctaggccgtttccttgatgaggcaaggggttaatcaagaccccgctctttggagctactggtcggggacctaagaatatagacggatactactaactctggaaaacatatattttgtctcctctcactctctttatctttgtgattgtgatgcttatctccttatttgcctagttgtgctatcatgtctcccattgtatgatcacttgtgctatcttgtgtattttcatgtgtattactcttgtttgagacatgttgtacctctctatggtttaggcttccttgtgataagtacgataagtccaaccattgcccatgctggcttgtggtaagtacgataagttcttctagggcataccgcgaaccggtccttaattgccatgggtgcgactagcaaaaccatgcacccacagcccaccattcagtcgcattttagttggataattacgaccatgaagcatggctagatgtctcgagcacgcagctcattctgatactaaaaaggtctaatactgtaattatcccatcaactgagctagtggtaattaagcatggctaagcatataattctagctaggtcacataagtaacatgagctagtcgatttattacccagggttgacaaaggacagatatcaagtaaacatggcacaagcaagcagataggtaatacccggatcccatgtaattagcaagacatgtatgtttatttgcaaatggtcaaacatttataaattgggatcaacatgctcaaggggaatgtgtgacttgccttgcttcttcaaaacaatcttccgaactcttttcctcgcgaccgtggacttccgaaacgacggattctacacgctagcacgcaaaacgaggaaaaactctaataaaaaccaaggaaacagtacataaaaagtaaacaaacatgtagatctcaattttagatgaattttgcaagttgaatggcccaattcggagttcgaatgaattagatatgaattttagaagttttgagccatttaaatgaatttctagaactaaatacaatttattgtgcaattattatttatttttacaaaggaaaaggggactgctgccgtcagcaaggggtgaggcgcggaccgcgtccacgaaggggcgggccccatacgtcagcgacacaaggggtaccggcccaccgtggaccgagtccacggtggcgaccggccactcggccgcgcacccaatggcccggatcggccgagaccgctcggacggccgagtggcacggccaggcaggaatgcacacaggcggcagcgaccgccaagcccagaccaccggcgacgacgccagcgacgagcggcgacggcatgagaggcggcgaaagagaggatggggaggggatgctcaccaagcggcacggcaccggagagaggcgagatggtgacggcgctcctcgggcttgcggtggaggggttaactggcgccgattttcatggggagagtgggggaaatgggtgcggggtggatgtggtctttcggtagtggattggggaagatgagcgatggacggggtgtgacaacgcgcggcgaggccggcggcgcaaacggcgcggcacggggacggcggcagcggcggcagcggccgactggagggtcgccggcgagcggcagcgcttgggctcgtgtgaggagagcgggagagagcgcagggagctcgggaaaaatgaggaaatgggagaggaggactcggggatcatttttatagcgcggggagctcgagatcgaggacgggaggggcggatttgaaggaggaatgggtgccggcgacgtgggcgaggtggagctcgaattggcacaaaaatttggggaaaaatgggggagaggatggaggagtgggcggcaaccacgtccgcacggtcggacgtgcgcgcgggaggcaggaggtggcagttttagcggtgacgtggggcgacccgggtttccatgcggttgccggcggagaggctggaggaagggggaggagctgacaggtggggcctcaggtccacctgtcggtgagggaaggagagaggaggccgggaaggggttatgcagacttagggggagacggggggccgagctgggccggcccacgagaaggaagggggaaatgagggagggcgagcggaccaaggggaggaggagggggattgggccagggcggttcaaaaacaaagagggggaatttttattgcttttatttttattttaattgatgatatgaactttgtgactttaaaattaactattgagcttcgaaaattcgcgggaaatttcagagagtatttagggcacaaagaatattacaaaatattctcggccaatgatttttaagggaaaattttaatttcccccataatttcacttgattaaattgctttaacttttatttaatttctagaaaatcgggggcgttacaaatctaccccccttacaggaatctcgtcccaagattttgggatggctagaaagaaagctggtgctggcgggctgtctgactgatctgctgacacatgctgcctctttctgattcaactgactgattgctcgatgaaccaaacctgcataagcttgctgttctgttgcttcccatacactgaatagaccgactccgattagtctgaccttgaccaaaattgctagtgctcatagaatttcttttctttggactgaaccactagcattgtctcccttagtaacctgtgagctcaccaagcatactagaaacttgcaaagctttcatgaaaccttgtatgtggacttgcatgaatgacagattctgactttattttaacctacttctgacgggaaccacaggtatcctaagaggctgcttgattggtctttcggctgaactgcaactgttcttggcactgcttgcctaagctgaacagttgacttggcctcacgggtttaccctggaatccaatcagataacctgagaccggtgtaattctgttgacgccctataattggcttcttcaaatattacccaaatggctgcactgagttgaacctccaaatgaaacgacgacgaggtgagccaacactcatctctgagacctaccccccttacagagagtagtcttactttcgcctgactgggatcaattgaactgttgtctttgaaatgtaaccaacacttttccgatttacaaagagccctggctttgaaaactgaaaacttcatcgatcaatcaaaatagagcaatgacgatgcactttcattctagcaagacttggaacttaacccttagctgaggataggaaagtccacataaaagagactctcacttagctcatgaacatattgactcttgactaactttcccatcagttctaactgctggcttgattgtcctgcttctggcctgacttcggtgtcgagttgcatagttgatttctgaaaactaacctgaccgactctgcattggaactgatgtaacttgaggagctcgagatcgaggccgggaggggcggatctgatggaggaatgggtgccggcgatgtgggcgaggtggagctcgaatcggagcgaaaatttggggaaaaatgggggagagggtggaggagtgggcggcgaccacgtccgcacggtcggatgtgcgcgcgggaggcaggaggcggcagttttagcggcgacgtggggcgacccgggttgccatggcggttgccggcggagtggctggaggaagggggaggagctgacaggtggggcctcgggtccacctgtcggtgagggaaggagagaggaggccaggaaggggttatgcagacttagggggagagggggggccgagctgggccggcccacgagaaggaagggggaaaggagggagggcgagcgggccaaggggcggaggagggggattgggcc

SEQ ID NO: 24131 - DNA, 4675 bp, Oryza sativa
cagttagaacttgggacttgatagcagtgcgagtgacaaaatgcaagtcgaagggagatagctccgccgcccatttgctgagccgcccagtgacttccttgcctcggagtacttcgcccaaagggtattgtgatggcaccgtgactttgtgggcctggaagtagtgtttaagcttgcatgaagccatcaccagggcgtaagcaagcttctccatttcaatgtatcttatcttcactccttgcaaggcttcggagacgaaataaactggtttctggcctgactctgtctcttggacaagggcagcactgactaccactggcgaagctgccaggtatagtagcagttcgcttcctggcgccgggctgatcaaagcgagcagactttgcagatattgctttagcgcatcgaacgctgcttggcattcgggtgtccaggtgaattttcccgtgccccggagggtcttgaagaagggcaaacctcattcggctgcctttgagaggaatcgattgagtgccgcaattcggcctgcgagcttttgtacttcacgtactgtcacgcccggaatttctatccaaaattccaaacgcttacatgtgtgtgaaccctcgtccaggaatcagccgaggcacacaataacaaattgataattgagtacaattattactctaattaataagcgaacaaaatgtcattacagaggtagatagttcctctcaatcaataaaaatctaagcagcggaaagataagataaacggcgcagacgactccactccacaggcagcttgaccagggctacaccaaatcctccacaccatcagcatcactgtagaacctttcctctgatgaatgattgaaaggtgagtatatgacatactcagcaagccacgcagcaaatatgcaagtgcacaggataacaaaggatggcatagtagggtttcatttgcataaacagcatttgataaacatttcagaatttaataaaacagttaagtaataattaaacaatattaatccaacgctatacaacataccctgttgtataggcccaaccattctgaacaaccatcccggctgtacagttctatctccaaaccaggaatataccattccaaaccaggagctaatcaaattattaccagttatagcatcttttattaaggtgagaagtgtgagactaatcatgaaagacattgttagacccgcccataaccgcgggcacggctattcgaatagttttactctggccagaggtgtaccactgtacccacaagacacagccccacatcatgtctccatgtgcctcaataccaccacggtacctcggaaaggagctgtgacaatacccctcgcacaacacaatccaccgcagcgcacctttcctggatcataatcacccccttataaacaaggcatggactccccagcgacccccgtgggcttatctccgccacttctcagtctggtgctccgcaatgaaccatgctataccaaaggtaaagccgttgcccacgctggcttgtggttggcacggttaatgtttcacaaccgaaactcgtgaaccggtccttaattgtcatgagcacgatctctcaaaaccatgtgctcacaacccaacattatcaggttttaattggcaaataattaattaaccaatcacgattgaccatcgtgaactatcagtaagccatcattaattaatagtgaatcataagttatcccaatagtgtgctaatgtttctaagcatggctaagcaatcacatctaatatctagctgaaccaatatatatagcccaactagtcgagttataaacacccaaggtatcaaggaataaagtaagcaagaacaaaggggctataacaaacaataggttaattccacccaatgacattcgaaaataaatgcaatagttgaatagaaacagtagctttaaacgggatcaacatgctcaaagggttgtttggaatctgtgtgacttgccttactggccttggaactcttcaaattcttctcctgcgaaaacggactctccggaaacgtcggaatctaagcaaaaaagagcaaaatcaccaaacagcacataaacaagcatgaacagtacatgtggatatttttaacatgtagatctcaattttagaaaaatttagagacttgaaccaactaaatccgagctaagatgaattagttatgaatttttaaagattaaatcggattaaaacacttatatgggttttaattgaattatgacgcaataatgaattatttttgaaaaggaaaaagggtttattgcgtcagcggctagggtttgcggtggaccgggtgcacggcagcggttcgcgggaacgaacggtcgggatcgatcctatccaaaacggacggctgagatcgaacggtccacgaccgggccacggcggacggtcccgatgacgtcagcggcgacgtcacctccggcggcggctcgggagcgcaagctcgccggcgaacgacggcgctacggcataaacggagggcaccaggacgtagagcgcgacgcggcgaactcaccgatgaccaaaacgacggcggaagatgaacagacggcggcggcgtcgaggaaaaggcggcggggtccttcggcttgacgacgacggcgatgctccggcggtctacagcgacggcgaaggggcggacgaggacggcgacgcgatgacgaccacgatggcggtctccccgagcgacggcgacgactggaacgacggcgaagcacggctggagcgacggcgacgacaacggcacaaggtctcacggcgctagggcgcttccgacggcgagagacgaaggcaagggtggcgacgggtagcggcggacttggggatccttttataggggcaaggaggcggtggcgaaggcccacggcgaccagcgacaagaaggaaaggttagggttcggaggagagagaccgatccgaatcgacctcgaatccatggatttccaaacgaaattagccgatgattccaaaagagaaaaggtggaggagatcccagagatcatttcccctctattgatttcaccggagaaggaaaaggcgcggccgaacttggaaggagacggcggcggcgcggcgctagggttcgggcggtggtggcggcgcgaggaagacgaagattgacaggtgggacccacctgtcagcgacagcgagcgcgcgcgcgcggacggctgcggactgggccgacttgggccgggggaaagagagaggaggttttgggccgactttcggctcaaagctaaaagagacttttaaaaacctttttcaatttaaattattcatgaaatgcaattccatttattaaaaatacttccttagctcaaataaatcgcagaaaaatctaggaattatagaattaaacaaagtatttaatgaaattttatctggccccattttatattggaatttgttaattaaaattaaattttctcttctagccttttaaaaataattccaattaaacaacaatttatatatttaggatttgtagggtgtgacaaacctaccccccttaaacagaatctcgtcctcgagattcggaagaactggcgaacagatgcggatgagctgacttcaattcatcttctcgttcccaagttgattcttcttccgagtgattactccattggactttgtaaaaacggataactcgatttctggttcttctctcttctatttccaagatacggattggtttctgaacataggtcagatcctcttggacttctatctgttcaagattagcttcttcggtaggtacccttaaacactttttcaattgcgacacatggaacacattatgaactcctgccaaagattgaggtaactccaactgataagcaacctctcctcttctattgacaatcttataaggtcccacaaaatgcggtaccaattttcctttggtgtgaaaacgatgaactcctcgaagaggcgtgacacgaagatacacataatctccttcgtcaaaacttagatctctacgacgattgtcggcataactcttatgacgagactgggccacacgcaacctttcttgaatgattttcaccttctcttctgcttcccttaggatgtccgtcccgaaaacctgacgttctcctgtttgatcccacaaaagcggagtgcggcacttccgaccatacagtgcttcgtaaggagccatctgaagactagcttgataactgttgttgtacgaaaattctgcataaggtagattcctatcccaacttccaccgaagtctaaagcacaagctctcaacatatcttccaaaatctgattcaccctttcggtttgtccgtctgtctacggatgataagcagtactaaagttcagcttagaacccatctcttcctgaagcttcttccaaaaatttgaagtaaactgactgcctcgatcagacactattttcttagggacgccatgcaaacacacaatccttgccatatacaattccgccaaccaacttccggaataggttgtctttactgggatgaaatgagccactttggtaagtctgtcgactaccacccaaatagagtcatggcctgatgacgttctgggtagaccagtgatgaaatccataccgatttcctcccatttccattcaggaatcttcaaaggctgcagcaaaccggcgggtttctg

SEQ ID NO: 24132 - DNA, 8046 bp, Oryza sativa
acgagtggaacgacggcgaagcacggctggagcgacggcgacgacaacggcacaaggtctcacggcgctagggcgcttccgacggcgagagacgaaggcaagggtggccacgggtagcggcggacttggggatccttttataggggcaagaaggcggtggcgaaggcccatggcgaccggcgacgagaaggaaaggttagggttcggaggagagagaccgatccgaatcgacctcgaatccacggatttccaaacgaaattagccgatgattccaaaagagaaaaggtggaggagatcccggagatcatttcccctctattgatttcaccggagaaggaaaaggcgcggccgaacttggaaggagacggcggcggcgcggcgctagggttcgggcggtggtggcggcgcgaggaagacgaagattgacaggtgggacccacctgtcagcgacagcgagcgcgcgcgcgcggacggctgcggactgggccgacttgggccgggggaaagagagaggaggttttgggccgactttcggcccaaagccaaaagagacttttaaaaacctttttcaatttaaattattcatgaaatgcaattccatttattaaaaatacttccttagctcaaataaatcccagaaaaatctaggaattatagaattaaacaaagtatttaatgaaattttatctggccccattttatattggaatttattaattaaaattaaatcttctcttctagccttttaaaaataattccaattaaacaacaatttatatatttaggatttttagggtgtgacacgtacgctcgacgggggattcatttgctgaatggcatcgattttctcggggttcgcctcaatgcccctttcagaaacaaggaaacccaacaacttgccgcgcgaacaccaaaaacacacttatcaggatttagtgtcatacccgccgcgcgtaagttgtcgaaggtctcctacaggtcggacacatggtcgaaagccttgcggctttttacaacgatatcgtcgacataaccctctacatttcaccccaactgcttgtaaaggaccttgtacacctgcctggcgaaggttgccccggcattcctcaggccgaaaggcatcctgaggtggcaaaaggtgccgaatggtgtgatgaaggatgtcttggggatgtcggccgggttcatgtggatctggtggtaaccggagtacgcatccaagaagctcatgagttcgtagccagctgtcgaatccacgagttggtcgatccgtggcaaggggaaatcatccttcggccatgccttgtttaggtttgtgaaatcgacgcacatgcgatatttgtcgtttgatttccgcaccagcaccggattcgccagccactcggggtggtcgatctcttgaatgaccctagccttgagcaatttttggacttcggcttttgctgcttcttggagatcaacggacatcttgcgtagcttctgtttccttggcttggcatccggcatgactgccaggtgatgcatgatgagatctgtcgaaacacttcccacctcatcagggccccaggcgaagttatcaatgtttttcttgagcacctctaggatgttctcaacctcttcttcgcccatgtcgccccccagcgatacaagctttgtgggatcggtatcatcaatctgtatcttgattaccttgccgtgaggggcgggctttggcgcgtgcttcgccggatcatgtggttcggcctcaacattatgcacagctctgttgattatggccaaatcgccctttgaagcggccgaaggctggagccccttgaccacgatcactcctaccgggccaggcatcttgagcttgagataattgtggtgggaaatggcttcgaacttattgaaggtcgcacagccgaagatggcattgtagttgtacgggatgtcgacaacgtcaaacattattttctcttcgcgtctgtttttgcctgtgccgaaagctaccagcaattgcgcttggcctagaacttggactgactcaccgccgaaaccacggagcgatgccgatgcttgggtaagggctagggtcggtaatcccatcttggcatatgctccagcgaagatgacatcggccgaactccctccgtcgactaagattcgttggacctcgaagccagctatctcggccgagatcaccagagggtcttgatgcgggaacattactccttcggcatcttccggcccgaaagagatttgctggttcagatattgtggggccccttcgcccgccgaagtgatgttgtggaccatttgatgctgcatcttcttttgtcatttcgacagctgattcggcgggtcggcccttgtaatcacttggattactcgacgctgcacatcttggcgctgttcggccgggggtgcttgttcttgaacgtcttcgcgaggtgcttcgacagctgctccctgctgcggccttggatcttgcacgttgccacgctgccgaatgtttcagcattgctccgtggtgtgcaaagagcgtccgtggaaggcgtagtaaaggtctttttggaccttcttgcgaacgggctgctgatggttgcttgcttgctgggaatcgaactccttgcggagggcttgaacttcttcgacagccatcacagccttgcccgcacggtcggttctgaacttcctccaagttatgggagcttggccttgccttggcggttatccttggttcgccggctgaggctggcgaacagcgagaggaggtggttcggcgacctgagcttgtacttgggctttggcagcggcgatggaggctttatcatactcagcttgaattgcttgccatcgcttggaatcctcttcgccccatgcgtacacgtcaatgatgcgaagcaggtgttcaagcgtctgcggctctttgttggcgattttttttgtgagttcgccctcgagtatcccggccgaagcggcattgatgacagacgcctcggttatgtcttgtacttgacaccgggcttgcaagaagcgacgcatgtactcccttatcgattctcccgacctctggcgaatgccgagtagatgttgctgcgtcttcggctcctcgtaggtgactcgaaagttaaggacaaagacatcgcgcaattgctcccatgagtagatgctattagctgctaaattgaggtaccaagaacgggcgatgctgtttagagcaagatgtattacctttgccttggtattttcgtcgccatgagccgcttcgatcgcagactcatagatagagaggaattcctttgggtcaatttcgcctgaatagcgtgggacgggtgggaacttgaactggggtgggattggacgggtcttgattcccccactcagcagtagccccttttcgccccctgccctgttcacggcaccttgctacggatacggtgtggcgaaaggcgaagtcacggcctgcgcgtgaggttgggccacggtgttcggctgcccagctccgattggtgatgcttggtgagctgccatggatgggtcgaatgttggctggggccatgccatggcggactggtttggtgcttggtttgccacgaagcctagtgttggtgcttgcggcggaacggttggtgcctgagcaatattgttgaagtcgaactacggtccttgactccaaggcaaagcccccagacccggctgattcgacgacaaccaactaggcgcaccatgacctgtactcccctccggctgggccgaaggggctatacctgaaatgctgtggggttggctaaattgttgaatgaaagcttgaagctgcgcttgcagagccgaagccccttctgccatcgcttgtgacacttggccaggcggttgagagtgtgcttgggtagtgaccggctgagcttgcagttgcacgtgagggcccggatgtactgctgcggtcgaaggctgcccagcgaagtatactagcgcttgcgtggcttgtggtggaaggggttggatcggtgcttgtggatagacttggggtgggatgtagcctgccgaatactggaggattggggccgaagcggccttggcccgcctcgctgcctcgtacgcctgctgctgttcttgcatctgccgaagcatgtcttggagtcatgtcatgttctgtcgcatggcttccatgtcggcttcggcttgtgtttcgggatcagggttgacttgtacagcggtgagcgcagtcgaggccgctgccagctgcgacggagcggcttggggcaccagcagtttgcttgtcgaaaggatctccgccctggtttggagtgcccttgccgccgctgccgccttcgctgcttcagccgtgttcggcacctgccccaacgaggcggcaggagccgaagacggtagtagcggcgctggtgccgaagccggtggcgctccgccatcttcggcgatgggcgccgaaggctctgctcccttttcggcggccatcccccctccggcttcgctttcctttcgccttgtaaccttctccttcacgactctcttcggtggcattcgctctcagtggtttcgcttggaggtctccacggtcggcgccagctgttttcgaaacgacaactgcatacgtcgaaagacgtggttactcaacagtggttggaaagaaagtaaagtgtattgaatggagaatttttcttgggatccccctattacatgaccctaggagaatatttatagcctcattacaagttcttgctactggggtttaggttatacaggggaatttacatggctgcccttatgaaagggacatttatgtgggtatacagtgtaattgaggtacatgggctcctaatggtccgtcaggcgatcgttggcccaaaggccactgggccttcgtgaggccgaacttgctatggcgaagtcgtctcccttcgacatacactcttcgccttacatccttcgcctaagaggtctttggctctacgaggcacccgcacgattctccgcccttcgccgtctttgctccatagtcttcgccatgggggcttcgccccaaccgatcttgacgtcttaggcttgaatccttactggtcgcatggtttcggcaggtttggtcgaagggcctcatgccatactgccaacaagtaccatgtttgtcttgatgaaatcctcagcatttctacctagcttcctaaatgtagcataaggcatcaaatttaacgcagccccaccatcgaccatcatcttagaaatcggcttcccattgacatagccgttcacatataatcccttaagatgccgattctctatcccttctggcttctcaaagactgcttgttctggtaataaaatcaatttagccgatttttcttcaactttatcaacatcggcttgtttgactccaaattcagcgggcaacgtgaaaaccatgttaaccgatgcagtcaccacactttttcctttagccaatctttttgcttcatcggctgtggcttcatcggctgcaggaacttgaatcttaacacgccactcctgctttggcttcgtcttctttagctgatgattgatttcttgctcaacttcctgaatgtcacgcccataaattcactagtaatttccgaactaatttgtgcataaaaccctcgtccaggaatcagccgaggtacacaaactgacaatttaatatacagattcatcaataatacaatgttacatacttaaaaaagaaaagaaaactgcagcggaattacggtctagcgaagctccggctccactccctcaggcagctcaactggggtataagccaaatgtcttctctatctggattctttttcttccactgaggtttgattgattattacaatgtgagcatatgacatactcaacaagtcacacagcaaatatgcaagtgcacaaggataccaagaatggcataatatagggctcatttgcaaaagcagcatttagcaaacattttagaattataaaacagtagagtaattaatcatcaattttaatcaacactgaacagcacacccatgctgctcaggcccaaccatcctgaacaaccatacccggctgtacagatctatctcaatccaggaatgtaccattctaaaccaggagctaatcaaattattaccagttatagcatcatttattatggtgagaagtgtgagactaatcacaaaagacattgttagacccgcccataacctcgggcacggctattcgactagttttactctggccagaggtgtaccactgtacccacaagacacagccccacaacatgtcaccatgcgcctcaataccaccacgatacctcggaaaggagctgtgacagtacccctcgcataacacaatccaccacagcgcaccgttcctggatcataatcacccccttataaacaaggcatggactccccagcgacccccgtgggcttatctccgccacttctcagtctggtccccgcaatgaaccatgctatacaaaaggtaaagccgttgccacgctggcttgtggttggcacggttaatgtttcacaaccaaaactcgtgaaccgatccttaattgtcatgagcacgaccatcaaaaccatgtgctcacaacccaccattatcaagttttagtcggcaaattaattaactaaccaatcacgattgaccatcgtgagctaccattaaatatccatcattaagtaatagtgaacattagttatcccaatcgtgtgctaatgtttctaagcatggctaagcaattatgtctaacatctagctgaaacaatatatagagctcaactagtcaaattgtaacccgaggtaatcaagaaatagggtaatcaatgcaaattggccataacaaaggaataggttcacaccacccggtgacattcgaatttaaatataggaccaacatgctcaaaggaattgtgtttgggatctgtgtgacttaccttgcaataatcggtcttcaattaatcttcttgaacacttccggcgcactcgcgaaccttcgaaacgacagaaactacatgctaacacgcaaaacgaggaaaaagactaagaaactccaaataaacagtacatataaagtaaacaaacatgtagatcatgattttagatttattatgagacttgaacggcctcattccgatttcatatgaattagttacgaattttacaagatttaattccaattaaacctattaaagaaaaagactattccacattaattaaacaatttacaaatgatttataactaagataaaagattggaaacaacctccgaaaaagattagattatatttggtagatgatatatattaaaaagaaataatatgccactaaaaagagggaacggatatatattggttttggacggctgagattaatcttgcaagcgaagctcaagagatactgactcaacgagtcaattctacgtgacatgggatcactcaaatgatcaaccgaaaccggcgaacggaaccggcggctctgaacggctctaaactaaaggacgacttaacatggacgaacgaacgaagcacggggaacacctcattaaaacgaacgagcgaacgactcaacaacggctgtgactaaaccggtgagctatacacgattcacagtaaagccccggtacagcaaacaataggccggtaggaattaagggatgcatctacggctagacaacttggctaccgagcaacggctaaagcggcggctaggttaaagcggcacacagctgcgacatggcggcactagggcgacttggttcggctaggcggcggtgactcggcggagtcacgcagttagggttagggcgatggcacagcgacgacgacgcacagctacggcagagcacgacagcaaggcgcagcagcggcagcgactcaacgacgacttagcgagacggctaccgagcggtagcaatggctctactaagccaggaacgcggcagcggtggcaacgcaacaccagcagcggtggcaatgtggcttggctggcaacagcaaagcggccggcgcagcagcatgactgaggcagggagcgacactaaggctttgatagtg

SEQ ID NO: 24133 - DNA, 2660 bp, Oryza sativa
ctcaccgaaccaaaaagtgatgcggagagagagatgacgacggtgacccggcggcaacacatggagacgacgacgacacaagggccaaattagattttggattaagaccctatggataaactacaccgatgaacgacatcggagagaggaaagctcaccgaggggcggcgcgacgatggatgatgacggcagacgtccggcaacgaggtagaggcggcgatggggtcgggtcagcaatggcggcgacgtttcagtgatcttcggcgaagaaaacccggtggccgggcttcaccttgctcctgcgaacccaatggagacgacggcgaccgaaggcgacgacgggatgagcagtagggcctcgccggagatcaaaactcgacggcgaacttcgggttgacggcgacgatggagctccggtggatttcagcttcggggaagtggaggacgatcttcttctcctcctcgcgaacccaacggcggcagcggcggcgctccggttcacgacgacgggcaacctccggtgggatttggcgcaaaataaccagcgatcgggatagagctcgactttgcggtgccgagggaggtggcggcgctgaccggcgacggcggaagacgggacttgaggggataggtagaggacgactagggggtcctttatataggcacgggagctcgggtccgggcccaaatcaacgagaaactttgggaaagactagggtttacgctggaaaaaggaaagattgaaccacgaaataggaaaggatttccatagaaacttttggggatttcttggggaaaaggaagaggagattgagaggattccattgccgcaactaatttggaaaaaggagcaacgaggtggccggactttggaaggggatcggcggcaataggacacgggcacggctggctcggctctgcctgagctggaagatgaacagtggcgcagggattgggcttctattgcacagcctgattaaaggagaactcaaactagactttggggagaaaaggccgaccagagagaggaaggaaggatgggccgaggactacaagtaaacttttcctgtttcggcccgaaaaggaaaaggggattttaattacttttcccaattaaattaatcactgaaatgatctttcaattgttaaaaatacttccaatgctcaaataattccacgagaattcttgaacatacttggacactcaaagtatttaacaatattgaaaccaaaccatttaatgattaatttattaattaaataattactgaaatattcattgcattattaaaattaggaattgagctccgaaaaaaatccgagaaaatttcagagagtataattaatcatggagaatttaataaaaattaaatccagccatgctttatatttaggaaattttatttcccacatttaacttcacttgtaaattaatgaacatttaatataaattctattaataatttattaaataatttataaatcctgaaacgaaaattcaggctgtgacactgaaaacgctctctgttcctcaacctttgaacccttctcttctgattctttgtaaaaataccagaaggacaccattgagtcttcctgtcttcatcgtcctcttggttacaatctcggttcaccgggcccaacctttgatgaacaggaactcttgcttgccttagccgattgcttccattatacgatcggcttgaactttctgcaacattgccgcacccgggacagtcttcaatagatggcagcctcatacctttattccagcaaaatctaaagaactcgcaaccccaatgagaatcaaaaccgccatcatcttcttcataatgcctctcctgctgtctgtcatacttcttctgatacttattgataattttagccgaattcacctgaaaacctcttgctcttcctccatcggctgttcggccagctgtgtgtaccatatttacaggaaaaggattgccatcgaccttcatcggcctcttagaatcatcaaattctattttgcctccttcaatagccgcttggatctgctgtctaaagattttacaatcattggtagaataagacccagaattatgccacttgcaatacctcttcttgcctaattcctcagccgatgggattgtattaccagtaggaagttgaatctgtttctcccgaagtaacaaatcaaaaatcttatcagccttgatgatatcaaagtcatacctctcttcttttccagaactcttcacccattggcatggtataaccttcttgtttctaacccattcggctgctgctatttcggagtcgtcatcatcatcatcatcatctgatccatatatgtaaggacagacatgattaacccttttaaagttcttcctggcttctgcaaacctctgttcatgcaaggttaccttctgtgcaaggtgagacaaactatcaaagtcttgagacgagaacttctccctgatcggagttatcataccctaaaaagccagatcggctaactgggcatcagttaaactcaagctgtagtatttattcctcatctctctgaacctctgaatgtagtcctgcacatgctcatcatgcctttgcttaatcgctgttaaatctgatagtttcatctcatgaatcctactatagaaatagcttgaaaatgcttc

SEQ ID NO: 24134 - DNA, 762 bp, Oryza sativa
tggatcccccttttttttcggcgtcaccttcttcgggttcgccgcaacctcgccgacctcgtccacctctccgtttcggtcgccgaccgccggaacgccgccgtccccgtcgacccgagccgcgccgccgcctctatccgctccggtcgccgttcccgtcgtcgccgtcgacccggggtgagccgtggatcgccgattcgtttcccccttccctcccctctctcgggcaccgctccgccgcgccggtggtcgccggcggcgaccatcggggcacgagtgcgccgcctcccgtcggctgtgccggcgtggccgccttcgggcgcgccccgcggctgccgcgtggggcccggccgtcagccgcccgcgccctcgggtgcggctgacgcgtgggacccacggcgccggtcggtgcgagcccgggtgcacccggtccaccgtggaccgtgaggctgccgcgtgggccccacccccgtggacccggtccgcgcgcccctcccctcggctgacgcaataaatccatttttaaattaaaatttaaatgaagaaattcgcaaatattcatttaaagagcatataaccttcaaatggccataacttggccatttgaactcggaattggaccgttcaagtctctaattcttccttaaaaagtcaagaacccatttttgtgctttgttcctgcttgctatatggagcttatcagagtaaaagccctgtctttcccttggtcgtgtagacgctgcagcttcggaggaccgctct

SEQ ID NO: 24135 - DNA, 1331 bp, Oryza sativa
gcgtggagcttgattgcggatgttgttgcccgcattgttgttgaagaactgacgctgcggacgaacaacagacgaagaacctccctgtcgcatggactggggtcctaaagtaagacgcggcctctgactatcccttgttgtgccttgaattgagcaatccggcgtttcttctgctccatgcggttgtacttgccctcctggcgaatagccttatccactaacttctggaaatcatgataatccccagtcatgagtgggtaagaaagctcatcattaagtccttccaagaacctctcatgtcgctcttcatcagtgcgcacatcttccggagcataacgagccagacgattgaattcgtgcagatactcagtaacagagcgagacccctgagtgagcgacctgaattccttcttcttgagagacaccactcccgatggtatatgcgtcttccggaaagcagcggtgaattcaagccaagtgataggttcagtagtagtcctgttcaggcggaagtgatcccaccattcagaggcaaggccatgcaactgatgtgatgcaaatgagaccttctcctgatcggtgcactgaagcaaatccaacttcttttctatggcatgcagccaatcgccagcttcaacaggattagtggtactagagaaagtaggcggcctcacatgaagaaattctgctaacttgttctgaggaggtgcatgattatttccctggttctgctggttctgaagttgctgcatcattatgttcataagctgtacctgttgagccaggacttgggcaagtgtgggattctctccattgttgttgttattgttgttgttggggccattcccgttgctgcgagtgagcaccatctggcatgggcaggatcacaagaagagaaaccgggaaaaactacttaggacagagaattaatttaacttttattgatcttaagtgagtttcattattacaaaactaaagactctcacaccactaaactcaccaactacctaacactcgaaagcaaacaaacgcatggacttacatcccaccactgatgtaaatcacatgcgagacacacacaaccaaacttaaaacaagcaaactaacacaacgatctaagacaactgtttgacaaggcattctagttcttccgggcatcggagttgattgaaggctcgttcggctcgtcttcatcatcttgagttgctccccactcgatcttggaatgggtgcgcttggattcttctccttcatcatcacttacgttgacgaccggaggattcgctagggctggggtaacttctttctccaccacacggacctttggcgcc

SEQ ID NO: 24136 - DNA, 1056 bp, Oryza sativa
actatttgaactagtataattcacaaataccaacatgccatctctaaatatggcatcttcatatttagttcaaaataattgcccgtaatagcatatattgttcaagaacatgtcctctaccaccacaagtgtccatggagtgacatcgattatgaatgaactcactaggcactccaatccaatgaaaccttaagccccttctattaaaattcatccactaaactaaactaaagttgatatattcgacaagcaacgcctttcgattcatcgatacatcacctaagagccatgacagcaatgataacccatgtaacacttagaagaaaatggcacaagcaaagcaaaagggaaacaccaattccagtagtcgatagaagcaaaaaacaccgtgtaacagcagaatcttacatagtcccggaaggccagcccaacctccatgcacttgaacatctcatcggtgacctccatgctcaccatggtcacccgctcctccctctcccgccctagaaaaatcaacagcaaggggcggaccccccaatttttttggggggaaaaaactgttattagtcctaaggttaagacaaagagaaaacctagcttccagatcgagaagagaagatcaaagttaaggcaaagagaggaggtgtggggtagagaaggatgagaatgagagaggatgcgcgtcggcgccggtgctcaccggaggcggaagcagcaggaacaccgcaccgccgctcgcgggatggatggagatcggccgcaggcgacggggcgaactcctcgaggagacgggagtcgaggccgaggcgacgccgggacggggagatggactcggggtcagaggcgagagtatgcgatggaagcagcagggcgcccggcgacggagaccggcgcgacgacggcgcaggcggcgagccaaggagatgacgcgggccgcggcggcgtcgtcgggtagcggaggccgcgacgcacgcagcctcagcgtccgcggagtcggtggataaatggaccgagcccagccgtgctgtcccgggcacgatggcgcgtgggccgtgc

SEQ ID NO: 24137 - DNA, 3798 bp, Oryza sativa
ttgtaagttgagggacgccggatatctggttttgtggttgggggacaattttgtaactcgatgacaagttaagggaccttcggtgtactttttcctatattatgtatgggtttggcccaagtttgttgcttgggtcacaatgggctccgatccattttggcccaagaaaatgaccccgagtcgagcgaagcatcgaggaattcccaggcagccgccagccggccgatcccccgtcgctcgcctcacttcgtcggctcgtcgtcgtcgtcgatgccgttcaccggaggactgggggcggcggccagccgttcgttgcagcgcggcggcgagatacttcttctccatccaccggccgcccgtcgatcgcacattcgcacgtacgcgacgctcctcccgcactggccggctacaccatgctgaatcgggtcaggactctccacacccttcatacaatttgcttcgatatatatccaactatattcaggagaactaggggtttcgattgatcgtctgaattcatttttgtcaaatcgtaatgcgttagtagttggggatagaaattggggtactaggctactagtaattacgaatcggaattaatatcgaatgacctagattgccatttcaccaatgtgcatacactgatatgcgcagagccacatatcgatttgctggggtgaattagaactttctaaaaaaaaaaagaactcgagacaatctggagtatacatggattctgcgtctctagttcagtacgcgatccatggctagctatgcgtgctcgaaagtcgaaaccagctgaatcaggccctgtttttttcagtttgggattattataatctagattattgagtcagattactataagctagattgtaataatctgtagtagaataagcagttagttgtttcttttctagattattagagtctagattattgggtttgcaagtctaaagaggaagtggggtggcatggtgggtaatttttcactcaataatctggaaaaagctcacctaaatgagcttatcagattataataagttagctccagattataataagctacttcaataagttgtctgtttctttcattttactcccaataatctggattataataatcccaagctaaaagaaacaaggcctcggtgactttattttcaccatatttattcagttttctctccaagtagtacttctcttcaatttctacctacattatattgacacactagctagtttatgcgcggatattctcgatcggttggcaacatatttaaaatggatatttgtttttccacattatcgtatcttggattaattttggtagttcaacacacaccatacatcaactataacatacaccctttgtccggctggttgttcatagagtatcaattacacagtagcaaaccgaaaaaaaaaatcgtttagtttacaggaaactttgtaaatcttgaaagagaaacacttatatgtatctgtttcttgatgcactcttggaagtgagacgtacgtactgatcaaatacccgtacgagaagttttttttttctttctgtggctgccgatgaagctcatagaagatatctaatagcacaactgcatcaaatgaaagtaaatattcgattagagtactagctagcttgttccagacagctgaaattgatcgcctttcgatcgaacatatatagaataggaaggatatcttgataagcatagatgcatgggggataattaaacatgctaagtctcttttgggatcgatttgagttttgcttttcaaaccgcagcaaaaatgaaagtaattattgctaattctctagatttgatctaaagttgctactacttccattaattggtcatgacaaattggcatttggacattctaatttacacggtatttgagatgaaactttgaccactattttctatcaaaatatatttgtaaagttcaataaaattataataccttctgaagaaaatttatacacacatatatatgatgatttctattatttatacaactaagtatacagaggataatgattcttaaaattataaaagtacaaattaagtccaaaacaacatgttattatgacatgagggaatttaattctttaattactagttgttttaagaggactacaaattaaagtaaaccatatacgaacttattttttagataatggattatattaaacacggcctctacaagtcacaagcacgagtatataagactctcctgttatatgggtaaagcataaataagttttaaaggcggacaacaagcaagaggaacttatgattagtctcagtactaacttacatgcatgcattctaatcagtctagctaaacatatatagtttgataactatatgctccatctgctagctaactttgttgctcatagcaaagttatggaataatatgaggtaaacatgatttttatatatattgagaaatggagtgataattgaatattcaatatatgcatgaagcactcagaaatggtttgcagttttgttttgccacttgccatgcatatatgtgctagaatgggtagatgtctgcttaatttgcaccagatttgtggatacttgttcaaattattgtagaaatatggaagatcaattatatccccatatatgcagttttgccagactagctagcaaagtcacaactcacaacgaagctgagaatgcactttcttgctacatcttaatttgtctgagtagatatatattcctatgcatcatcacgtggtctctcaaaacaggagagcataaattcaagcataggctgatcaactctttaatttgtgttagtagctactaccactgcgcttatgctaataagggctaggggtaccgtacgtaccacgggcatttcttacttgtttctgaaggagtatactataccttcgtcctaaatatagttgattctggactagacaaacaattgttcacatatatatagccataagttttatatttgggatggaggtaatagaagcaccaattgcaacaagagatagcatgaaaaaaaaaccattagcaagagcttttagaaaatttcttttgagagcattgatgaattcatgaattgtttgaagagaacatatcgaattggacaaagccatccaaagattatcttccaagctgtacattatagtgacatgatctgaaaagttgtcctcgaccatataaaaaaaatgacatatatttcttatcaaattttcaggagcatgcatgattgcaagttttttttcttcattcattcattctagagtaagaactagagagagattctcattacatgatcaaaacgacgaatcgtctaagcaaaatcaacaggtaaaagccaacttaacaagaccatctttccacaatgagcatacacaaaaacaaaccctaaatccaaatatccatgcaaaagtaggcacgcacacacgcctacacggccactcaccttgtcgccggccgtacacatgcggcatgccgtccacgcgcgcggcgtcccgagctgatcaggacggcgcccatgccgaggcgaacacgacgttgtgccccttccacgtgagcacgaggtcgtcgtcctcccgcttcatcccccacccggccgcgtggtcgttcagcatcgccttcacctcgccggcggcctcctcgccgaacgccgccgcgcggaacccggcggcgcgcatccgctggccccacctcgtcctgtcctcctgccgctccaccctctccaccccttcctgcgccagcacgttctccaccttccaccccacctccg

SEQ ID NO: 24138 - DNA, 3449 bp, Oryza sativa
cggaggatcgggggcccctcggcgcggccggcgagcatgtcgatgagcgtcgggatctgcatgcagtgcgtcgtgctgaggtcgacgatgtgcacgacggggaacccctcgacggcctcgacgatggcggcgttggccgccgtgtacccgaaccggtgccacggcgtgaggtcgatgaagctggcgagctcgacggccgtgaaccggtgcacgtggagcgccgccgactcgacggcgtccgctaccgccgcggtcaccgccttgcacgccccggtcctggacgcccgcgacacgagcgcgcacaggaacgccgctgtgagccgctggttggagtccccgtccgccggcgcgatgttgttgagcacccacaggatctgctgcgtcagcgtggcgtcgttggcctcgatggcgttggcgcagtgcaccagcagctgctccatgcagcccgtgctgttgaggttccccaacgagatcttcgacgccgccgccgacgacgggaagtagccgctcccacccaacgtcgtcgtcgacgacgacgacgaccacggccgcgctcctcctcctcccctcgtcgcgccgacgtcaaggtacaaccctaaccctagtccatgcccattagggtgcagaggcggtggaggtggcgcggtgtgcgtgaactgcatcatgtagtggtggcaccagcgcggcgcaagcagtgcagagacgcgattagaaaacagcggagacgcagagctagtacactttgagcggtttgaggcacggatttggtgcttgtacaaggcatatatagagggctgtgcacttgttgctcggaggcgccacacgtggtctcatactctcatcccaagctgccgctgctagctatatactgctacctagctaagccaaattccattagaactttgggaacaacatggatccaagggagggaatggagagaaagagaagctggccagtgatctagtacaaggaatatttcagtgaaggatcgatcgagcagagatgcaactgtagatggtttgtactatctagctggggaaaaaatggcaagaaactaatgaattcttcgatctcccatgtacttaccatctacaaagaaggatatatcgagatctgagagcactgttatggtagctaattaaccagaagctaggaataattagccgatcgagatggcatgcggttctagctagctaggagccagcttgaattcaagattcaagctgcggagatttctgcttgattgtctacaagagaattttatctaggatcgatgaactagcagatcagggagcagttgggaaagcgaggagaggatagatggggaatgctaggggaggggaaggggaagggaagaagaggttacaagtcactaattatagagggaattatgtagtggtttcttggattgttctggatggccagctattcatatatttgtctatatagtaactagtaattatcaagatcgctagcatgtcacattatgaacaatattttataattactctgcttggtaaaaatatataatgcctgtaaaataatgtataattgtcaacacgccaaattaaaggttaaaatgacatctagtggcccccgttttttacaagtctgatagcccattcggacttcaaaatcattcttattacctcatctgaattatctctcattttttctgcaatgatttaagctgtctatgatagagtaattttgcttctctctaaaagatagctttgtcgtatttacaaaaggagacatgggttgtcgtgattgtaatttattcgattttctttggaaaaaaaacttaattcagagaacgataaaaaatatatgagttaaatataacaacatactgatcctagcctcctacaaaacacacatgctcgtgtgagtgtacatctacctgtattgtgttgcacatagctagctagtataaaattgtgaatataaaaaacttttctatagattaccttttaaagaaagaaagtatggaggcaaaacaggagttcgatcataattaagtatcataacctcatggaggatgacgcagatcgacgtacggttgaaccggtgcactgtacagttgcgtgtaaatatgtacgctaaggaattttatgcacatattaaatttttgtaatccgttttcaaaaaagaaaatgtaacccgattattttagagagagggagagagagatagagagatcacggggcatatcatggtgaaatgatttggtcagttcgcgttgggccctacatggaacaaagctacaactagtttagtaattagagagagggtccattctatttaatatcctcattgttgcaactggaaaacgactctttgtatggatctaaacttacgcgtccaagcactggaaactattcagctgaagaattttatagaccaggtatgctgctctgcagcgcgtagacacacacacacacacactaacaattcgaccaaattgattgatagatggcacttgtgacatataagttgcttataatagaatagtaggcttacacttcgaatatttccatttgttcttaatttgccatagaataagagtgcatttgtttaaagttaatcaagcaaatcatcttcttagttaattacccaatgtcgttatgattttttaaggctatctacataaccatatcctcgatatgcctttagttaagtgcatgttaatttgcgtgccaatgtcggtctgtgtcattgctagttgttggaaaccatcgggataaaattccaatagttatacattactacatctgtctcatagctaaaaatagatacattttagaatgaaggtaataagatttcttcactacctgtgttaatatcggtggtgctgccactactttatagcaattagatccaaaacaagaattcagatataggatcataaagtggtagaactactgcagaaacttttattggttctgcttattaaccagttgtaggcgttggtttctcagtcggaaccaatttaagagtactaatgcctaatagcataggtgccggtttaaaatacgatacttataaaactataagtaccggttattatactacaaccatcacctataaatccgaactgtgccggttatgctatcacccagcacctataaattagaatgtgtcgggtatttacttaaaaccggcacctattaagttttataaatatcggtttttcaataaccggtaccaacactcataaaatcagcacctatacctattaaaaccggtacctattatctgggaggtatttgggtaaatactatagatatcggtttttttttaagaactggcatactctagtgaaccaatgttgcgctataattaatctcagttaggacgatccattattaccacagttgtaatgacagaggatgtttttggtagatttcaaacatacaattccaagggaggtgtgagcctatcatcac

SEQ ID NO: 24139 - DNA, 4932 bp, Oryza sativa
tatctccccgcaatattttaaaagaagaaatagataaataagtaaatattcatatgatatacattttgaaagaaaatcatgctaaaattagaagtcacaaagttgcagaggggcgataaagtactaaacacatatcggataaatatttatgcatacctagaatttgttggcaacaaactgctccaataaagttttaatatataatacttcatttagcaaagcgaagaacagggagactaaccaggatactacaccttagtttaacttagtagacagagcatcaaagaatgccttcatcggccattgcactgtccttttgggaactccaagagtataatattatccttcttcaattcatatccatgcaaacaacaaagatctcaattcttcagttcatatccatgcaaacaacaaagacctcaattttaatgaaatggttagctgcttgctcatcttgtccctgcaaatagtttacgaagttcatccctttatgtccagggagaggcattagacaatatacaaaatgtacttcaaggtattgctttagatcgattgcagcactgaaacacaataaaactggttttgcttcaatgataacattggtgcaatattagacagtactgatgctccctgcgtataccaaagaagctccctgtgtggtccattgaattaggatgcagagaagagatggttgacctgaattgcaagaaaggggtagtaaagggtgcttgggattactaacctgatttagggatgaaccttgtttgataattgctgttgtctacacgctcgtgaaatcatctgaaaatcagcggtagcaggattgtgaaacgccagatgtggccgatggcaagctcctactgggattgcaacgccatgaggggatacgatgccttcgcaccacggctgcaaatccattgataggggctgcacaggatcaactgaaaggatgcaaatccattgatatgttaaaatcttcaaactctacggccaatttctgattggcaattgtgaatgatcaagaaaacaaatggtgatccacaaattgacacatcacaaaaacatgtaaaataggagaaattggtattaccttagggttcagggggaacagtgttggttcctttagttcctactcaaatctgacgggaaccaatcagcgcaagatgaacctatgaagtggattgcggcgacggcggaaagggaagaaatcgattccggcgagggcatcggtggagtacggcggtgtcggtggaaggggacgaccctccggcggcgcgaacggggaatgtgaggaggaatagggcggaggaggagcaccggcgggaaaagccgccggcgacgccggaaggggacgaaatcggttccggcgaggaggaagagggcggaggaggcggaacgccggcgggagcagcgttggactgaggcggggcgaggaggagcgctagtccagcgtggtcagcgcacgctcatcgcgcgaggaggaagcggacaatagctggcagatggatggatgggcgtcgctggcggatggatggacgatctggatcaggacagaggcagatggacggtagagtttgatcgaggtgatttcacccgtaggattagaggggggcaactcctcctttttatattagtatatactccctccttccctaaatgtttgataccgttgacttttttaaatatgtttgaccgttcatcttattcaaaaaattttgtgaaatgtgtaaaactaaactatatgtatacataaaagtatatttaacaataaatcaaatgatagaaaaagaattaataattacttaaagtttttgaataagacgaacagtcaaacattttttaaaaagtcaacggtgtcaaatattttagaatggagggagtatatagatatagatatagatagatatagatgtgtactcatcgtagtgctctgctctgcagagtagcaaacgattgcggtgatgcagatgtgcggcttgcgagggtgcagtgggccgtgggccaccagcctgtggcgacaacggcctgtatgctggcttgattgtgaagcaaacaggacaaaaacgtggaggcatgggccaaggcccaaggcaagaatttccgtgaggtattagcatctgaaccaagatgaacagccctctctctctcaaagaaagagaaagaaagaaacaaccaagatgaacaacgatccctctcgaaaaataaagaaacagatgaaaactggaagacaaagcaagttgttcatctagagcctcgtgcaacatttccatgttcacgttgatcacatcccttacaagctctaattaccagtaagttttagactactagaccatgccagagaagatgactacatgacaaaccatgtcgcgtaccgtaacacttggacacagtcacaacacagatgaagcgaacacaacaatgatcaccggccagagaaaaaaaaactgaatgaacatagcagagaaaaaaattcgagatgagttcagaatctgagaccttgtcttcgtcacctctcgccatgatatatatactcttctccattatttacaactttgtagcttgctgctagatgttctcgtttgatggctcttggaagttggaaaccggcttatgtagtgatcatgagccaatcatacaactggtctcaattggactggtcaatatgatggcataggaattttggaaggaggcgagcctgcaatctgcagggactcctttcagcttttcacacttttacagttttttcagctcggagctcgtactcgcagcatcctttgttgatctgtgcttttctttttggtgggaataactctcaaatgcttttcttttaggctcgatttgcaactcaatttcaactgtaagctaatactagggtagtagggttgaacctaattaaatgaacttattcgtttccctatctgagaccatgcaatatagtatctgtcttttaatactgatgtaatgccaatatatgggacaccgctgcctatgagccgttggataaagctagccgtggcggagcggggatagattctgttctggagcgttactactacactagacactagtagtacagtggtactagcatatgaaccaagatgaaaaacaattaaaccttgcacaaagaaatgttgaggaacaagacatgaacacgggaagccagaaaatagtcaagtagttcttcagatagagatgcatcatacggcatattatgaagttccttacatgttctagtggccaagcaagaaccacaaaggacgtcacagtggaacacacaacatccgtgcccatcaacaaccgagatacacaacacgactagctacatatgaagctactagtactagataacacgactagctacttaaacgccatgatccttcccatcgactgaatctggttgatctggtcgacacgacgacgaacacggtacacatcgatctaaccgtccatatccccgttcacacgcacgtaacgctgaaagacaatgagaactactccagttagtacaaattagcgaattactacacatttacacgtgacgagagaacaaattgtgtacacaagctcacttaccaggacggtgcacgcggcgacggcgaggttgacggcggaggcgacgccggccaccggccactccagcgaggtcgccgccacgaagccgccgtagctgatgtaggcgaggaacatgccggagacggacgcacaggtactgacggcgagcagccacgcgacccagctcgccgccggcggattcctcttcttcttctcatccatcagcagcacgctcgcgaggtgagcctgcgccgccaccgtgagcagcgcgaaggcgaggcaggtcttggcgacgtcctcgccgccggagacgcatcctccggtgatgccgccggcgccggggcagacggcccagccagccatcctggacgagaagaagacggccatggccaccatgaacacggtgatcaggtaggacagaaacttggcctgagaaaagaaaaaaaacgaagcagagaagaggcaatatatcaagcgtaagaacgcattttgagacaagttttgcagagaaaatctgatcagagacgagtttaggatgtaatgaaccttgtgttcgtcaccgctcaccatgatactcttctccattgtctataaacttgctgcttgatgtttctggttttggtggttcttggatagctggatgccctggttatatatatagacggtagtcttgtgttcatgaaccaaccatacaatttgattcaattgggtggtcaatgactcatttgttggtgcattggtaaaagttttggagggtggtgactggtgaacctgcagctgcaggactactttcgagcttcactttttgagttttcgtttctgctcctctttttctcatccttatctctatgcaatgtaatatatcagattttttgctaccgctgtactgcaaatttatgaatttattagcaacatagtacaagtatggtagtggtgtgtgtatccattgcacatgactggccccattgtcacctgtactgtactcttcgggtagcagtacagtactagctcgaatccttttgtgtcggaaggaaacgataaggtttgatttcactatcatatcaagattcaagcagcgacaaaaaatggcagtctgctactactgtagctgcaaacctgcaatgcagtgcaggtgcggcaacaccatagcctcgttcccatctgtcacgttgcaatgctgcacacaagtttcaaaccaattgtacgacgggtcatggacacaagtttcatggccttgtttggatcctccgggctattaaatagccgactggagaagctgtccaccgggcgccatcacatcatcgagatacatcggcgcctccatcttgttgtcgacatccacgatgataccttcgccgccggcgttgccatcttccccac

SEQ ID NO: 24140 - DNA, 750 bp, Oryza sativa
tcatttcaatgtgaaaggcacaaaggtggaagtcaatgtctctgaatggactagtgaatctgcagccatagggaagatgcatgtggtgtgggtggtaatagaaggtctgcctgatgaaatgaaggggtatcaggctctctttgaggtgggatccaatctaggagttgtcatggaagtggatatgccaatgttagctgcaaaagacattgtcagaatgaaggttggaatgatggacgtcaaacaatttccattatgatcctatctacacctgaagccctgttgtatgaagcttgttttaatctggagtcagtagtagaaatgggatggcttaagggacaacagcttgataagcaataggaaactactctaagagttgaagagaaggaagaacagaaggtgctcaccaaaggtaaacaagtggaagagatgaaagaattgactcaacatgtggttggggctcaacagaaaggagattgtagtcaggctcagatggaatcagttcataggttggttgaagaagacagaatcaaagccattcagatcctgcaagacagtcagttggctttggccttgcaagaagaggatataaagggacatctcaatgaagataaggggtgtgatgaaaatcaaactgctcttctgattctgaaagatgatgataagatggtttctcaggaggtatcaacagccaaagaggtgcaaaggagtcagctggttgctagtagtgaggatgatatagaagggctgcag

SEQ ID NO: 24141 - DNA, 2499 bp, Oryza sativa
actaacaaataatgaaaaacaataatgaggctcatcttgctttgctttggacaactttttcatatctttggaccatcaagaaagaaaaatgcatattagcttacatgtcttcgaattgacattgacagattagctttataactttatatgtagccctcattaatcatttgaaatcaaacattgaataccattggaagtctcaatgcactttcactaaaatatgaatagaagatccatgtgatgctattaaaagcaacaaataaaatgtagtactaatagaaatgcacctcacagatcaagacagtaatatttctttcatcatcaaaatatactccaaacatatttttcttcagcgagcggacagcgagtaatatagaacacattttaattagtcaacatgagcacagcgagcgatgcagcccagtacatcttcattgactacaaacatatacatcagttttccacttctttcttctgccaatatacaagaatttttcgtattttcagaagagagatgaagagacaagtcaatgtaaaatatttcctagaagacaagtaccaaatggtatatattttgaaccattaactttaattatatcagcttgtaccatgcataaacatttgaaaagaaacatacacatgtaacacattgtttacaggaaaaacttccacccgatcagattcaaaatgctacaggcaccatatactaaaacaaggcggctcatctatctgggttggaggtttaacaaatatgaatatctcagcaaattgagcagacaaactaactatataccattgtcagtgttctcttccttattcagaaaacaattaatccgtgtgtttctgctttgaaatacaagtcaccaacgtcaacaggttagtgttatctggtagtcatgctcaataatacgaagaatatattctatttatcaactatctttgagtgtactttgctataacttcaaacaaattttgctgttcttgtttagaatatccaggatgaagctgaggaaggttgctaacaaatattttggcatcagtcaactttccattcctacaatagccctccactattgaattgtaagttctctcattgggcttgcaaccttgagtgaccatatagcgtactaactcaatagcttcctcaaacattgagttggagacataactcttgacaaaaatattgtatgttacaacatctggtttcagacctgaacatttcatctcagagaacaatcttgatgcttctttcatctgtccttttcttccatatgcatagatcacagtgttataagaatatctatcagggcgcacaccacttgacttgatctcagtgagaatattttcacacttttcacaatcacctaaacgagaatacatatgcatcaagctattgtaggtagcagcactgaggttgatagcactttccttcatcagtgaaagaatcttctcaaccttcctgaccatcctgtttttcccatatatggaaaccatggcattaagaacattaatatccaatgaacaccgcttctgtcttagttccaggaaagccttttcggcctcagctaaattattaactttgctgttgaccaagaccaatgttttcactagccaattatgtggttctatcctctctgaatatatatcatctgataaagctttcattttgtctaacctctttgcatttgcatacgcatgaagcaatgaagaataactatactcatctggcttacaatctcgctcctccatctcagcaaacaacttttctgcttgttcccaacgcccaccacgagccagggcagacagaacagcattataagttgaaacatcagggtatataccggcttccatcatcctcttgtatatctgcattgctaggtcaaacaaaccacatcgactatacgaactaataagtgaaacatacgtatccctctcagggatgtaaccagctttcttcatctccttgaacaccccagacacttcagaatccaaaccattctgcccaaacacagctaagagcgtgttccaggtcacaatatccggcacaaaaccagcagacctgaactcatcaaagacagccatcatctctgggaacttccccctcaccccatgcatcttgatcaatgcattgtatgtgcacaggtttggcttgcatccgttcctcaccatttcatcatattccacaattgctgcatcaattttgccagctctgtcaaggccagagatcaatgtcgtgtatgtcaccacatctggcttcattcccttcacctccatctcctgcttgagcgcaactgcctgttccaacaacccatccttcacatacgacgaaatgagtgagttgtaggtcaccacactgggtgggcagcccacacgctccatctcctggatcacctcaattgcttcgtcgtgccttcgcgccttaccatatacatcgagcagcgaattgaatgtgaccttgtcaggttcgaacccagaagccttcatttcatcgaacacctg

SEQ ID NO: 24142 - DNA, 7004 bp, Oryza sativa
gggattcgccggggtttaggggttatggacgccggcggggtggtcgccgccgtggatggaggaggattgggtggacgtgggcaactccgcggtttggatggattggagatttgaaaatgacgggtggtggtagtgggccggggaggggacgggctgaagtgatggtgggctcttgcgtagtgggcatcactgggcggggttgggaacgtgactacgggctactgggcctaatacagcctaagacgagggccccgtttgatttgagggataagtccattttaccatcctaaactcttcgctttgtctaaaatacaccctcaaacttcaaaaccgggtatttaacacccttaaactttcagtaccgttcatttttcatccctaatggtttgtagggcagtattggtacagtaggatgccacggggttggtggcgaactcgacgcggtctagatctaggggctagaggcatcgatggcgtgggagaggttgaaagaacgggagctgggctgcagtggaagacgagcggacgggagtggaggtccgcatgtccgtcgaggcggagttcgagcttacctgacctgccccaagttgagcatgcgatggaactcggggagacaatggcgacggtcgaattttttccttgctgctaccgtggatcaatctttcctccattggacaaagttggttttttctttctgcgagctagtagaatggatcgattggttcagaatcgatttttccctttgtgcaggcattgatggactggtaagcgactcacttccgttgtttaggtgagcaatcgagtcgaagaagcagatcatctgtctcatgcagtcctacccgaatgcggcaagggaagaggacacgcagctgtagctcagagctcgagctccaggcaaggacagccacgagacagagtttggcacatgccgacagaggtggagctccacatgcgcggcggaggccgatgaggaacactcgggtctcagggaggcacggatctcaagcttgagctcacctgtgccgagataccaaaggaagggctcgggaatgtgccgctcaaccttgacctcgcctgcgccaagctgccggagagtgaggcgtagttcgttctgctccagtagagagaaggaagaaaggaaaaatgacaggtggtcctaggttgactggattgcctcctaagaaaaaaccagagcggtttggatgaggggtataaattgcatggttttaagagatgaggggcgtctaatacccgattttaaagttaagggtgtattttagataaatataatagttgaggggtgtaaaatggacttatcccgatttgaacggactattataccatggattgtctacaaattaattatttttataaatagaattttcagaaatagcttagaacaaatgctctaaatagtgcagtagaataatgatttcgaggaaatgttattttctgtgagtttttgaagttaccagcttttagtgttttttaagataaggggaagagttttgttaaaaataaaattaaatccgacccaactagggatgcacaaaagtctagaaaaataaaatagaaaaaaacactaagacaaacctaaacatatcatgttgtcttgtagcagctcactcaaatagaaccaagacaagaggttaatcctagttatttactccgaaacaacgccctcgagaaatacatgacattttgtctgccgctgctattggaacacaaggctagattgttattcgaagcctgacatcacaccttcaacaaaggaataacacacaagcagcgatgttgtggaatcattaggttttcactctggagtgattgctagtactctgtgccatcatctggatggacttagcacaatccactcacaatctgatcataaccacaattccacaaaaccgcctttagcattcgctgaccaagcaaccaatatatcagattgctaactatacagaccaagcagtaccaatgtgtagccaccaaggacaaagtactagcctactggatctgccaccaccaagcgaatgaaagaagccatcatcgaaccggactaccgaaaacatgaataaaattatcgctgaacagatcagtatggaacttattggcacaaccggataagagggtgccattgcgcccttcatcagctagaccaatatcccttcttggatcacgttcggattgatgtgatgtcctccgcattgcatgtttatcgacccaaacaaagcggattgccggttggaagagaggatcagcggtgaaggggtgtccttgctaactaccgattcaactcctccgacatccatggcgagcacggtcacaacagcgatcgaccgatcttcctgctaattcgcacatggtgttgatctctccgatctacttcatcgtggtgttgggcggtaaaaaaaactaccaccatcgtcaccaacggcggcggcggaggcagaacaggcgttgaggcagctggcgacgactagggctgctgaggctcctttggagtcacccacgggaggcaacctgagaggtccgcgtgtgccagattttactgtgacaggggtattaaggatatgttaaactagggaattttaatgtgccagatttagaccagtgcgtgtttttcgcgtcaacacatgggaattttaagagctctaatccaatgtttaaaatagcgggtctaataatttaagtaaaaattcaaggttggatggttttctttttttactctaaatttctaggatttctctaattttattagagcgtcacgcgataatgtagtagtgtttacaagacatttaatagaattttagtatataatagatttctagggtttctctaatttatttgagagaaagtttaatgtaattttagtatataacagatagatttagaagatggtttaaaagaacattgattggatatttcttatagttcttaatttaactaaatatatttatatttgggaagtaatatattttatctttatattgtagaaattcatatttgaatgtatgttttttctgtctgttttatgtacatgtatatgttttttcttccagcgaagattaggaaaattttgttttcaatcatgtacaacgtttgtacgtacggaaagaaagcagtggcatttgtaacgtgcaaactcattcgtacatgaggaagttattattttttaatctaatgatgtaaaataatggatccatcaatttaagtgaaaattaacgatgagattagatagtgcatgtggtgacttaggagcgttcgtaggagtgccatgtagcggcttaagatcgtttgtaagaagtttaatggatttttagtatataaaagattataggggaggttcattactttcgaatggtcaacaacgcaagcaactaactaacaaactaacaatagagtcataacatgcaatgcaaataatgtatggatcaacctgattaattgggtcgtcgttccattcccagccgatcgatcgcttcaaccattcgatatatatagctgccctaagcaggatcggttatttatcgatcgattgattgatgtgtggttatggccagcggtgtggtgatggtgatggtagtggtgacggcgacagcgatggcgatggcggtgcaggggagccgtcactcggatttcttcgtggagggcgaggtgtactgcgacacgtgccgtgccgggttcgtgacgaacgtgacgacggcgatccacgccgcgcgggtgcggctggagtgccggcactacatgagcgctagcgggtcggtggagagatcggcggaggggacaacggacgcgacggggcactaccgcatggagctggtggaggtggacaaccgcggtgccgagttggtgtgcgcggtggcgctgctcagcagcccggtgaccgaatgccacaagatggaggtgggtcgcgaccgcgcgccggtcaccctcgttcaagacgtcggcctcgccaccatggtccgccgcgccaatcctctcggcttcctccagactatgttagctagatacgctgatacggatacgcgatacgtggatacgaagatgtggcatttgtgaaaaactaaggatacggggatacgtctatatatatattaacaatataaaaatttaatatataaatttatgaactcttgcatggaaataagctcgtataatgtcatggaaatattttctaataattgtaattgactaaggttggtgaagcgatttaaccccgagaatgatgatgcagactgaagactgccaacttgccaataacttgccaacaggtttattccaagagtgtaatgaacatacacgtcgagagtgttagatgcattagcacttgatattccaatccgaaatttcatccgatctaaaagtagcactttgtaccaagaaaatagaaagagggacaagaagttaaaaaagaaaaagaaaatcattgctaacactagcatagctgcatgggagaggccaacaactgaatcgaccgatggaacttgcttgcctcactgctgaagtaagtggttgcctggttggagatggcgccggcggcggacggcggtgctatgcctggcggcggcagcactgcattcagcatccggtgttacgcccgcatatggcgacggcgcacaactctgcgattggcgtccgtcagcggcagcggcgctaggagtcgcgagccgcgtggggtgtcgggccatatgcgagaaccacggaagcgacgaacggcgtggagttgcaggataaagcgatgtttagttctctcgatcgtatccagaaggtatctcaacgtatcgggggagtatccagattttttttttgatttttctgaaaatcaccaatatcgccgatacacatgggatacgtatccgatacgtatccgtatccttccacgtatcagatacggatacgtagcttttgggaagtatccaggtaatgtagcctccagacccgcccactccccatctgcggtgaccttctcaagagctacgcgctcggcaccgcaccaagctactagctacctcatacagtgctccctttattattatttcctcttcttgcttttatatttatattatatccgtgcgttgtaatgggtgaaaagattctaatgataatatatgtttttcatgtataatcatgttaatgacaatgtttgtattttaatgagtggtttgtttttttataaacggtgttttttttcttgcgtgattttctcaaaccatttttttagaaatggcgtatttctttcaaatatttttttcatagcatgtttttttttgcattttttactgacgacaaaaaccatattttttctccctttttttcttttatttttttgtgttttttgcctgttttttcaaacaattattttctcgcgctttttttttgcttgttttttcaaatgtccttttttgcttttttttttcaatacaggagaatatatgacgaaataaaagccgtatagtagatggcaaaaaatcgatggatcctatccgagtcaagcatccatcaatttagtattttctctgacagttttttcaaagcgatttgttttttaatagacggtgttttttttgcacggttttttcaaaccattttttagaaatggcacgttttttctgaccgtttttttctcgcgcatttttttatttgttttatggaagatggaaaacattttttagcgtttttttgcgctttttctgacttttttctcacacgttttattgaacggtttttattttctcgtgcattttctatttttaaatagttagattagattagagatagagaagagatatatagtaattagaaatcgcaccactatgtttcgcactttccatttttttctcgcgtgcattttttattttatacgaaccaacttcttattttttaggaaccatttttgtcgtcacatttttcgcctttaaaggaatcacattttttttctctttttttctgttttaaaggaattggatctagtgttttttgcaccactttttttttgccgacaaaaaaaaccaggcgaaaaaaatttgtccgatccaaaacaaaacgggcgaaaaaccgggcgaaaaaagaaaagaaaaatcaaatctgtctgatcaaaaaacgggcgaaaaaaagaaaaggaaaacaaatccgattccacggtaaaaaagggcgaaaagaaataaaaaaggaatctgtctgattcctaaaaaaacgggcgcaaaaaaaaaccaggtgaaaaaaaagtccggccaaaaaaacgaatccgcgtggacgcagtaaaaaaagagcaaaaatattaaaaaaacaaatctgtcggagtaaaaaaaaagaattatatgcgacgtggtaaaaaaaaaatcgaatcctaatatatttgacgcggtactatatatctctatcttctctatctctgctacttaaaaaattaaaaacatttcctatgtccataataacaaaaaaagggcgaaaaaaacattaaaacaaaaaaaaagttcgattcaatttacttccgttgtccgtgaaaatcttatcttatcttaatctcaatactacttatatatatatatatatactacttaaaaaataaaagaaatttccgtcgtccgttgggaaaaaaactgataaaaacaaaagatcggaaaaaaaaagtccgactcctccaatggaaaaaaaaggagagaaaaaacaaaaaacgaagagaaaaaaacttccatcgcaaaaaaaagatgtccgactctaaaaaaaatccgactcctcggcggagaaaaataaaggcgagaaaaaacaaaataagagaaaaaaacttctactataaaaaagaaaaaaaaggtcctccgtccccgcctgtgcgatgaaacgccagcaaaaaaaaaagaaattgaggaaagggataaactagattgaagttcccaaaattaaaagaggataaacgatattgaaactcccataactcgaaaagagggaataaaatatattgaaatttctcgacaaaattctctaaattcgaagaaccctaattt

SEQ ID NO: 24143 - DNA, 26376 bp, Oryza sativa
  unsure (1)..(26376): unsure at all n locations
ttcctgcagccctgccgcttgacccgcgcggcgcgcgcccctgcccaccgcccgtcccgcgccatcccgcgccgccgcccgccgtgtgagagagatagagatagagagtgagagtgagagtgagagagagaggagagagaggagagactatgacaggtgggtcccacattttttaaataaataaaatgttaactggactgccacgtgtacgctacgtagaccaaaaccaccgcggattggatcgaggggggtaattcgtccggtttgcatagttaggggtgaagaatgtccggttttgtggttcaggggggtaatttggacgaccgcgatagttcggatgggtaattcgtactttttccatttttttaacaccataccagagtttcctgtagtatatattacaaattgatcaataatttctggttataacatttacaaggtgtttttttaaatggctacttcgttataacatggtgttctgttcatgtgaacttgtgaagtggctgagaaagtctttttagctaaaatgcagtgtgctatgttgtgaagagtgaaatgaagaaatggcaaaagggtgagacatgggcttatagttccagtgatatgaaatcgttcatccctgtcttgattcctagaagatgatatttttttccaagtagctttgatgaaatgtagcaatgagtcaatgaccaaatttgtaataatctttgtatggatctgaacaccatcgatatgatttttttaatgaacctcttgtattataaatggttgtttgcggctttttgtggtttactgctattttgatggatgtctttgtctcctatgtcacttgtacttgtgaatttgtggttatccgtagcattagtatggacatgctattattacgttgacatatgtttcatatcaaactgttatttgggtttatattcacgccctcgtgctatgtgctcaaaggatagcggccaacgtgtgccttatctatcccgttaccactcgccgctcatcttcctgcacataaaatttctaatccactttttaagttcaaattatttactccaattatgaaaatttgtacttgaaaattttaaattttcatttcaatttttaaaactttcaaccttttgatttttgtttggcaaatatttaaattagaggcctgaaaatgcatcttttaaataaatattggcgatagtccattctattaaacccgcccagtatattattcttgccaagaatatgtctgacatatgacatatattgaattaagactcaattgcacagatcatacaagaaatagtttttgctaacattatattttaaaattctttaaagagaaataaacttgcaccgtagcgtttagcacgggcatattactagtggtacaataatggaaaaggctctctaccttcttgaggtcatgttaaatggatttaacccaaatatgttttaactttgcagtgactcaattgtgaaaagaaaaattggcacgtcacacagatttatgactgctaaattcttatgaataagtgtaggcgtgtagcaactttttctagattgactgctaaatcaatttaccatcttttattggattgtcaatttttctagattttttttagatcaattcaatttttgtttggattataccatccacacagtgtatctcatatgtttgggaattggttatgcgtgttaataaaaaaaattaaggaactattttttaggggcttccactatatattgggctctttggcttagtagaaatgatatgatttttttgataaaaacactctcaaaaacttatttgtaggtacttttcaagacaacatattggctccagggttgggctcaactacaaagacatgatgatgatataaagctaataaatgatgcatgtcgtaaacttgaatcgacgattatgcacctttttaccaacttcggagggagattctcaaatactataattcagtaattgtggattcttttatcttgtgttggtgtttattagtttgtgtttattttatgttatgtcagtgcgtgctatgtgtgtttatctgtggattttgtaataattgattatagcttattgagcaaaggtcggattgtttattctattattttaaaaaaaagtatagcaaattggctagaaaataagatgcatgtgatggacaaaccagctagtaaaacgtgctttgtctcagtcgtaggcttgtagccttacgtaacaaactctaatgattggattttggatcctcttacttgcatggtaaagtcaaatgagcacagtatctatgactctggggattttgtagctgtccaattgtgcaacgaatggacaaaatatgtgctatattatccgatagaaaatttgagccgctacaggatatgtatacttctctgcaccataactacagtgaatcactttagataattgtagcaacatactcgtgctaccattcctctgccttaatttgtacctgcaaggctagtactccctccgtcccacaatataagggattttaagtttttacatgtaacgtttaatcactcgttttattcaattttttttgcaaatataaaaaacaaaaagttgtgcttaaaatactgtggataataaagtaagtcacaaataaaataaataatattttttaaaaaaattaaataaaacgagtgatcaaacgttgtaagcaaaaactcaaaatcccttatattatgggatgtgatggagggagtacaagttacgggatccttttcttgagctatattgtttaaattatgaaattctagattttgactttaacgaccaaaaccaaactgacgatagccttccagaaggcgacatttagtgttggggttgtcaacgatgggagcaccgatatcagtgatgcttatgggcgtcacacatctttttggagacgatgttagctgatgccttcttccccaacttcgtatctcggggttgactctctaagtgaaaatctagttataaatgttcagaacaatgatggcaatatctacaatgtcgtgatcttcttggaaacatacattggagatagtgtgctggtgaggcattattggcatcggattggctttgatggctatgacgttgggtaaatgactgatttacttagttaccttcaatgttattttctgctttggtttaacgttagtcactcatggtgatgtatgccaaattcgattatagaaataattgacgttgggaaaaactaaggactacatataacttgtacactgttgggcaaaacaatggttatgcagatagaagtattctttaatctttaaagtgatattcattttttaatcaaactgtgaatttttttttcatttgtagtcatttgccctgtaatttttatgacaattgattgtagtttctttaaagaaaaaccgaaataaattatattgtgttaaaaatgaaagaaacagatggcagcgttaaactccaccggggcttgcaaaaacagacggatcttgtgcaggagcatgaatccggtgcaaatctaatggtgaaagttcaaatgattcacaagaaaaaaaaatgggttgagtattgcactttcaggaaaagaaagatggcacacagcgtctctcctcaagcaagaaatggacttatttagtgatttgcaattgcacacgagatgcagtgaaaagagatgtgtaattttaacatcgagcccgtgtttaatctctgtctggaggacgtctttccctccgaatctccctttttttatttacaattgcacaccctaaagttatcgatcggagcacacgcgtgacgacgtgagcagcctctgctttctctaccggttgtatacatacatgctcaacgagctatatgtatataattggatggttagtacttcatatatactaacgtggaggatctcatcctggccggcgtcgtggcttcttggccggtgaagggctctccgcctcatcgtcgtcgtcggcctcctcgccgcaccgtcgttgctcgccggcgatctccttgatgggcgccacgtttaggtcgaaagcggcgcccacgctcgccgccgtcgctgcactggagaccgtcgccgacaccgatgggccatgcaagtagtggaacctcttgtgcccgcccagcgcctgcccggtggcgaatcctcgccggcacagcgagcagacgtgccgccgccgccgcccgtccgcctccgaggcggcgtcggcgtcggcggcgacgcggcctgatgatgccggaccagcagcaacgacgacgtctctgtgcgcgggcggcgccgccgccgccgccgatggcttgcggtggctcgccttgtgtccgccgagcgcctggtacgacgctaacgccttgccgcagagcgagcaccggaagtggagctccggcggcggcggcgccancgccagcgccagcgcggtgctctccccgcgcgccgcggcggcgagcgccatgaggcacagggagatgaggtctccgacgtcggcggcgccgctcccttgctacatcacgtcacgctatccaacacacacagctcgtgtcgtgaaaattgaaggcgatacgtttgcatgcgattgcgtctgtccgtggtgtgtgctcttatttatgcgtgtaaaaaaacacgaattggaaaactctatttatactctcgttttgcatgtaaattaaaacgttatcaacttttttaaaaaaaatagtatgatagatcaatatgttatactccctccgtcccataatagaagagattttgactttttttttcactatttaaccattcgtcttattaaaaaaaatttagaattattatttattttatttgtgacttactttattatccaaagtattttaatcacaacttttcttgtttatatttgcacaaatttttttaataagacgagtaatcaaacagtgcaagcaaaagtcaaaatcataagatggagggagtatgtcacttcatgcctattcaaattcaacttatacatgtaaaaattctttttatagtcaaatttattatttttttcgaattatataagtcaaagttcaatttgtatgtttgtgaaaagatatatcatatattaatctatcttgatattttttttaaaaaattataactttttaaacgctacgtacaaaacgaggacaaaaatctacttgcgaatcatagtcgtcgcaaatggcacgaagaaatcgcgcgcgtcaaatcaaagcagcgcacaatggctgacgacgcgaacaaactcccgaggtaagaagcttggaatttgatctgaaccataaaaaaaaaaagatacatggcgatcgatatgtcgtaatttccagttttccaccaacccacacgtgcacttttctgtatataattctcgacgtcattttcatctcattatgagtttacaaattacaaccggtccaagttcgatctcaacttgcgaattttacatatgcaacttgtggatttatgcataccctgaatagtgaatactctgaaaccggtgccttttctacggaagagggatgggccactgtctcctgaagcaatgcatatgattctcgacgtcattttcatctcatgatgagtttacacccggtccaaattcgatctcaacttgcgaattttatatgtgcaacttgcggatttatgcataccctgaatactctgaaaccggtgtcttttctacggaagaaggatggaccactgtctcctgaagcaacaaacacagctgcgtgctctttgactagttcaaaatttgtccaaaggaaaactcgattctgaaaccagcagggataaagttctagaacgatcattttatcagtccccttgtgcggcatgacctgcttttgttttaccttcaccaggtagaataaacatgcatatgacgagtgcaatgaagagcacacggagcgccaatcttgaaagatgaaaatcatagcctcataggcgagtaattgtatatgtactactctataagctctttaaaaaatattttgtaacgaataaattcatttcatcattattaaaaaatataggaatgagtgtattttgcacacatctacacactatcgcaaaggtcaaaataacaccatcaacaccgagaaattggacattctaccacttctaagattgggttttgccacaatgccattccgcggaatggcgtcgttaaaatgccactttcaacctatgccaaaccgttgctttgccatattcgccatttcacaagatttttaccattttttgcacttcaactgaccaaaatgcccctctctcctacagtttctttctcttctccggtgaacatgtgggatggggaggagaccaccacggcagggtggcgctaacctcaagctcggtgccaccaccgccggagctctcctcctcgtcgtcctcctcttgctctgcaaattcaagaacacaatctttgagctcaaaccacacacaatctccacaatttcggagagctagcgagggcgagggcgagcgcgagggctgcggctcacctcccgccgccttggtcgctggcgagggtttcggctcacctcctgccgccttggtcgccggctcgtcggtctccatcccncgccgcagttacccgtgccgaccgatgcccgagacgacgatgcaggtcccgtcctaccacgagctcctcctggagctagccttcttgggccatggtggcgtgcagcctccggcgcgcggcggagacgctggcggaggagatggtgacgagcggcgcacggtggtcagcgggaggaagcagcgcgttggccggcgggcgcgacgacggaggagattgtggcgcgtgacgcggtggccggcttaaggtttccttctctttctccgatgtgcgggcggcgggcttcggccatgggggcgggacgtcgccggcggtgagcttgggcagtgcgggcgtcggcagcacgaacgactcacttgtgacagccggaggggtattttagtcagctcgggtggaaaattaggtggaaatagagagaattggcccaaatggcaaaacaaatgtttggcatctcttgtgagtggcattttaacgacgccattccgcggaatggcattgtggcgaaacccactattggcagtggcctaatgtccaatttctcatcaacaccagtacaccacaccatgacacaaaactgtctcaaattccaaaaagattaatgcatagaatttggagagaaaccggatttggtgataatgggacctcctggatgacatcttcaaggagaaacgcaacacacggagcgatgctgatgtctgtccagatctcaaggggatactatacaaggttttcacccgatggtctcatcaaagagggaaagagacacttccaagagggaaaacgagcccaaaggcatcgccattgtctgccacaagactgggctagacttttgccttccacccaccccggttgttctacagctactgctccaaagccccgataccaagtagcgactatcaacgtgtagacaccgctgtaccaacgtccccctcccccgttagccagcccctacatgccttcatgtgccaatgctgcaactataactgtatcacgctatcatcgttgcaagcctccaccttagggcgtcatcattgccggtcaccatccccgagcatctagacctcagggggcctggaacttccgacattctttgacagcacaccagaaaaacggtcataactctttgctccggagtccgttttcaacaaagttgggctctgcggaaggcttattgagagggttattgtcgacgggggatacccgtaggccggatatagagggtactggggtacgctggtacgaagatttacgtaatacaacatcaagcagacagaaaacaaagattatactggttcaggccccttgataggtaatagccctaatccagttgatatgggattatatgatggaaaccacagattacagagggaaaaacagaactcgatgataccgacgagatcgtaatcaaacaggttcgattagatctctcgtcgacttggctcctgtaggcttcaactccgtaggctgtggtggatgtgctgactatgagatttgatgccttaggtcctcccggggggtcccttttatatcgcaggtcaactggtctccaagtaggactcggagacatcagacccggcatgatacaatgacgacccagttttgtccgagtaggactccttccatctgtgaactccatgatgaatttccttaacgtataccgaaaacgtccgtatacacgcaagtatatcatatcgatatgtgacgtatatcgtagggtagagggtataccttacccgtaaccctgacagtagcccccgacttctgcataactgaactcgtgtaaccgatcgtgacttctgatgttgaggttgttgtcgttctcggtgtgaggaccgagagacaaggagtaattgacaacgccaagtgaaactcaacagtcatgagtgaatttaaattaaagtccgaaaaactgccgcgcgtaacggacccagaaatttccggcggccatctctctcctttccttggaatccgcaccatcggaagtgcgactatttaagggagttttggggatccattttgaagtccgcctgttgtgaaaaaactctccagcctccaagcgtacctcgtcttctccgctcccgcaaaaaccctagctagctcatctcggtcctttctccggcgatccccggcggcaatagacctcgacaagtctacctccaccagcgcgtcgctgaagaaactacaggaggatggcacccttcccggtcgcgggaccatggagagagaagcaggaggtattgaaccccagcctgtcctgggtcgcatggttgcgatcgaggactatattctctgtggttttcttctcttggtcttgaacttctacggcctttctttgctccatttgaaccccaattccatcgccttcctcagtattttttcgcatctttgtgaggcctacattggggtagagccgtttcttgacctctttcgtttctactacgagttgcgttggatggaatccaacaaggtatctggatgcgtcggtttccgactccgggatggcctgaagtcgcgctatatccttttccagtgcccttcttctcgtagcaaatggcgggcgaggtggttctatcttcagatagaaaattcggattcagtcttcgttgttcctgaggaacaaccagacaagatttcgtctcggaccgcaaaacccgccttaaccccttctcttcagtccttcatcaatgccatcgatgacctccgagtacgaggtttgtcagggtatgaagtcgctgtcgacttcattggtaggcggatcaagccgctccaggctcgagcccacccagcctttgactattctgggccggaggacgcaacccgggtttctcctcggggtatttttcttgtatttaaattgacttccttatgtgcgtgttcctcctgacttatcgaattctggttctcgatctacatgtttgaacagcgaaaccgtggagcgccgcgtcggccaattgatgatcagcggcccgacaacggcgagcaaagtccccgtccccctttgcgagaagggggcagccgaacacgaagctgccatcaatgtaagtgtactcggcggccctttcgcatttttcttcggggatcgcattgtgacttcatgaagtgtaggctctccctctgactgatatcatcgggccgctcgtggatcatcaagcagcggcgtcgctgaaggaggacgtcaccaaggaggcgcccgatgttgctgtcgccgctgccacaacgagtggcggcaacgttccgaaaagggggaggaaattctcctccgtgatcagaaattgtcggaagacacccaccccctcggtaagctctcttggtccttcatcgcgtagtcggaaaacttccacctcacatcatgcccgttatactccagggctcggatgcgtctcccccgcctccacgacggcagcggcttgtgacgcttggcgagaagtaagtggatgaatttgaggttttgtcgcttcgtcaaactcttgtagcctttcacagggtagcacgggcgaaggcggcgcaagacggatctggagggacttccagcgcgtctcctgccgtggcctcgacggatgttgtggtcgtgcccaggagccgcgaggcaatgcctagcggcccagccagcgatctcgtggctggtcggggtctgccggctgtcgtcctcacctgggaggagctctaggtcgagatggggcgcctccttgaggctggtgctcgcagcattagccgcgagatcgcggaggcgagggcggcgtcagcgtcgtcgacgaatgagtgcgccgaccggctgacacgcgatttggcagaggttcgcgaggacctccagaagatgagggagctggtggccggcaatgagcgacaacgacaagggctcgagcatcgtatgtcggagcttgagaacaacttgtcggaaaactgtggctcgctgcgggtcacctacactggtctgcaccagctcgccggggagtgtggcgttaagactaccatcccggcgaatcccaacgagttctcgctgacgtcttcgcttgcagaactggcgacagcgatggaggcgatcccctccaagcacgcggccaggatcggagaggagacgtccaacgggacttataccggggcgtgccatgtcctcgcgtgtgtgaggctggcgcaccctgaactcgatctccagaagatcttggatcaaggggcggctagcgacgcgcgcaaggatgtgatggaagaagtgggcgatctgggggagtccgtccccccgctttttgaagaatagaatttcggctcccttgtactccttagtcatgctttgtaaaactctaattggttccaaccgcctttgtgcgtgcagtcatcaccttagttttctttagcattttgatctcgagtactttgttgtcatttgtagagacgttgatgtcgagaatgtccagcagcgcgggcaacctgagttgccagtgttatttttgttggcgacgacttccttaggttggttatttttgttttcatctcatttactctttcgtctggatcgacttgctttgctgtgttctcgggagaaaagagcagtttgccttagtcgtttccatgctaagcagacctcgagagtgcgcttgctgaccaagatcgccgcatccagtattggaggacgaaatttgaggtcgcggaactcgagaggactatgctggaggtgaagaaggaccaggccgtgcaaacactccgaggtcgcaaggtgtggttcagctcatatctgaagagttgctgcacgtccatgactagggtctgtagagagctccgagtaccccgtggagatcccgaggaatcagcggccggatacatctcgtggctgaatggggcctacgcccagctcaaaggcatcggccagcgtatcgatgaggccctgaagcaggagtgccgtcgatcgagccgatatgccggggggcatgtactggcttgcatacgagatcttcgtccgcagctgcacctcgagttcctccacgaagggttttctcgttctcggagaactcctacggagatagatggcctggcgaagtcgatggcgccgctggcggagaaggtcttccaatccatgaactggcgttggccttcctggtagtctccgtgtcctgtgacaaatgtcttagggaaaagtgtaatataattttggatttttatggaattgtaagaagtacttgtgaaatagaaaagaaatatatctaactaagctttcttactctagacgtagtgtgtaagagtgtcttctcacttcgcgacttcgatcagttgtttgagctatacactctccctagcccccagccttgccatcggaaaattcttctcgaaagataaagctcttggacctttgacctgcctcggttgaacaagcactgatcctagcccccagccgtgaagttggaaaattaatttccgattacatggcttggttaatacacacggcgagaactcttacacgaccagatcttacatggtctttcgtctctacaggatccgacaaggccttatcggctctgggcgtccccagccgaagttcccttaggttcctcggaggccttgtcaagacggcgtaaagggatatgaggataggtttcaacgctaggtgtcatctgggtaagggatcatcgggaaggaacactttgattgtaatttgtacctgaaaataggctttattgaagctgtaagatatcttacaagtatggatactattgtcttatacatagaatttacataattgatcaatgttccaggaatttgccaactcgcgaccatcgccgtctgcaatcttgaatgcgcctggcctcaagacttgtgtgatcgtgtacggtccttcccatttgggtgagagcttgtttcgccctgcttggctttgaacctgtcggaggacatagtcgccgatcgacaacgtgcgtgctcggatgcgcttcttgtggtaacagcgaagggcctgttggtagcttggctgctcgaacggcaactcgttcgtgatgttcctcgagtagattcacatcgtcgtttcgctgctcctcctgatcctcatcggagtacttctgtactcgtgtactttgatgtcgtagctcggtggggagcatggcctctgagccgtacacgaggaagaatggtgtctccttgttagacgttgtcggtgtggtacgcacggcccatagtactgatgggagttcttcgacccacttcttgtcgtgtgacatgagcctgtcgtagacgcgggtcttgattccttgtagtactatgctgtttgccctctcgacctgtccattgctctgagggtgagaaaccgaggcgaagcagatcttgactcccagcctaatgcagtgatcctggaaatcggcactgataaactgggagccgttgtccgttatgatacggtgaggcaatccgaatctgcaaaatatgcctttgatgaatttgattgcgtcgtcggccttgatttcccccgtgggtgtcgcttcaatccacttagtgaatttgtcgatcgccacgaataggaacctgtagccgccctatcctcgtgggaatggcccgagtatatctagcccccagcacgagaacggccaagtaagagggatagtttggagtgcttgcactggtagctttgtgtgtttacctgtggaattgacaggcttcacaccgctgaaccatgtcgcatgcatctttgagggcggttggccagaaaaacccttgtcgaaaagcttttccgactaatgtccgaccggcggcatgtgacccacagatctcttcatgtatgtcgaggaggagatgtctgccgtcgtcggacgagacgcattttaggagtaccccgtttagcgccttcttgtatagatcgtagccgatcatacagtagatttttgctttatgggttattttctcggcttctgcgtcgtcctcgggcaactcttcgctgcctatgaatttaatgagtggggtgcgccagtcgtctgtggtctcgatatcggcaatgacgcgctctgcctctgtagcccccgagctgttgctgagggcgaccgggctatcttcgccgcttgcctctttcactgatgtccttgtcaggacgtccagaaaggtgccaagttcgagtggctctcgtctggacgcacaccgtgctagatcatctggctcgatgttgtccttgcaatatacgtgtcgaacctcgatcccattgaaccttttttccagcttcctgacttctgcgagatacttggataactcgggcctagagcacttgtaatctttatgcacctggttcgcgactagttcggaatcccctttcacgaccagtcgcctaactccgagtgcagctgcagctcttatcccggcgagtattccttcgtactcggctgtgttattggtcgccctgaagttgaggtgaattgcatgcttgaattgatctcccgaagatgatgtcaagatgaatcctgtccctgctccttggctgttgagtgcgccgtcgaacgccattgtccacgtttcgttgtcgatttggttgtctgacctgttattaggcatggtccaatcggctacgaagtcggcgagtacctgggacttgatggatgttcgtggcacaaagtggacatcaaattggcttagctcgactacccattttgcaatgcggccgacaacgtctttgtttctcacgacttcaccgagagggaaggaggatacaactgtgaccctatgggcttggaagtagtggcgtagctttcttgatgtcatgattaccgcgtagagcagtttttgaatctgtggatatcttgtctttgcgtcgtggagagcttcgctgacgtagtagactggttgttgcaccttctctctctcaacaacaatgataatgctaacggaatatggcgtggcggcgatatagagaaataattcttcattaggttggggggcaacaagtacagggggatttgataggtagcgcttgagtgcaatgaatgcctcttcggcttcctgtgtccatacaaatttgtcttgcttcttcagcggagcgaagaaaggttgtcctcgctctcccatcctagcgacgaacctgcttagtgccgccatgcattcggttagcttttgtacttccttgagtcttgtaggtgacttcatgttctcgattgccttgatcttctcgggatttgcttctattcctctgccagagatgaggaaaccgagcagcttgcccgatggtactccgaacgtgcacttctctggattgagcatgaggcgatatcgtcagaggttgtcgaacgtttctcgcagatcgtcaatcaatgagtcgcttgtcttggtcttgacaacaatttcatcgacgtaggcctcgacattgtttccaagttggtcgctaagtgcgccctgaaccgtgcgctggaaagtgtttcctgcggttattagtccaaacggcatcttcacgtagcagaataccctaaacggtatgatgaatgctgtcttctcctcgtcctctttcaccatgctgatttggtggtagccagagtaagcgtcgaggaagctcaacaactcacaaccggttgttgagtccaccagttggtctattcgaggaagaggaaagtgatccttgggacacgccttgttgaggtcggtgaaatcgacacacattctccatttcccgttggccttccgcaccatgactgggttggctagccactctggatggaatacctctttgatgaaaccagctttgagaagcttgtcgagctcttctcgtatggcttgttttcgatctggtgcaaatctccgcagtttttgctttactggtttggcgtcgggtcgcaccatgagtttgtgctcaatcacctccctgggtacccccggcatgtcggacggctgccaagcgaacacgtcagcattgtcgcggaggaaggtgatgagcgcgagttcctatttctcgcctagtgatgccccaatcttgacagtcttgtcggggttggcactggagagtggaacgatgttgattgcatcgtccggtttcggcgtcttgtttgtcttgctcactttattgggtggctcagctgtggcaagtggactgggcgtgtgctcgaccatgtcgaggctccgcttgtcgcattgcactgctagcttagcattcccttgaatagtgattgttcctttcggtcccgacatcttgagcacttgatacgcgtagtgagatgcggtcatgaacttcgcgagtgcagttctcccaatgatggcattgtatgttgtattgaattcagcgacatcaaaggtgatctgcttcattcggaagttatttgcttggccgaaagttacaggcaacgtaattttacccaatggtttggacgatgactgaggagtgattccatggaagggttgatcggtgggtgtcaactcgcttcgtgggatccccatcgcgtccaaggtgctgccgaagaggaggttaattgagctgccgccgtcgatcagaactcgcgcgaccttgatattctgaatagtgggttcgaccacgatcggatatcgccctgggatgacagcagtcttggggtggtcctcttctgagaattctatcttctgttcagaccacttcatcttgggtgcagctccctgccacgtcgaacagacttcanttccactttcttgtattctcgctttgaggagtatgtcgtggaacctccgaagatgtgcaagacatggagatcagagtctgggtatgctgagtccgattcctgagtagccgcctcagcgtccttctcgaccacacgtactcgcttgcctttttccaatgccatgtgttttgcgagcgactttttgaagacgaggcaatcttctagagagtgtttgtccgacttgtgtatagggcaccatgttttcttcatgtcgctgccttgtgggtctgggcgcttgggagggtctgcgtattcagttgtgagaacttccgcttgagctttccttttcccactcttgcgatttttcttcttgcttgactcaggtgcgtccttggctagtttcttctctcctccggtcttcagtttgtcgttcttgcgtctcagtgcgtcgtccgcgtgagcgcattgattgacaattttgaataatcttcgagtagtcgtgacacacctcgttgccaactcctaggtagtatagcgatctctgacaccggacttgaaggcgcggattacagaagcgtcggtgatttcggggattgtatttctgcactcactaaagcgccgaacataatccctcaaggattcacccgggttctgtgtcaacgcatgtaggtcgtcttcgatcgcgtgacgcttgtaagctccttggaagttggcgacgaactgctgccacaggtctgcccacgaagaaatcgagtagggcgggagatgcatcagccatgaacgtgcagagcctttcaatgcagttggcaaataattcgccaatgcgttgttgtctgctccagcagcgtagagtactgtggagtaaacctgaaggaattcttctgggtcggtactcccatcgtacttctctattgctcctggtcggaatctctcaggccatcggacatcacgcagcgaacgactgaaagctctacacccagcactgggggcagtgggttgtcggcgatcgtacgtccttcgtggatgtctatctgatgatgaggatgaggaagatgacgacgatgacgatgggtcacttggtttcggtgtacgattacgagggcgtcggccaggttctcgagaatcctgtcgtcgtctcctgttgctgtcccggcgccgatctccatcgtcgtcgtcattatggcggcatcctcgactagtatcgcccagcacccgtcgttcgcgatcatcgtgatcgtggcggttatcatggtctcggtcttcgctcgaacggcctcctcgttcttcgttatcgtgacgtcgtgaagagacgcgatgtcgggaatggttctcgttgtctcgtgcgcgtcgcgcctctcggtggccattcaggtgatcgcggagatcgccggtgccacgaggtgaaggggtggctcgatgaggcgattcccgctgttcagggttttcgccatcagcaccgccagttggtggccattccgggtgcgctgcagcagcggcctcttcgaacgcgttgctgaggttagtcactgattcccgtagccgttctgtccaccgtgcgagatcgtcattctgaacgggatcgtagggggtttccctcagtattgcgttgacggccctgatgtgctgggccggtgtagtcacttgattttccgcttccgcgttagcgcgcgctgacgtgccggtcccatcgatagccaatacctcgcgtggcgtacttgtcgagatgagccatagtcttcgagcaggtgcaggactgacggttcgtggggatcgatgtcgattacccccaacgaatcgatctgatatcagcgttgctccttgttccttgtcctcatccctgagggggatacgtgactgctggaccttaggaggtgacgtcttcatggcactgagaaagaccttgcagctcgagaggtcgtgattctttgtcttgtgaataggacaatagacatcacgagttggagaagtacgctgaattccacgctctttgcaggcatgaatttcagcgtggacgttgagaaaaacccagcaggcttgcaaggtgtgttttctggttttgtggataggacaccaggaccttgtcacctcggaagtcatcctcgccggctcgtgattcttgtcggaaagacaaggtttggccgcactaggatccttctcgggctcggatgtcgtcgacgttccgttctccgcttcggcgggaggatccttcgacatggagtcgtcttgggttctagccactgcgttcttgcttccggtcattgatggaccagacgagatcggcaccgtggtgtaaaccgggaagacgatttcgccgacttgagtccacaccagcattgttgaagcaggaactcctttgttgaggttggtgttgacgctgttgtcgacgaagctggatgacatagtagtagaaccttgagcaccaagtccccctacctggcgtgccactatcgacgggggatacccgtagaccggatatagagggtactggggtacgctggtacgaggatctacgtaatacgacatcaagcagacaaaaaacaaagattatactggttcaggccccttgataggtaatagccctaatccagttgatatgggattatatgatggaaaccacagattacagagagaaaagcagaactcgatgataccgatgagatcgtaatcgaacaggttcgattagatctcctggcgacttggctcctgtaggcttcaactccgtaggatgtggtggatgtgctgactatgagattcgatgccttaggtcctcccgaggggtcccttttatatcgcaggtcaactagtctccaagtaggactcggagacatcggacccggcacgatacaatgacgacccagttctgtccgagtaggactccttccatctgtgaactccatgatgaatttccttaacgtatgctgaaaacgtccttatacgcgcaagtataccatatcgatatgtgacgtatatcgaagggtagagggtataccttacccgtaaccctgacagttatccaacccaaccaagctctgaaccactcataggttagtttaaggctctggtttctctcaaggtaacacttgcatgggtcactttgagtaccgagagataaacaaacacatcaacaatgcatcactcttaatagtacggaattcgtatactcaaatgcaaataggaaatctataccactaggaatgttttcttgtcatcttcttgctttaccttgacagttgccaacaccaacgccatctcactactaggactattctcacctataactcattaagcacattaatccaaaattgactatatatttgtcttgatcaatgaccactttggcttttggcttgatgttcatcaacgaattacatcctattgatcttcggcattccatcttgcgctcttcaaataattgatgtggattactcatggcttcaaatggcctcgcacgatccatcgtgacaaagtctttgctcgcccttcaccaccagattgagtccatcggcgccaagcctcttgctttcccttcacctcctcatgatccattgtagccgagtcttgattgcccttcacgatcttgccatatatagccactcataccccgtgtccccgtatcgtcaatatctttacttgctcctcatcaagctgtaatgtccatcttctaccttcaatctttcagcttgatgtcggaactcaacctaatatcttccaacatgtgttgtcataaatcaccaaaataatcaccacactcttagggtaatagatcttccaatctcctcttacaaaggcaattctagggaatagatctttcaggctgcaccccctcctctatagccgcatcttgccgcctcgcctccatatggaccaagccgagtcacgacgcatccaagctctcgttgttatgttgtagtttgctctcctcaacctctgtggaatccactatcggggtgtcagatctagccacattgatatcggatatggcaacctactattgttgtcattgtcggccaccttgcgccacctccgccccagccatcgacccagtacacctcagctctcaaaaagcaccagatctagtcgtcgagttcaatagtgaagccaccacgccgcttgtcatcgtcactgccacctaatctccatggcggagctaggaggcaaacgggatatgttgccaccgtatcgttccgtgcgtggtttctggtggcatcgagacggaggagggagggtggtggtgatgacgactagggttgaagcccccccccccccttccccggtgcggttgtctacacggggggcgatgtgagaggccaagtcagtataaaataaagtctttgtaggatagaggttgtactgatatgtgttcttgcttgcgggtgtttggattatcacagagaaaactcaccatgtgcagtagaacttattggtaagtattgaagcggctccgatttaaagctaatggaggtatatgcggtaagcgggacacatgcaccgtatgtctatgtcatgaggactcacgtagaccaacaatttcaagcaccaactttggatgattggatccatatatatgactatatgagtcatgacatatttctaaaatgctttgtccaaaccagtcaaaccttgaaagtttttaccagaagaaattagcgacgtcgagactaagcacattcgccattgatgaaacgtttcgtccttgagttctcgttaattttttacccaatgtttaaccattcgtcttattcaaaaaatttatgtaattattatttattttattgtgacttgattcatcatcaaatgttctttaagcatgacataaatattttcatatttacacaaaatttttaaataaaacgaatgatcaaacgttggtcgaaaagtcaacggtgtcatacattaaaatacggagggagcactacttactagattgagttttgacgtcatatgtccatattgctcattcgggcttccgtcattctcagccgccaaccatctcccccaaaccagaataattgctacctctgatatgggttgacatgttcccagcccagtttcacaaacccaacatgaaatcgaaaaagtctaatttagttccctttgtaaatgtcagatctaattcatatctttcaaccacaaacctggttatatcgatttttccaactattaaaaccgtgcaaaatgactctctcaactattttgaacgtgacgtccacatagtatcccaatcatcggagaaataaaaaatagacatgagccccacatgtaagtggtgagtgaaagaaatatgaaaattatggggtccacattgccacatgttagcactcaacacccactcattctttcttcgctgtttcgcacggacaggtgcaagaactacagtaggcaagccggcgcaggtccgctcaacactgcttcccactgaggaagcggttttgtagttgagggataaaaaaataaaaatcatatccaacctatatttttgagggtgttaaattagactttattcggtatgcaattgtttgcttcaaatgggcctcactttgaaccttgtttgattttaatggcccatgattggcactgcttatgggctcagaatctgcccaatcaaaaattcataaggcttattcctgatgcattccctgagcaatacagcaaaaactagcaacaaaacaaactggatccttcgttggcagtaggaccgtaggacggtaggagtagtagaagtagttggcagttggtacagtacagccgcctgcaactgcaatgcaatgaactgagcttgtgaaacagtgaaactgcacactttttgcactgcatctcaccagtcaccagaccaggtaactgctattgcagcagctgcaacaagagcagtcaaaggacgacatgaatacagctaaagagccgagctctcgattatgaggtcacgggcgcaaaggagcttgagctgaaactgcagctgctggatgcccaattaatgaagtgatttgcaactcctaaccatcaactaatccgcaacgatcgtgatttgctaggattaatccctttcctgcaggtctcttcgcggcataattaggtgacgttaacgctgaccggcttccccctttttcctgggacagttgcagaggtgccgttcagacgacggtaaaaatatactaaaacgacagattttccctgatttcgtcaccgcgaatcgcgtcaccgtgatgtcgatgcgtttgattcggcgcagttatgcaacagatttgaggttttgtacgtaatcatggctcatttactcgagtaaattacgccgatacagggcgcaattggtaagctctggtcgtgaaatttttactgagttctgacgcaatgggcttggactgggacggtgaaacgtattcgttgttgtgccaggacaaagagatgcgagatgcgtcatgggttattctgaattgttgctgttgttgattcggaggaaacgaagatggaattgcgtgttgaggccagatggaagggtcagagcaagcaggacaacattttcatttttgggctgattggtttaggtatggaggaaaggacttgttctgttgttggattgcaggagcattttaatatgaccagtggacgaatcttctgaattttaaatggggatgggtgtaatcaggcaggatcatggtagttatggtagtgaagagtgaaatgccatctctacaataaatgttgtttctagcgaaatgtacgttctcttggaaaaatttctgaccaaaatatatgaccttgtttttcctctataaatcaaacaatttcacatgaaaattctatgcattttttcacataaattaagctctctatctctctgttatgagataggagtaatgttttttttaagaatctgtttgctcatataaactctactggcttgattctaaacttgggtgggtggtttccgttaccacatcctgttgataagcccgttaccgtgataactgacctttagggagaccttgtttcaactatcactctggttatggaattgtgtttttttaagaatcggtttgctatgtaagttaatgaatttcatgcaaactctactagcatgattctaaacttggataggcggttaccgttatcgcacctcattgataagcctggttaccgcggtaactgatgttaagggagaccttgatttagactctctcttattacgcaattatgctttttaagaatctatgtgcttatataagcttgtgaattccatgcaaactttactagcatgattctaaacttggtccatacgttacacggtttccgttaccgtatcccgttgataagtccggttaccgcgataaccgacaataatgaagacctttgacttggatttgagctaatgagacaagcattagtagcttccaatccagatgatatccttccatgtttgtaccaacattgaccaatgatggctaccaagtgtactaatgtactgacattttcttagggccccaacaacataaaattgaccggagtagaccacctcatcagtgtgggcccagcggcgcagccaccacaaaatcccctgcgtgtcttccgagttttaaaaccgaacagccaaaaagaagaccaaagggaaaaaaaatctgaccatttcttgatttcttcttctcccttctctctctccatcactccatggaccaagagaagcatcaagccatggccggcgctgccgacgccgccgccggcggtggctctgttgcgaaggacacgggcgacgattttgagttctgtgtactgtcgtccggtgggctcgtctctgccggcgccggcgccgcggcggccgacatgtgcgtggccgacgaggtgttctcccaggggaagctgctgcctctaaggctctcgtcggcggcggctggcgatgcggccgggcttggtgttctgccgcggtcggagtcggtggcgtccaccgtggggttcggctcgcggtccgacagccggagcgcgagctccagcggcagcagcagcggctgcgtcagccggagcgagtcgtccaagagcgcctcctccgaccactccgccgcgcatccgccgccgcagcagcagcagcagccgcggcggtctctgtcgagcagcctgttctacgcgcacccgagcccgtcgccgcagctgcgcacccggccgccgcgccgcagcaccgggtcggctcccccgccgccgccggccaccgcgtggggcatcttccgcctcggcgtcgtcggcgccccggacgtgtaccctccacgctccacagattccaagaacgccgccgccgcagcaaaagtcggcagcagcaggagcgcacggttcgagccggcgagcaccgccgccgacaagaagcatccggtggtgggtctcttcggcgacagcttcgggtgcaagtgctcccccgacgtggtggagccagtcaccttgccggcggcggcgaagagggccaaggccaagaacaagaacaaggccggcgacaagaaagctcagagtgttcgtcgcagcaggatcctggactggttcgaggaactaaccatcaccaagaagtagtaaatctttcgcgtaaaagatcgtgtaatttttttttctccgagttactctgtgatcaaggtaacatcatcattttagttcttaaatttcgatcattagaatttcattcctctgattaaccggccgcagtccttaagacataagttttctttcaacttgttttgtacagattacccttaatccgtatattaattaccttcggaattgtcgcgatgacacctgcagaggtcgcagtatatattcttgtttcagatgtcgtttacttttcttttttgtttctagaaccttacacattatctcatcagtcatcaccgttcgcgtgttgacgcttgtcgaattgtctatacggcgcgagataccactggtgtcacgtcgaagcgaaataaccgcgtcgggttcgggttcgggttcttgtcctcctcaaataaccaatttacgaacccactacttatatcaagtaataactcataataattttttatgttatggttagatttatcgtatctatagatacatgtgagacgattcataaacctatttacagattaaattgataggtaacttatgaatcaatctgctaattacctatttattttacatgtaagcgagttctcataggttgatccgcttgcattcctatcgcgagtggagacggggacagccacgcgtgcacagcgtaacgtacaattacgtggtgttgccgcctaccaccgagcacacggcagcagcgagcagccgaaccgaacgcgtggttccaccgcgcgtcgccggaatttgcgtgccgacggcgaccgcccgcgggtcggtgcggtgcagcagaatccgctctcccgacggcgacgtacacacggcgtccatccctttcccaaaatctcacctggaacgcgaaaaaacaaaacgagaaaaaggccactgtagctggctggctggagctcatgtgcaacgcatgcattgtctcgccggttggttcgtgctgcactgcgtattcactcttcagatacttgtggttttttttgttcctttttcctgcgtagatcgagattaggtgaggtgagcgtgagcgattcttggagcggttcgtgagcttttctttcgacgattaggattagctcatccaacctcacctaatctcatatccttttgcacggcattttgggtcgctactttctgaaaaaaaaaggttgttgttgccacatactacagcttggtggtcgatctcatggcttgcttgccggatccaaactttagtggaaagagagatgcccaaatgtgcacgtcgtttctcacctgatgccttttcgtttgccactttgccgggccagtgaaaaggcatactccctccgtcccaatatattaagacctaggatcggatgagatattttctaatactacaaatctggacaggcttcctaatatattaaaacctaggatcggatgagacatttcctagtactacggactgtctagattcgtagtactaggaaatgtcccatccgattctatgttttaatatattggaacggagggagtacattatgggatagagcaatcgagtgaaatgcacggtaatcaaatcagtagagcgtgaggtgagtgaggtcagtgtacatagaggttaaagagaaaaaattaaagtaagaaagctacgcctacactagattactagttgctgtaaaagaatttttgtgtaggagaa

SEQ ID NO: 24144 - DNA, 3824 bp, Oryza sativa
tccccatccctggcgagctccccgcccgcgaagccggcccccgcgcgccgtagttcgcgcgcgcgcccgcggggttgccgcccgtgccgcgccgtctgcgccgtccgcgtcacccggtcccgctgccctgccgcctgcagccgcgcagccgctcggccccgcagccagcgcgcgtgcccgagccgcgccactcaaaccgccgcgcctcccgttgcatcccgcgcgcgcgtgccgtggtggccgaccgcctggtcgccgccgtcgtcagcgcctgcccacgcctgtcgcccgtgtcgccgctccgctccaaaccgccccaccgtcatcgccgtcgtcatcgcctcggccccgccactccgagcgcaagccgccaagggacggaggcagagcccctcctccctctgccgcgacgcccccgctcccctcctccttttccccaaagcggcaaggaggcgagccccctttctctccctctttttccctttcctcttccccgccggcgtcatccgcctctgtcgccgttttggccgcaagcgccgagcgccagctcgcgccttgaccgcccaaagtcggtttccaaaccgacattgccgccccctttaaacccaggcgccctcccttcctcttttcccctcccaatcttccctgtttttcgcctccacgccattgccgccgccccccgtgctctgttcgccgtcgccgttcgtcgttgcgcgtgtcggacgagccggcacgagcaaggacgcggaaggggactccgggcgcgccctctccttcctcttccccggcccgaggccggagagattactcccgcgccgtcggcctctcgtcacagcgccccacctcatctcggtagtgcctccctccgttcttcctcctcgttccatctcctccccttagactcgggtagtagcacaagtagcctccccgtagctagccggcgccgccccgactgctgccgtcgctcgccgtgtgctcgccgccgtcgccgcccgagctcggaagcgcctctcgtcgccggcctccctcgatgcgttttcgcccaatccaacgctagcatcgaattcccgtagccgcgtagatgctctcgccgccgggaatcggcccctcgtgacctcgtcgccgtttcccccttctcccgccgccggttgccgccgccgcaattcgccgccgtcaagctccctccggcgaatccgagccgttggctcgtctcccctcgtctcgtgcaaccacccggtgtgctcgccttcgcctgtatcgccgtggttcgctccgccgctcgccgctgtcgtccgccgtccattccggccggcgtcgtcgtctacctcccgccggcccgcgtggcagccacgtaggcgccacgtcggcgccagctcggccaagaccgggtcgagccgaccccggtcagtccctccccgtgcgcgtgttccaccgcgagccgtgaggctgcgcgtgggcccgccgcatccgcgtccaccgcgaaccgcgcgcgtacaccgcgtccctcccccgcccgtgcgcgtgcgccgcgtgctcgctccgcacggtgaaccgtgtcaccgacaagcgggtcccacccgggaccgcgcgaggtgagcccggtccaccggccctctctctcctcccctcccgcgcgcgcacgcttgggccgccttgggccggccggcccatttagctcggccggaacgctccgtttctctcgggccgcgccctagccgcccgaggaaaagtctatttcccctccctcttttctttcttttcttttatttttcaaaaaggatttaattcaatccttttcctttagaccaaaaatccaataatcttagaaattcaatatcttcccaaccgcaaatccgtttgactccgttcaacttccaaaattcctcaaatctcgagatctatctaatggcacgcttagaggtcattaatagggctttattttcgccgtttgttgagttgtcccgtttcgcgtgtagtttcggagcccgaagacccgcagtgcgaggatttcgaggatcaagctcaagatctcgagcaaggcaagccacctttgaacatcttgagcctatatttgaacttaattatgttgcttgaaaaatattatgcattgataggactgcacttactctgcttgtcccgtctgcaaggctcgcgtgacctcgtcgccgtttcccccttctcccgccgccggttgccgccgccgcaattcgccgccgtcaagctccctccggcgaatccgagccgttggctcgtctcccctcgtctcgtgcaaccacccggtgtgctcgccttcgcctgtatcgccgtggttcgctccgccgctcgccgctgtcgtccgccgtccgttccggccggcgtcgtcgtctacctcccgccggcccgcgtggcagctacgtaggcgccacgtcggcgccagctcggccaagaccgggtcgagccgaccccggtcagtccctccccgtgcgcgtgttccaccgcgagccgtgaggctgcgcgtggtcccgccgcatccgcgtccaccgcgaaccgcgcgcgtacaccgcgtccctcccccgcccgtgcgcgtgcgccgcgtgctcgctccgcacggtgaaccgtgtcaccgacaagcgggtcccacccgggaccgcgcgaggtgagcccggtccaccggccctctctctcacttactctgcttgtcccgtctgcaaggcagattggcggacctacctaatttgttgcatttgatccttcctttgttaattgtgataccatgtccccttgtaaccatctagttgcgtctcgatattcgtgcaccctgcgcgagtatcgacggacgccttcaaacttaaaattttgagtaacaacttgggtaaaacttgggttttacaaaagacttggaaaacccgacacctgggtcggtgcttgcgaactaaatgaatttccaaaaccgcggaccggggaacgtaccgggtgtacgatttcccgctcttgcacctaaggaccgtttccttggaatttcatccgaacataagacaagtacgaccacatgggtggaatgggacacccctggctgagtaactagcttatcaggggagccttgatgccgagagacatgtggattcgccggggtggtgtcggggaggacccctgggcttcctggcacagtatggtctgggacctaacctgttgttggtctgggacccctctcgttggcatatggtaaacctgtgtcggctttcaaaatgccttgtcatgaaagcttggaggtctcctgacgtggctgatccccacgggctgggtgatccgagttagtaatgtcgtgtgggtaaagtgtaccccctctacagaggttaacaaactgttcgaacagccgtgcccacggtcatgggtggatgtgaggtgattcctagcgtagttttgtttgactactgcttgtgaaattgctgttgtggaaaggggttcgatgtttgaaaaatccgtagctgatggaatcagctaggcccgggtggccgtttgaaagttgttggcccgggtggccgtttgaaaagctgttggccgggtgccaaccttgtttcaattctaaagactgatacattgcacatactccgaccggacgagacgcactgtctcatccgtgtcgtttgagaagcactcacttagtcgtttttagaaaagagttcaaataaaatcaattgcaaaaacaacagcctccccttgaagcctgcattaaacacttatttcccatggcttgctgagtactcccgtactcacccttgctctatataaataatcccccccccagttgctgaagaagatgaagcggatcctgctgatgaggaatt

SEQ ID NO: 24145 - DNA, 3804 bp, Oryza sativa
agaaaatacagataatttcaccaaattatcataaaactatacatttaaggtgatgtatcacaaagctatagatttaaaactaagtatcataaatctacatatttaaacaataaaattaccccgaaactatccttttggccttttggggtttaatctttaccaataatattaatattatgtttgagttatatacgtttaagatttgtgattaaattaatgttaaatctatagttttgtaataactttgttactaaatatgtagttttgcaatactctatccaaaatttataattttgtaacaaatttgatattaaatctgtagttttgggatatatctataattgtgtgaaattcattcttttttgagaaattatatttttaaaagcgtggcacgaataatccacttctcttttgtttaaaaaacaaaagccttgtgaagtgagtataacttaaccgataaggtttcttatgttgtaacaagctcactcgagttcaagtttcaagtttgacatggacgctctgtattatggctaattattttttcagtggcacggaacatattcgtcgatagtgaggtgtcctcggtgattttgtcaattttatggtagcctacactatcgaagtttgatacttttaaaatcttccacccatgaaaaattaggaacggtaacaaaccaaaatttggtcgaatggattagtgggcggggtggctaggtggctcaccaacgcaggcccgtctatactgcgtaggccacgggtgacaggttgaggtttgttctggctgtggacgtactagcgacagagctagggttggtgcaataagggcagtagcaacgcaagctgcacgtacgaggaacctaaaaaagccacataggctttagacatgggtccaaaattagtttccacacagtgcaaatggcctcatgagtgaatttaatttttcgctttaggccctaccacttttgatttcaaccctcatatttttctcaatttacaaagaagtgtaaattttacactaacccccctaaaattgagaaaagaatataaatcaccactatcaccgggtccacccccacaaccctctccccttctcacgcacaccatctcgacaagttcattggcaacaaactccgccgccaacgcgctctccccagttaccctacctgggcaacgaactttgcaccggcgacctctccaccctagcgatgagctctgccaccgctagcacctctctcatccccggtgacaagaacaatatcgcgacggccactacctccggtgtctcccaacttccccacctcagcaacgaactatgtccgcggcggcctctccccatcatgcccctccactttcggacgccgctcgagaccacaaggaaaccgtatccagcaccgccgcctgatgtcatggcctgatctggcctcaagctcaatagccatggtcggatttggcctctcttatcccttgccaacaagtgccgatcgagcatagtgcatcgttgtcggccatcgccttcgtcgacaacctcactcctgtcacctctctactgctgccgccatgcctccatcgttgttggcttgttgctgccaagctcgggtggagagagagagagaagggcttttgagctcgagtgggaccgctactaagctcaggtgaagagagagaagggtttttgaacttgtaactcacaagtaagaccgatcttccaagtgaagacatggtccccacccaactctctcttccacggcaagaggcgtcctatgtggcgggctagagccacacaccacgtagacgcactgtgaacggcctaacataacagggatatagctcattccctcctcggccttgccaacccgtgatcacccaacgacacgacaactatgggcttttttcgtttattgccaaaaaaacccttaccatttgtaggtaaagccaaaatttggcaagatcaagatatgcagatggcccggactaggttgacccgaggcttgacccactgcagctcagatttttacctaacattgtcattttgcaaacagctagaacaaaggcctgagcatacacaaacaacaactcgtaccattcgaattacttactaacagtaaaggatcccagcttagatagatcagggacccaacaagacagttccgaagatgcagtcaagaacatcaaagatcctggagcccatctaattagcggtggctcactatctgtgcttccccagcgagcaacctgcatgtccgaccatattatcatctctttcaaacaactacgatctccgtcctaaaatatagctacttccggttatacatggagaagtgcagtagctatattttgggacaaagggagtacaaaaactatatttgacatacctttccactcctaacattccaagcatatacactgccatcaccagagcctgcatgaaaaataaatattaggtaatgaaagaggatgtgccaaataatcacaaaggatgttagagaaaagtgggtcaccagatattatatggtttccatcagggctgaatgatgcttccagcgtcgaattgcttaccactggcttcacgttgtatgttgctatctgaaaaaggaaaaggtcaaagtctccacataacaagtctgcaaaatataaattaccaaagatagtttgcatgcttacattattgccatgaaatgaatctagcacatgaacacgcccagctttggtggttaaaagaagccgcctgccatcactgctgaactttatgacattggcttctgaatcatcattaccgacagagaaaatatcaaaaggcccctgtggatgtaagaagttaaatgggttgggtaattaagatcaaacaacatactcattcccattaccttctcaaaatttcgagcatcaaacatccttatgtagccaccatatgcaattgcaaaaaccaaaccctgatcatcataagaaactgcaggcctcccctgaacacgcagcaaaccctacaaaatccaagagatgcttttgctagtaaacactccccaaccataccatcaacatttctactgtaacatgcccaatgctcaataaaggtacagaacctcagagaaataaaatggatgcatacatatatgacttgtttaggattgtgaggaacccaatttccgttttcagaaaaaaagatgatgtacgtaattaaaggggcttgtaagtatttagttgcaaaaatcatacatctgggcttcagaatgatatttcaccatcagatggactgatggaggacaataagaagtctttttaaccgataatcagaaataagataaactaaatctgtaaaagccttaattgactgtaaactgcaggttgccaaattgacgggaaagtagtcaagcagtcaaacagtaaacttattgaggagaaatgtacctgtgctttttcaacccttgaatcccataggagaactgttcgatcaagtgaaccagagagaatgttcccgttctcagagcacaatgagatagaaacaaccctgattaagacagatagtatcctctgttggtattggctaaccgacatattttattggaatttatatttattataaagtttggcaaacctgtctagatggcctttgaaatatctcaaaaaacagttattgaccagtgagagtagacggagagaatctgcacagttaattattttaagtatttgtatacatgacttatatcactctgaagctatgacaatataggacttaccatcccatccattttttgaagaatgcaagacataagttgggttttcagtgaagcacacaagctcaaccccata

SEQ ID NO: 24146 - DNA, 4085 bp, Oryza sativa
tcagcttaagaagtttcactcaggtttctacttgatcatgacatacacattgcttcatcgcagcatgtgtggtcatttataaccaatctagaagcttaaagcaagtatatatattttttgacttcgcatattgaaaaaaatgctgaattacacgtataagtactaaatcagccaatacaacaattctcatgtgctgctcccgtcagctgtcgcccatcgtcgacctcgaatggtgcaaagttgtcaagagcatcttttttggaccagctgtcgagaaaaataagggaaacagtttgctctttagtttgtgtgttatgtcactatctctcgaaagattatattcataaaatacttcaaaaggaaactataattcagaaagtactgctgaaatgtgggagtgactaatgaggtgcctaaatgcattcggtatgtttccagattgataatcctttggttttctacaggagaaaattgtatgtaacaattttcaagagttgttcctttattcgtctccaaatataataaattttgtttcaaaatacatttacttctaagtaccaagagcatttgtggtgataaaatatctaaattactccttaccttcacaaccccttccaccaattaactaggagcagaggtggaggcaaaaaaacttatatgccaagactgagctaataaagtctcaacatatttcagaatttatatggtgcttctatagaatttaaatggggattaaggagctaagcctagatctcaagccctagctatcctaagcctagccccgcgcctgactaggagtctatgacaattaacgagggacaatattgtgtttttacatatatcttcataatctcaaaaagaaaccctcggatattttaggacaggggactatataatttcctttataaaaaaaatgtcaagtagatttgatgccacgaggatatctcatgtacaaaaatgttattgcaagcatgaaattctaagaaattccaataccctcaaattgtccaccacatcaaaatgagcatcatatggaattttttttccctaggataccgcgatttgaagacgggaaaatggacatcgaacttaaaaaggaacccaaggaattttacaagaaattggattggttaattttctttaagttttcctcaaaattcaggccctgagttttctagctttctaaattctaatcataccctcagattacactcattgtctacgtgactcctatgtgaccctggcaagccaaaagggagcagcaaatttgcgagaaattcaccgatccgggcaaaagttggcgagacaaggcagcatcatcataccagtcaccaacagggcagcgtgctcttctaccgaggccacaataatgtgcttgctcaaaccagctcccgtatagctgactttctgtagcatcattcccagctccttctcccctttgcaccttcatttttcaccgtcactcacacaaagctcatacatattgttccacgagctaagcggctgatgaaaatttagactagttaggtttcccaacttttatcttctagtttaattttcaaaacttggatgagaatttgagtcgtttaaaggagtcgggagatttccagggaaactaaatccgcaaaagaccctccaaataaggtatcccagtgagatgcagatgcaatgatgcgcgtaaaacccttttcattttcctgcatcaaccatcggcaagctgctgcagaggccgggtgaaaacggtcacggaaattcccgatcgaccgagcaccgtttttgtataaggggtactgtttccgaccgtacgtaccatttttgttatttttaaaatttatcttttcgtaatttttttcatcgtattaatgtcaatacaaactagtttaaataataaatatgattaattaccgaccgatcgatcatcatttctaaagagatgctaccgattccgaccgttttcaccctgggtggcgaaacaaagccttaccactacttcaccatggtcgtctccctcggtcaacaaaggtgaaaaaagaacaatgggagccctacacgtcacagagtagatgacaccagctaccaccttgacctgaaagtgggccctaccggctctctgttgaccagtcaacgcatgagggcccttgatcgatggatcaactgaaatggaggcagtacgtagtagtaggagtagtacacagtcatcaggtgaccgggctgcctgcctgcctgctggtgaatggtggcgatgcgccactgatccggaagcatccgatgctaggtgcactgcagaagtacagcgagcagtggctgccaagatacaacttggttaacttgcaagcgagaccagcattaacatgtactcctacactaatagagcagctcgtggacggtgacttgagctaaacacgcatgctagatctgggaaggattcagcatgaagacaagaaaaacagtggagttttcagctaagcaagcagcaaaacacacatcagcattagtggtagtagcagcatgcagtactaggaatcaggcatcatctttcaagtgccaccacaaccaagaaaatttgcagtaacatgaaaggtcaggtgatctcaaattagtacagctctgatttttctgaaggcctacaagaggagtagtaggggttcagtaaaaaaggttacactaaaaacttctgcattcagaggataaaagatccatctcagaggccataaaagtgaggaaacacgagtggcctgatgagagtgaagaacatttatgctcctatttacagatttcacggtggaaaattgaagtagaggcagctaggagtagctaatatttgctgaatatacttgctcatttggaaatgaggaggattaaactctactggtatgaacaattttttgggctttggtttaatttcactccaagaaatgcagctactagctatagtaaacaacaacactaacagcctcgccgtcacacttccactctccacatgatcttgtcgccgcggcggccgacgttggcgccgccggcattgtggtggggaggcgcgcggtccacggcggcgacgcgcgccgggtgcctggcgcgctcgccgtgcggcgccgcggccggcggcggcagctcgcaggactcgccgacggggccggagcggatgtcggcggcgggatgtagcagtcgacggacaggccggggacgttgaacgccacctcctcgatgctccaggcctcctccatccgcgtcttggtgtggctcatggcggcctcgccgaagcggaacagcgtgacggcggagcgccccgcgtgcgcgatcatgatgccctcgacggggcggtagtcctccagcgcggagctgatggtggtctcccagtagacggcgtcgccgccggagtgcggctggatgcgggtgaggtgggagtcctcgatgtgcacgatcaggccggtgcgctggctgaagtagccgaacaggacgtgccggatgatctccgccggcccctcgctccgctgcttcagcgtctgcgggtcggccgacagcttgaggatgaagcagtcctcgccgttcaccttcttctcgccgacgcaccgcgcctccgcgaacagccccgccgtcgtcagcggatcgagcccctgcatcgtcgcaagcaatggcgagaacacgccggtgagggtgattgagatgggtgggtcggctaggccagatctagcggcggtgaggtgtccggacctggaggacgcggcggagcgggcgcacggggcccttggcggcgtgggcgccgagccacggcgtgtggcgccagacgaggcggccgttggatcccgcgtgcaccttgctgccgccgacggcgagctcgacgtaccacatgtcgggcgccatctgccagaggacgaagcccccctgctcgacggaggcggcgccgcggccgctgggcccgcggttcttgacgacgcgcgtcgcggtctcgaactcggacgccaccatccgcaccttgcccatggcgtacgcgttccgcaccgactgcagcagccggtagccgcccgacgccgccatgtactgctgcaggatgtactgcgccgtcgacgactcctgcatttttcaca

SEQ ID NO: 24147 - DNA, 5027 bp, Oryza sativa
tcctacctagaagcgaagcaaacaaacaagcaggtgaagcaagaactgcgccgtacaatgggggtccccttgatggagaggagaggcaggggatctgctagcttcgaagggatgggggccagcggcgcgcccatgacgccgaggaggaggcggaggtcggagcggcggaacgagtcgcccgaacccccgggactggcggcggcggcggcggcggcggacgacgccacggacggcgtgcgcgccagctggccgcggacccatcggccgaacccctcccgccgcgccgactcctccccgccggcgaagtcccccccggcggcgaggcgctccgggtcgggcccctcaatgaggggcgcgagggcctcccctccgggccgcaggctccccgaccgcgagatgagcggctccgcgaagtactgctgcagcagcttctccggcggcggctgctgctgcttctccttgcggcggcgcgggatcagcatcctccccggcgacgcgctcctcgccggcgacttcccccgcgacctcgccggcgacagcccgcgcaccacctcctccttcagcgccgcgaagaacccctgcttcctctccttctccatcgcccaagaatcacaaacaatgcagccgcctcaaagaaaaacccaagaaagcttccgcctccccggacaaagactgccactgccgaccttgcttcaagacgagggcatggagagtacggcgcgaggagtggagtagaaggtgagctcgctcgctcgctcgctggctagctggagtggaagcaagcgagcttagctagcggagtgcgagaggtagaaggcgatgtgggcggaaatggaaaagcagccgcacaaaagaacaaaagataaagaggagatgagagggggaggaaaccgtttgacgtgagagcgcaggggagaaagggaaagcggcgaggtggtatgtcggaaagagagaaaaataaatcaaaatacgggtacttttgacaaaataataatcaaagcatgttcacttgcttcatgttactgtagatgtttgggtctgaatttttggtcaggttcatgggacgaggatgatccgtagagaacacagcacgttttcgaccaggatttgatcatttgatgtgtggggggaaacatgtggggttttgtagcgtcagttgttgatttttgcctcgttggaattcccatggttgattgattgccggactgcgtgatttcgggctccaaataggtacatgcatatgccgccaagtcgccaaggcgagaggtagtaggtaaaacacgaagtttcaaaatcagtttgtaaacctcgttggtttaagccccaattgtgtgctagtactagctttatcgagactagcacgctttggaggcggagagaacgctgtcaaaaagcttctccactgtcttcagtgcttgtaaccgctctacctgacccgatgccgtactcaacccacatcctataggtgctctgtattccttctcagttccataatgtaatgcgttattctatcggttccatgggccatgattttccatcagcatctttggtatctcactcaactcataatgacaccgggcaatcatgtaatgttcgtgataatgaaggttgcttttccccgtgttgtaaacagtgtggctgatggccactcagccagccagccttgccccagcggaaacggagccacccggtgagggaaggaaggtcccgggccccgcctcacgcctgctccaacgtgcaactatcgctttccgctggtcccagcaccgtgccgccgaatcatggaggagtagtaggagtagtgtgtgtggctaccgggcgcgatgcgtgcgagtgtggcgggaacgccgggaacccgtcccgtgcagcggcgcgcggcaaccaacgggcagaagggcagaaacgcgcgaccgctcgctgctggtgccgcattgcaacgggcgcgcggacacgtgacgcgcgcggctcgcgcgaggggacgagcagccgttgggttgggttgggccgtgcggcgcgctgctcgctgcgggcgggcgcggcttgaccgagtcggggtcggcgggagcggcgggcggggggcgggggcacgtgagcgggggggcatcagatcggagccccgccgatcacgggaggcgatggcagtaatcgctgcctgctagtgctagtgcatcaggccgtactgtggtagatagaggcggaggcgacgtgcatcaaggggtgtttacatggagctaacttttttttagtccatgtcacgtcgaatgtttgacgctaatttggagtattaaatatagactaataaaaaaactaatttcataaataagagctaatcatctgcgagacgaattttttaagcctaattaattcataattatgaaaagtttactgtagcatcacattgttaaatcatggcgtaattagacttaaaagattcgtctcgcgaattagtctaaggttatagaatgggttttgtaattactgtatgtttaatactctaaattagtgtccaaacattcgatgtgacagggacttggaataagtctatgtttcccaaacactttctcaggcactcagagccagactaataatacaaccgaccggttagctataaggttatttgtagttttctctcggcctatccatataataggttagtctttacaattaatataggacccacttatctctctcacagagtttcttgattcttgtgtttaagccgactgtaagtttacaaactgcttcttctctctcctctcttctcttctctccttcatcttaacatttagccggcttatagtctactattatacttgctcttacagggtgagtaggttggctaatactgctttttttttaccttgcaatcgttttttcccctcttctgtgtggatatcacagggcatgcggtggttgtatgccacggatattgcaggggcgattttttttttccctatcatgcaggacatgacatgttgtcaaccgattgtgcaacagaaacccagctcagagctataaactgtagtacagtacgagggtgacagtttggtctttggtgcagtgactagtgagtactcgtaactctttactaattgcatttccattatatattcatgtgcttaggcattgatcgtaattgtgtacagtttactcatctgtcagtcactgctactacaaattgcagtaccgcataagatatgtatacttttggcattgcttagggctcattcggttcataggatttttaaaacataggaatactagaggaatacaatggcaaacctatggattgaaaaacacatgaagttttcctatgttgttgagcaagccaaccaaagaaatgcaaacattaggttggagtagatattttttcctatgtttttccttcaaaagtagaggaatggaaaactttcctatagttttcctatggtgcattcctatgaaacgaatggtagtttaaaacacattcctcttcttatgcttttcctttacagttccttcgaaaggaattagccttttgcccttcgctccaagcttactaaaggataaaggtatataaactctaatatgagatagtgatttgtaatgctattatagtacatgatactcatagttgtgccacaacaggttgcgctatgacaagattgctataaggacactagttacaactattacttctttttatttcagccctttatttcctgcatggtagcccttctcacctttttattaacaaataagctaaaaattttatggtttagaccttataacataaaaaaaaaagttacgtacatgcccctaacctaccgatggatctacttgttagccagcctatcatttttttccttcctcatcaccctctctccctccataaaattttggctacaaagaggcggaaatagagttcgatccatcttgtcaaaattttagtattaccaaaacttgataagatttattttggctacaatatgaacaggctctacgaatgttgatattttcctgcacatgcatcaatgcatcatcagcgctcgtcccaattcgttctacttatccagcccaatgtaaaaaaggcccattaattcaggtaaaccgtgggccgtctcactcgagccgcaccccgtttgcaaccgagaatgctgtttggcgatcgattgccccgggatgggggcagcgatcgatcctctcccccctccctcactccacccctccaccggtttccttttctggcaccgcattacttttctattttcgtaaatttatacacctaaagtttatacacctcaagtttacacttctatagtttagagaccaaaagtttataagtcaaaagtttatatatccgattcaaatttgaatttgaattaaaatatttttttatatatggtatttctatacatctaaagtttatacacctaaagtttatggacctaaagtttataagtcaaaagtttatatacctgtttcaaatttgaatttgaattatatctgattcaaatttgaatttaaattcaaatattttctatatatagtatttctatacatctaaagtttatacacctaaagtttatagatccaaagtttataagtcaaaagtttatatacccgatttaaatttgaatttgaattatatctaattcaaatttgaatttgaattcaaatattttctatatataatatttctatacatctaaagtttatacacctaaaatttatagacccaaagtttataagtcaaaagtttacatacccgattcaaatttgaatttgaattcaaattttttatatatagtatttctatacataaatttttctaaattttgttttttttaaaaaattgtgtggtgtactgtagtagaaagagaagaaggggaggaggaagggggagaacaggaggagaggcaaaccgatcgctgcacgatcgccctgagaacgatcgcccattagcctcccccgttggcaactccgtgtcgcttccaccatggcgaattggcgattcgctccacccgtcacggcacggtagcagtgta

SEQ ID NO: 24148 - DNA, 10750 bp, Oryza sativa
ttgatgtgcccctccaggccatggtgttggactgctggtcctgcaaagcacctctactcttcgcatgttgctggtggatccgtgaccatcatctgaaatgttgagcagtaatttcttcagtacaacaagcctctcccttagcttccacctgtgatgcgtggaatcctcagttcagaatcctgtgttctattttcttcagcagatcatcgaaacactcaagtatacagttgtactcatgaaacatgagacctctcgccctacagttagatggagaacataattagatcaccagagctatttattcagtgtatgcagtgctagtgaagcgacaggaatatgagaaacataccattcacgatgattgcaatatgtgagaagatgatcagcaagggtgaatggtcgcacagatgggcgaatcctcttcgttgtgtcatggacttggcacaatgttgttggtcgctcgaacgatttgttgcttggagagtgtaaaacgacaggatttggcagcagcacatagtaatagtagtaaactgaatttctgctgattgaagggaggtgtttggctgagactgacaagcacctatccctacaaaggaacagcacgaggttgccaatgctgctaagagcacccgcaatggtaaagtaaggtgctatctataaaacatgtacatctcagcaatagactcgattaatagtaaaccaccttaatagtatgtctacattggtatctatagctctctcatgcattgcctcgtttttctctatagactatctctaagttagtagatagctttgctctctctcttcatttaatacattccaagtaggaaaatatgctgacatggatctcttgtagagagcctatagataaccattgtgggtgccctaactggaagcagttcccagctgctgacatccacctcgaagattgtgaatgcgcaacgttgccatgactccttggcctcccttgtcgcactcccatggcggacaacgaggagcatatgcccacaagagtcgactaggttgtaggagcaggagactggatgtctggatcgccgaacttggcagggacatgagcaacaacggggccaagcgggtttggagggtagacttgcacaatctgccttgtcaatcgccggaagccgtagagtcgaccttggaagggcaatgtgttcaagagctccatgtctttgtggatgacctcccagcttgggtggctagcctcacagccgagcactccagccgtgtaagggaaccagacgatgacggcaatgggggtcatcggagacgtggcgctggtgcagcatgtagagcagggagttgcggttcttgaccacctggtggaacacgggggcgaggggcgggaggtcgacggcgacgccggtgaaggggttgagcacgcggacggcggtggtgcgcttgtggaggaggatgatgaggccgtcggtgaagcccacgatcctgtggcaacggagctccgggaggcggacacggaggctcctggccgtgcgggtgtggaagaaggtgatctcgcaggcgtcgtcggggcgggcggcgtcgccgtcgcacagcgcgacccacgcgcgcgggcggagcaggtgcttccgcagggtggggtcgcgcggcgagggcgcgcacgcgcgccagccggagcagacggctcggaatgcaatgtagtccaccacgtcgccggcgagcacccggccggcgacgaggcgggttaggtcggtggggagagacgcccagccgcctacctgcgccgccggagaagtggtcaccaggtggcgcttgcgcttccgtccgcctctcgccggcgccgccgcggcagccggagctgaagggggagcacttctccccattccacagaagtgattcaaaccacaacgcgggcaccacgaaatcgtcggatgctatataggctaggctggcctcctcgccatctccgaatccgactccgactccgactccgacaacgcaggcacagcaatccgaggagttcacggaaacccgagcgcgcacctggattggatggacgacggagaaacccttggaccttgcgaatccgaagaagaagaggaagatccggaggaattacctagcaccgcaagatcgccgccggaggcccggagatggggagacggccgccggagagggggatggtaacgagtgctccgctccggcggacggcacggggaatagttggatacacgagtacaaacactagccattaagccaggcctaacgggccggaatgtgttgatgggccctcccacgattatcttccccaagagtaagttaacttgaggtccctcaatttatcatcgattctgaaattgatccctaacaccgaattaccagatagaacaggttgctgaatttacaaaaccaaatcacctgaaattctaggcagtattaagcttggttttagcttacgtgcttttagatgcaatatcaagttctgaacacatatttactttgaatcagtgacaattatcgaactatagggtgaaataaacagtcaacttttttttctcaacaatccaagttggcatgcaaatcattgctgctatgaagttaccttctgcactctgcactaattaaactctagaaattttcttaattttccaacaaagagaagatgatggtgttactttgttacggttattttcagtttgcgtgagcacttttattatggatgtttgcatctcacggtgcagagtctgagatatttattacatcatcaaaacaaatgtgaacacttatctttgtttttgcttattaggacaaggcattaaggatttctagcaacatgataatattatcgtcacatttgggctgtgatttgtgattataataccacgtaaacgtcaagtcggatgaaaacagcggcactatgccgcataggatcaaacaaccctcatcgatactacccgggtgtacaatataagagaggctttttgtacccgatgttgtggttgagcgacaaaatcagacttggtccatagctgagggatgttaaatgaaccttttccccatcaagctcatcccaattgatctactaatccaacccagtttacagcccattaattcagtttggaataagttcacctgaggtcccttaacttgccaacgaatctgattttcgcccttcatccagaaaactatatacaacgggtccctcaactatcaaaatcagtgcagatgaggtccctcgacggttttgacggtggttttggctgacgtggcgcctacgtggaaaattttacttggtcttcatctgatgtggcattgacgtggcgcatacgtggcaatttgatcgaaaaaataataaacttagtaggacccgcatgtcagtctcacacacaaatcaataaaagaataatggggcccacgtgggcccacatgtcagctaaaaaataaagatggttgggcctacgtgggcccccacaagtccctctcggctctcctttctcttcctctttggtctccctcgtcctcgcggggagcggcggcaggagcatgccggcggacggagtggcggcggggcgggcggagcgacagcaggccggggggcgtcgggccgcgtccaggagcaaggaccgacacaacaaggtgtgcacgaacgtctccgaggtcgcctgtgccgtacgccgcgctcacccgccagccgctgctccgctgctatgctcccccatcgccacttcgcccgccgctgccttggagaagagaagagagaagagagaaaaaagaagagaaggagaagaaaagaaaagatttgcagctgacatgtgggccccacatactttttaaatttttttttgctgactaggatgccacgtcagtgaaaccacccatgtttactgccataggaccttgtgtgtacggtttatatgagtttaggggtatacatttctgattttatagttaagggacattaaaaaatctcgctgttaagttgagagacctccggtgaacttattcgtctctctcgtactgcactcgtttgtcacttcattgcgcttccacgtctcacgacggaatcaatcgatcgagccgttgccgactatacacggttgcattgcaccgctgctgtccgctttgcgtgttcgttcaaaaccagtccagcgtcgtggcagaggcgaacgaaccatccgtcgatggcgctgctgcactgccaaagtaccaagcgtatcgtttgccgctgctgctcgtgctctcgctactggaaatcagaaatcaaccagcgtatcgtttccctgacacgggccagcgaccaggtcaaaagtgagtgaaagaaagaattcaatgttgggtgtacagtgtagtagaatgtagtacgcctgtatgatcgcttcatgaacatagcacccatatatataagcagccaagcaagcattgcatccccatgaccccatatcaagaaccactccatacttacaattggtaggcgacacagctcacataggtcacaaggccatggctaacactaccatggcgagcggtatcaacgaggtaaaaaaaaaaaaaaaactccttcccgtgagatttcttttcatgacttcaccccctgcttgcgttcctggttttgtacatctctcaggggaggttgctcgcctttctcatcgtcctgtacgcttccacgatcgccgcatccatcgggcgcaggatattgggggcgcgcctcgccgcgtggcgctccgacggcctgggcgccacctgcatgtccttcgcggcgctcacgctcgcgatgcaggccatgctcgcgtgcgtccttgaggagaagcccgccgcggccgcggcggcggtggcgaggcgcccggccagcggcggccggctcccgtggctggtcgccgccgtgagctggatgtgcgtcaccaactacttcgtcgcctacatcgccctcggcggcaacgtggcgcccacctcgctggagtggacggccgccggcgtcgcctccgccgccaacctcgccatcgccacgcgtaccgtccgggtaaaatcttcttcttcttctttttcgatcttatactagctgttcttcgcttctttgttgtgttcttgctaactttctttctcgttgtcttcagcgtcacttgggtgtgagcaacccggccaagaacgagtcgtagatctgccaggagccaaggaagctggagtttttttggagatgactgctcgatccggcgtgtttaccagtagtttatcaatcaatagtaccttgttatttcattgccctagctttgttcgtgaactttgctgtagtttctgtatgatctccatggatccagtacttgctagaccttaattatgaaatggaaacttgcagactactactccctccattccataatataagtcacaaccactttttttagatgttacataatataatataaggtatacatgcaagcatgcaataaactatgacatcttctccattaaattataacttttttaaatcctccactctcatgttatctaatcctattagatgcatacattgtatacattgtatttattaggatgatctaaactacaagatgataataattatttcttggtctttaggttaagggtagttgtgccttatattttgaaacggatggagtatgttttttcaccttctatttcttaaaactgttcttttctatgtgctggaggggaatatgttttctgtgtattgggtttcattcaccaggcgcgttggtgaccgtgtgcccgtgaaatgatatcacagactttttttttccaaaaaaagaacacgtccgaatggttatattgtgtagccaaaccaactagttgtgcaacagaaaacacaaaacgcagtgctataaagtgcaacaaaacaccatagttttggcaccttattggtatctcgagatattttttttgttagaccaaagcaaatcttgatgagtataataaccttttgtgattccgttttcatcataattcataaattcacaagcttgggccttgggcatttgcttgcgcctgtgtgtgcagcaccgctggtacagtgaagctgacactcggaaccagtctacggagtactccctcttttcctaaataaagcaaacctaacttgccaaggagcttttaaagagagaaacaaaagaccacaatgtccttaattaatatgaatgttgtattgaataatgggtaggtgaggggtattgaagtaataaaatttctcgttttgcggattggtgatagtaatatggtagaagttagtttattttggaattaatttgaaatctaaaaattgatttattttaggacggagggattagtaagtagtagctgcagtatcatgccccacgcagagcatgcgtggtttggtttgtcgttgctcgctagtgaaatcaataagcgcgagttcgagctcgagcagctgaaaaaccactgaaaagtgaaaaagcaagaaaggagtactgcgtccagtctgtactcctgcaggctcgcctctttccaaaatttgccaaagctggaattaatactgccaatattgaccagttcaattgggagtttgagacctctaggatgatcactggatcatgaacactaagcctatatatcagcaggcataagcaacaagttccagtccaccaaacacacgacataagcagtcaagaagaagagtagcatagcatggctgcgagtgatctcaccaaaggtgaaaccctagacgactcctctcttcctcctctgaattttctgcacttcttgtcacgatgtgtacgtgttcttgtgctcgatttctctgatccgatccgttccatcaatcccagggcgagttcatgtccttcctggtcgtcgtgtacgtcgcgacgtcggccggctcgctgttctgcaggctgatgtcgtcgatcgcctccccggaggccgccgccgcccgtcggcgatccggcggcctgaacgacgccgtcacctgcgcggtcttcgcggtgctcacggcggcgtcgcacgccttcatcgcgtgcttcgtggaggaggccgtcgggcccgcgccgccggcgacgacgacgagggaggagaggtgcgccgcgtgggcggtcggcgtcttgaccggcgtcgtcacctcgctgtgcatctccagctacttcttcacctacatcgccgccggtggagtggcgccgacgtcgctgcagtggacgatcgccgccgtcttctccgacgccaacttcgtcttcgtcacgcccaccatcatggtaattaattaaagattggatctttgcatgcctacccgtctaattactgttaattagctttcttgtgtgtagcactaattctaaactagttcgatctcgttgtctcttcagcgtttcattggcaggttcaacagtgccagggatgactagatgttccaggaagatggatgagtagttttttggagttgtctgattcaggagatggatgcttgagtcgtcgtcatgcatgttgtttggctgctgcctacctatgcatgttttaccggttttgattaccttgatgttgtttttgtttctcttatgcccgtgatcttgctgtgttcttgatcttgccgggtaattaaacttctaagatgtggccttggaatgttgtatgccgtatgcggctccatttgatgatctaatctaccagtttgtttattttggtatttctgctaatacttgttcaaggagaatctgttttctggttgtgaaactgttcttttccatgggattgtaggcaggatatgtaggtagtgcgttgtatcatgtactacgtgcgaaattgcagcatcttcaggggtagcaatagcatagcccagtttgaattcgagctgctgtctgtcactctgtgtgtatgtatagcacagcgaaacttgcgtgtagtttgtcacgttgcattcctagacatgggccctgtttggatcaggagggctattaaataatcctctagaatcttgctatttaaaagtattaaacatagattactgacaaaacccatttcataacccctaagctattttgcgagacgaatctaacgaggtatattaatccatgatttgctacggtgatgctacagtaatcagccgctaattatggattaatatacatcattagattcgtctcgcaaaatagcctaggggttatggaatcggttttgtcggtaatctacgtttaataatcctaaatagcaagattccagagggctatttaattttttttttgagcaaagggcgatgccctccatttccattaaagaaatgtaaatattcttacaagaaacagagtctgaaagaccaaaatgacatcatgcctaaagcacaagctaaagttttcctaaagaaagaactccaattctgccacacagagccaaacagaagatcaaactacctagtaagacaaaagcccataatcgactatctccagtaaacgccatcagccattgagcagtcttctctgtccaagacgccacccaaattgtgatttaaaaacttcatttgctatttgctttagcagttgtactccccattgcaactttccttgcctttcctccgaactctgcaaaatggcccaatccaacattagagagcaggaattatacaagatatcaacagggctatttggtaaaatatgatcaaagcaggctttatttcttgctttccaaatagcccagataacagctgccacacccactaacatcaattgttttgttattttatcacaagtttgaatccaagagcttagcaagtgcttcaggtctttaatctatttcaagttaaaagcacatatcacaatgttccaagtaaatctaactgacacagatcattccccttcttccacccccttttgattagattgtctttggttaaaacatttcctttagtcagtaaccacagaaaaatcctaactttcagaggaaccttaattttccagatttttttgtatgattccctcaccccagttgatgtttcctgaaatttcaaagccttatagaaagatttaacactgaacatcccattttttgtcagattccaaacagtgacatctttttggtcactcaagaccagctcatcacaggaagttttgatcctattccagtcaactaatctatcacccatcaaattccttcgaaaggtcatgctagcccaacctatctccttcacctttgccaaagtcacaaactgattgtttgttattctatacaagagaggaaattgatctgccaaaggtctaccacccaaccagttatcctcccagaataagatgtttttaccatttccaggtttctttgtgcagaatttgaaaaagatgtttttgacttccattatcccttgccaaaagtgagaggctcctgcttttaatttagtggcagacagaatgtgtttggataaatatttttctctgatcatctgttgccacaaaccatcagtattctcaagattccaaatccatttccccaacagagcaatattcatgaattccatgtcaaggatccccaacccaccaatctctctgggagagcaaactgtgtgccaattaaccaggtgatattttctaatcccctgatcttcctgccataaaaatcttcttctaaaaaaatccattttttctctaaccccaataggaactctaaaaaaagacagcatgtaaagtggggtgctactgaggcaggcattaatcagagtcaccctccccccaatcgattggaaattaccctgccaacatccaacttttttctcaattttcccttctgcctgtttccaatctttattcagaagtcttttttgatcaattgggaagcccaagtatctcatagggaagcttccaatattgcaagtaaaaatctgactatatacagcttggttttgtgctgcttctcccaaacagtaaacctcacttttgttaaaattaattttaagacctgaaagttgctcaaaaatgcagagcactttttttaaatttcttgcatattctgggttatcttggatcaaaaaaatcgtgtcatcagcatattggaggattgcaattctgctatcaacaccagtccccaacccctgaattaactgttctctctcagccctttgtatcataattgttaaagcttcaacagctaggttaaagagaagtggggacaaagggtctccttgccttacccctttgtgagtctgaaagtagggcccaatttgatcattgacttttactgcaactttacctccccttactgttttcataatccaatcacaccaaatctcagggaaaagttttgcttgaagaatatgaaaaatgaaatcccagtttattttatcgtaggctttctcaaaatctactttgaataagatccctttttgttttttcctgtgcattgtattcaaaatttcatgcattattagtactccttccataatattcctattttttatgaaggcagtctggttctgtgaaatcaagtactcaattacttttcttaatcttagcatgagaatttttgttataattttgaaactgacatttaatagacatattggtctaaatttttgtttttgcattgcatcctttgtttttggcaccaaagtgattactccataatttagtctttcaatgtcaatgttccctctttgaaaatcctcaattaccctcattaagtcaggagaaatcaggtgtcacgcccagaaattcccgaatagaattccaagcagaatgtgcattaaaatccccgtccaggaccggccggggtacacaaatgacaatattgacattcagatccacgtcttacaaacatc

SEQ ID NO: 24149 - DNA, 1744 bp, Oryza sativa
gggttggggaaaatagagcaagactgagtactacccactgtactcagcaagtcataccggaataggggtatgatgcagggaattatcaaaggagagctagagtggttcatttgcataaagcgagcatttataaacagaagttgaaagaattaaacagttgtaataattaatcatattattcatccactgtccaacgctataccacgttgcgacaagcccaaccatccacctatactatccaatttcattagactaaactagggtgagactaatcacggtgaatctggttgactgcccataaccgcgggcacggctattcgaatagttttactctgatcagaggtgtacaactgtacccacaagacacagccccacgacacgtttccgtgcgccgacatgccaccacgacatactggaaagaggccgtgacaggacccttcgcataaccccctctaaccaagcacaccacacctcaggtttcacccccactcttcgcaaggcagcgggcagtcccctctagtgcctaggtgaattcggaagccgcataggccgtcgcaaggcccatccaaactccatcacgcccacccttgcctggatgcgtcggctagagaaaagctacactacaagcccagccgttgcccatgttggcttgtggtaagtacgataagttctttcagggcatcccgcgaaccggtccttaactgccatgggtgcgaccaacaaaaccatgcacccacagcccaccatgtgatttattttaattaagcaacaccgaagcggtgtcactaatccaacattaccattagaacctacagtctaaacattaataggatttttccccaatgtgtgctagttgaactaagcatggctaagcaattcctattccaaagtctattcatgttataacccaagctaacaaaggagcatggtatcaaaatagcatggctgtaacaataggtaaacatcccatagtaacattataaaacaatgcagtatttgaagaaaaacaatagagcatttgcaatataggatcaacatgttcaagtgacaggcatgacttgccttgctctgcaactggaggaacctcgacgactatctcgaagtacaccggagcgtcggaagaaccggaatctaagcgacatacaaagcaaacaatacaaacaggctataagactactgaaacagagaacaaaaccatttttaatggattctacacatttttcttgatttactgagacttgaatgggcttaaacggagcacggatgaattagatatgaattttagaagattcactgtgtttattactataacaaaaagtccttaaataatttattgcgcaattaattcccagggctgacgtcatcaagggggcggtcggcgccgacaggcggggcccgcatgtcagcggctcaaggggagagaggggcgccggcaagtggggcccccgggtcagcagcccaaggctgccggcccaccgtggaccgggaccacgcgggtggtccaccgccggtccacgggaccgacggcccagatcgccccggggccgatcggacgggcggcggtacccggctcagctcggctcaaggccggccgaccggccacggcgatggcgacggcgtgcgcgcgcacgcgttgccggcgtcggcaaccggcggcggaggcgccggcgcaaagtcggcggcgcacgaccggggcgacggctcgacctggcgcggctaggaggcagaggggggctgcaggaat

SEQ ID NO: 24150 - DNA, 2588 bp, Oryza sativa
  unsure (1)..(2588): unsure at all n locations
agggagggagacgaaccacggcgcccggcatccatggcagaaggcggcggtaggggtagacctccccggagtgcgaggggatgcgggttccgccgacgaatctcgacggaggaagggcggacggggtggatctcggccacgcgaacccgacggcggcgacgaagcggcgcggcgacgagtctagcggcggctagagacgaccggagtggcgggaaaggcggcggcgggtggatgcacggtgcgggagcgatggagagctcgggagagttcggccgaatgggaaaaagagagagggggtggcggcggagcttaaatagggagagagggggccggacgtggccgggagaggcgggaatcgccggccgacgtgggggagtgggagaggagagagaggcgggattcgaaaatcgaatcccggccatttcaggcacgggcccgggcccgatcggaagagagggggaagcgggtgcggganacgcggcggcacgaccggggcggccgacgtggcccggagggggcgggacgcgaggcgcggcggcggttgcggcggtggtggcgacgtgaagacgggcggccggaggaaggggacgaccccaacaggtgggggcccacctgtcggcgtcccggggagagaggggaggcgggcggctggcccgcgcggcttagctgggcctcggccttcggccggcccagcgggaggagggggagaaaaaggaggaatgggctggcggcccattcaaaggaaaaaaaaaagaaaagaaaagaaagaaaaagaaaaaagaaggaaaaaggatttttcctgggattaaaattgcatgtgctcaattttaattggttaaaattatttctagagctctgaaaatttcactaaaaatcctgttagcgaatttcgacatgtagaactcaagaaaaattccacatgccaattccgattattatttgcattaatttattaaggtttactcttgcttgacacaggtattttcttgagaccatttaaaactccaatttaggctcgggaaagaacttcggggtgtgacatcaggtcccaaaagtgttcataaaattctatagggaaaccatcaggacctggagccctatttttcttcatatctaccacaacagctttcacttcttcttttgaaattactttaatcaattcatttctatcttcttcccttagtttagagaaatcctccatgttcattgaaatacttgcagattggccaccactcccaaacaaggttttataaaaattggtaataaaagacatgagctgatgttgaccttcaatcacaccttcctcctgaatcaatttatgtatttgtcctttccttctccttccattagcttttgcatggtagtatctagagttattatccccctctaaaatttcctggtctttacacctctgaaaccactttactctctcttctctaatggtatactttaattttagctcccaaacccttctttcctctctatcaagacaagtcatcccattcatctcgatttttttgtctaacaagtcaatttgagttaaaatttcagccttttctcttctatatttgccttcccaatttatgttccagcccttaagcctcttcctaacagccctcagtttcccctgctagacatctaaactggacccattatcattataagaagaccaaacttcactgacaatcttatccaaatcctccctcatgaaccaactaatttcaaatttgaaaggagtattcttgctgcaattattcttcaggaccaccaacagagggttatgatctgagaaaactctttctaggcattggactgtcagcaaaggatatttttgttcaatctcactcgttatcatgattctatctaatttttcaaaagtaggattttcatgacaactgcccaagtaaatgtgcttggtcccatgtcaatctctcttaggttagcttgttcaataatggcattgaaaacaaaactccatctgttgcaaccccctggtttgtttttttcactctcccttctaataatattaaagtcaccccccaaaattagaggttttttctgtaaattcaattcctgtgcaagttttcttaggaattcttctttatgttctttttgtgcagcaccatatacaaccattaaatcccactcctgtttatcttccaaattctccacggtagctttcaagaaaaagtgaccttttctcacagccagcattttaaatttttctccatctagacccaaaagaatccctccagacctcccagaagctgggatccaatcccaaataaactccctcccttgccctaaagtttttagaaaatagacagagaaatcttgtttcattgtttcttgtaatccaataaaaccaaccttgtgttctttcataatatctctcagatgtttcagtttttctagatccttcattcctctaatattccaaataatacctttcattttttcttttttggttttctcccaggtttctgtttagttgtcataggagtgaccttgacaatagcaaggtttcctctatcagctcttctctttcctttatgtgattgagataaaaaggtttcagtgaaatcaaa

SEQ ID NO: 24151 - DNA, 1845 bp, Oryza sativa
tccatacggacgtccccaccatccttaacaatgataagcatgtcatcatgcttttcaatctgagcttcaggctcaatggtgaagtgggactcatgtggctctttttctcattcatgcttttttggtagagctcaaccaggtgcttggggacacggtagttacgggaccaatgccctctgcctccacatctatcgcagttatcctgctttaccccaaatgattcacctgtaaccttcttgagttcgccttttcctctgggtttacccttactcttgcccttgaatatgatacttcccttacctttccctttcttctcaccatggcctcttttacggccacgcgagtttccaacaacattggcgtgtgcttcaggcactgccatagacccagtgggtcgagcagaatgattctttagaagaacctcattctgcctttctgcaactaacaggactgagataagatcaaagtacttcgggtactttgagttcctgtattgttgttgcagcactatgttgttgggatgaaaggtagataaggttttctcgatcatctcagtgtcagtgatcttcaggccacataaacgcaactgagaaatgatcctatgtagagcagagttatatgccgccacagacttgtagtcttggaagcgtagggtgatccagtcatgttgttcctgtgggagcacaattgacccttgctggtcaaagcgatccttcagggattgccacaataccagtggatctttctcaaacatatactcagacttcaggtctgggtggagatggtggcgcaaaaaatgcaatgcctttgctttctcggccttcgtagactccacagtgccaacttcgggcagcacaatagtatgatcgagacccatggagtcgagtttaatctcaacatccaatgcccaagtgaggtagttactatcatccaaggcaagctcggcgaattccttctttgctatgtctgacatgttctgcaacatcatttggtatttacaacaggtaaatacgatgtgcagggtcgacatgaattggtcatgcgtaatcttcaggattactagtgtgtgtaatcttcaggattatcacacagtttcccatataatctttcctagcaaattaacttaagtaatcttcaggattacagattgcttgattaaatattatcaatcatgctaggaaatcaatttcataacaataaaataaatgttatgaaagtcatgcaaacagcaaagtaagcatgtaaaacaaaacgaagagcatacatgggcacaacttcatgtgtattgtgcagtctgtaaaaagtaagataaaccatgtagtacttccccactatgagcccacgcttcatggcggcagacttagtggcatcaagggcccatatgggtgatgtccataaaacaaaggacatccataacgacacttcagggtcgtgcagaaggttcgtttgcctccgatatttggcggcaacggcggcagagccgttcattaagttgctatgctggtgcttcaggcacctacatcacctctagcatttgggcgataacggcggcagagccgctattgcgttatcgaatagtgctaatgggatgtaccatctcaagcctttggacggtaatggcggcagagccgccatcatgttaccgggcgttgctgagaggatgtatcaactctagcaattgaacgataacggcggcagagccgccatcatattatcgtgtattgctgagaggatatcagaggatggtacttcaggtaccatgttcttctgcttatttcaactatagcagaagaatgatttgcatatcaagagcaagatgatcagtagaaattgatttcttacctg

SEQ ID NO: 24152 - DNA, 34683 bp, Oryza sativa
  unsure (1)..(34683): unsure at all n locations
gggcggggcgccgatctccttctggcgaccagagcagggaaggcaaggggatcctggtgagcatccacatcctctttccgattcatctctctctcccagcgcgactacttttgtctggaatttgcttgcgttcgttaaccctagcttctcttctagatctggaagaatatcttctcttaatttcagagccttaatcttaatacaagtaacagtttgtttgttcccccaaaagtttgggggttcaactgaacccccatgtcccaaagttggatccgcacatggtgttttggttctgattccagaacgaaacttgatgccatgggaagaggggaagagtagggggagagggaaaacgaacatagaactcgtatgcaacccaagtgttaacatttgcttgcttacataaatgttgttttctatttgattttgggcagcttgatagtagtcgcaacatgtagaagtagccggagatccatcacaaaaatatagagcataacacttgtctatgaacaaaaaaagaaaaatgcatcatgaaacaaagcattcttcttcctgaacaataggataataggtgatacatttattctgctccctttaataccttgcggaagaggatggacctactaggtgaataaaactattagagtattttgtttctagatctctcaggttactcttattacaaaaaaaaaaacccaaatattttttttctagttctctcaggttgctattattacaaataactttttccaatacatttagtaatcacgtaatgtattaagcataagcccaccaatcatattaggaatgtaaacatagactaatggtgtcttatcagaaaaaggttgtgccattggagatcaatagttattactcgcttgaagcctagaagcttctcacctaaattgctgcaagcagtccctatataggaattccttgcaaataattcatcagtttatagacttatccaaataacaatgaaacaagcaatatttttttgaggaaattgctggcacactgattnatatagaaattactgtaaaataattgctcctgagcttgtgtttgtcataaatgttagttgttactgtagatgtttctttccttaaaagtttccctaaacattcttgcttgtttacaggaattcctatatgaacactgttgccagcaatttgctttttaaatattcttgcttgtttcattgtgacattgttatttggacctgtctataaatgaatgtaattattttacaggaattcctatatagggactgcctgtggcaatttaagtcactacaacaaaacatgtgtttagagacatcttatttatagtctagagacgttttgaacccgtctttaggcatacatagagtcgcttcttcaaagcgtcccagaagcgtctccgttaggaccgtctcaaaattataaagacgctccatatagcatctctacaagatctgagacatgaaatagcgtccctacgttagttgagacgcttttgtaaatgggatccaataacgtgtctcatggtgcgtccttatgagtaactgagacgtgtacatacgattcattgtaggatgccatgcttggcatatttacagcattcacatctgagcagtatatatcgccatcaacatatataccaaaatgacagtaaacagtaaaacactccaatagatgaaaggtaattatattaaggacaattgtgattcacaagtcagctaaacagccatacagaaaaaagagatttgcgtcatctcttagaaaaataaatttataactgttcctaagataattcttgctttatctcctcccttcttcacagcatgataaaatatatctataactgttcttaagataattcttgctttatctcctcctccttcacagcatgatgtagcaatcctttacaatcttcagtatcttctaaaatgaattgtgtaaaccaaatcagtgtacatgataagatttctaaaaaatgtaagaaagctagctaagtttactaggccataaacagagaattagacaatccatacatgtattgattcatagaagatacacccatcacatatttcatatttgtcaggagcttattcctagcattctttactagcttcagtaaagatttattgaaatcgacccttaataaagtaaaacaaaataaagcacttcaatttgtatatttctgaacaaagagactatagccatactacagtattaacatgagaatattctcctacagatatccaacaatttaccttaatagctacttgttctatactttttatgtggctagaatttctcatcatcactataagtaacaggtaaaaacttatgatggccatacctttgacactttagcagttgctctccctcctgcatgtaaatactttggaaacttcagcatatagaaagcaaatctcccattttggaccagcatctctattcctttactcatatgccaccgaaggacagtatgaagaaccatcgcatcattcagaactagtgtccgagatccaagttaaacaagcattaataccaatatttgtttcaaagtgaatcgattagaagattgagttgagtcaaagtaatgcctctctgtgttttaatgtgattttgttgctaaaactacttaattaatgctgaactaaagcaggggaaagaacacagcgttatgcaatccaatactccaaataatttttttgcaagcgataccaaattaccaagtgattatctttctgaacaaagtatacaacaatcccaaagtatcatcatcagaattttttcctaaaaatctgcaaaaaaaaaagttaccttcaacaatactcatctgtatttttgtgccttcttgaagctaaaattccaaatgtagtcatcagatggaatggaatcagtagcaaaaaagaatttataatgagcccttaatgatcgacatattggtattgattgatccacagaggttcacaaatcatcaaattgattatcagatctgcatcatgcaagtattggtattagcattttgtcaaacaactagtacgatggttcattcctgaagcagaaagaacgaaaggtacagatcaatatttactcttttatacttctgcaggattacgaaataatccgatggggtagaactcaacataaagtctggacaaattgaatcacacaaacaaatcaaagcacctttgtagttccttaagccttacagattaggggatgagagagcatacctaccaagctaccaccgtggagttgttgctgggctggtgaaggcaactgagggagggacgcgttggcgatggggagtcgctgattaggcggcaaactgccagcggtggctcccatggcgaggatcagagcaggcagtggtgggcggcggcctgaggaggaggaggcagatgtggcattgactcgccgaggatgaggcgccgctggcccccggtcgaggacgagccggcggcaggcatcgagatggcgactggtggaagataggcggcggcaccaagcaggcagttcgatctagatgggagtttgttgcagcacgcagagaggatgaggacgtgggtggtttccaggagaaaaaaaaattcaatccaaatcttaatttttgagaaatcaatgtaaaactagggcgttatttaaaacgtctcataaaccgtctttattggtggggtagcctagaaaatagagacgatttaagtctcgtctccagccaaaggtcttcatttgtttgttttgttgtagtgagtgagaagctttctggctcttagtgagtaataactactgatctccaatggcacaaccttcttctgagaagacgccgtcagtctatctttacatccctaatatcattggtgagtttctgtacgatttcttgtttattacagtacgctattaccaaatgtactgtaaaaagttattttgtaatattaacaacccgagagaactagaaacataatatttgggaataacatattagaacacatatgattgaatagaagcaatggccatttttttttcttactaattgttattggcatcttgttttcatgcaggatattttaggatcatcataaacttcattgcttttgctgtatgttattccaacagggtgctctttgctatcttatacttcttcaggcgagtgttttaactttatccacacactacttgccttgtgcaatttgtatatctatgaatttaacatcatcaagatctatcagctttttctgcgatggattggatggttggtttgcatgaaagtttaaccaaggtaatagaagcatttcttatgtgttcaaagtcttcatgtagtttgtcattctgcagagaatattatttctaattttttcccttgtgccttgagactttatagcactagatattttatgaagagtaaattatatgaacttctaaaaaactattgtctgctcaacagttaaatcttggtttatctttactcattatctgatcagttaatgttattctatgtatcagcatcaacatttggagctgtgctggacatggtaacagataggtactcctcgaataaatcattgaactctgtatatgcaaggtgaatacattctgcagcctgaaataatttcactgttcaaattgctcctcctcagggttagcactgcctgtttattggcacttctctcccaactttacaggtataaatgaaagcagaaaatacttcaattgttgtaccttcgatctagatacctgatgcaaactgtatttgcaagtttctttgcagacctggcttagtttttttgatgctgcttgggttggatattacaagccattggtttcaaatgtataggttagttttctataccagtttttcagttagtgccactttgtagttttcttcacctcgtaggtgcatcctcttctgtaaggtattaaatggagtagaaatgcagaataaatgtatcacttattgtcttattgttcaggaagacaaaatgctttttttcatgatgcatttttttcccatagacaagacaaagtgttatgctctatagatttatgatgaatctctagttactgctacatgttgctaactacttggtggtgtttttttactagtatgttcctatcaggtaaaactagccacaaggatgtgaaggacactggcaattggcttctaaaattatattatggacatcgaccattcatggcattctgttgtgttgcttccgaggtacatgattaatctatatttggcagtatctacatggatgtttggctgcttacatgctggactatgtgcaacatgagtgctatgctggatgatttttttactagttcagctgaagtatgggcatgaattgaataggatgtgttgatgtgcccaaaaaactgaatggcccaacgagcctatcttacatctgcacatatagcaccaaatagtcatttgatatagttgaggagtcaccatctctgtatgtctagcacccttatacactcttgactaaactgcacttaaatgtttcaccttctaacataggaagtttataaaattacaggttctgtacataattctttttctgtttgctgatgagaaatcgacaagcttgcttaatgtaagaagacgatcatctctactgttgcttaatacaatcaagtcttgttgcagtagttaacatctggtatttctatatgcaacaggtgtgcagatgctttctaaagggaagtcctctcactttcttcgtttttatttcaactctagttggttgggcattaaaacaagtgatcaatatcatccaggtatccagaaaccaacattaaaatttcttgcagttgcaggtgcttgatatttgtacatctgcaagtatttaagttctaattatgacactaataataggtttgttataaagctgaagaaaaagtgttgatgcactggttagctcatatgctttacattagggtttagctagccctggttaataggagatacattatgcccaaattataggttcacatatgttgctaaaagcctagagcaggtgcttattgtaacattctattctttatttagagtgtctatttatatgattctagcagtactaatagcgacacattaataagaagtgtggatcgagatgtcgactaccactagagttgggcacttgtaggatcgagatgtcgactagaggggaggggggggggaggggtgaataggcaatttaaaactaaatgacacctaatataaaactaagggtgtgtttggttcccggtcaaggttggatgggatatggcggtccagttttttgtttggtggagtgaatatggcgatccagttttttgtttggttgtagggatgaaagttgatatggtgatccatttttttgtttggttgggggagtgggatggatgagtggttgcaatcaccctttcattagaggtggtgagtctacccctccaaattctcacccaaaaattatcaatctactaaaaaaaatctaaatagaaataaaaaagcagaaagaaataaaaggggaaggagaaaaacaaaaaaaagaaaaaaaatgccatctcgaaatcgtcggccgccgctcgccttctcgaaatcgccggccgccgttcgccttctcgaaatcgccggtcgccgccgcctcgtaccctctctcctcggccgccgccactcgccctctctccttggacgccgccgctcgccctctctcgccggcgccccccagatccggttgtcgccggctcgcctcatctctcgccgccgagctcgcctcctctcttgccgccgagctcgcctcctctctcgtcgccggctcgccctagccgccgccgacctcgcctcctctctcgtcgccggctcgccctagccgccgctgccgagctcgcctccacggtcgtcgccttgcctggttgccgagctcgcctcgtggtgagaggggtgacgcgacccacatgtcgctcgtccctgctcgcccgagcgctcgggcggctgcatccggccgaatcggccggatccccccatccggcatctggggggaatatcctccccgtgccgccccatcccacccctgcccaggaaccaaacacccacaaaaaatgggccgccatgtccaatccacccatatccctccatccaaacacaccctaacctaagttgctaggctcggtgagggtcaagtctaactaagcaactaaacctagggtgatagtggctcaagtatgtctataggaaagcaaatcacactcctaagtcaagtttagcaatcctagggtaatatgagctcatgtctctaggaatgtaaattgcacaaatgtaaatgcgataaataaaagagacaatgagacaaggaattttttaccgaggttcagaaactcaccggtttcctactccccgttgaggcgagcccaactccacccctcaaccacgaagccactgcacgcccccttcgtcaaggggtgggcaaggcgggaaccggcccacggagaggactactcaagcctcgatcactcgggttagttcttccttcactccgaaggtggtgaactccaaaccactcacaaccggcgtcgggccttctccacaatcttctcggagaggtcacagggcaactccttcacaagccgtctaggagactgcaacctccaagagtaataagcgatgacccggcttggagatgatcaagcgccgcactagctctacaaatggaagcaatgcacttgactcttggctaaatcaaccctcaaacacactagatggatgaacacaaagctcaagtgggtgtgtgagagatggaaggggtgtatgcaattgaagtgggtgccaagagagtccccttgctgctggtgggggagtatttatactcccacccaccaaaactagctgttgggggcgaaatcccccaattttgtgtactgccggtctgaccggaggtgtgtggccggtcagaccgttctactctacaacggctagttttctagccggcctgacattgggctccaactgcctggccggtcagaccgacatagggtggccgatcagaccggcctcggctcggtcagaccgcccccagctcggtctgaccgaatacagctccggtggctctagatcggccactccagagcacgcctctcgactaccagggggccggtcagatcggcctatagccggcggtcagaccagcctctaaccgccggtcagaccggcatacaagccttggtctgaccggtcctggtcagtccacacagagacaacaagcattaaggtgatgtgaaatttgagtctaaatgcgaacacaagtctaaatgcatagtgacctaatgtggcaatttaaatcatctctttgctaggtcattaacccccttaatagtacggcaaagctataaataaactagcacaattttgatcacccaaactcctcgatcgaattaaaattcaactactagtttactgtcatctatcctttgctttgcccccatcaatttttagtccaccatcgataatcatccatgcgcacatatgatgtaaacctaactcaaaacatataactcgatataacggttagtccataattagcgtttgtcattaattaccaaaactaacaacgggggcctagatgcttcaatcccccctttttggtaattgatggcaaacacctaaaacatatataatcaaatttaaagcacatggatatattgcattgaaaagcaaatgcttcccctaaacatgtgcatatcaatcacaataaacaaattaggaacaaatgcacatttcagcatagctcaacacaaaaacaccatataatgtgaacttcacatatagatcattcaattgcataggatggtcacgaatatatcaaaatcacatccaccgtccatcatagcacaaattcacatccataaccttccaaattatagaagttcatccatatatcatccaagtcacaaattgtccaaagagggctcacaaataataacctaggctattacatgaccacgaagggtccaaataacatagagttcaaaacgaaaaaaacacaagatatagcccaatacacatacataatatagcccatccaccttaacctactaaatatgtaactaacctcactaccactactctcatcccacaaaacagtacaccattcaccttaacctactaaatatgaggtgactaacctcactaccactactcccatcccactaaagaaaatgcaagctagattcttctcccccttttggcatcaagggaaaaaaaagcttcactcttgaggaggaggacgagccgaagaggaagggcgaggagcatcgcggcgacggtgatacacaaaggcatgggtgctttccaacatttgaaccctttgatccaacactcccacccttgtgctcaatctccccacggactcattcaggccaccaacattcgaatgcaaaccacgcacatcctcgtacatggcttcatgtccggtggtgagcctttggatgttttcacttagggtattgatggccctaagcaccgggttgaaatattcatttggttgtatcctaaaatatgcatattgaggatggaagaaggtattgggatcatatccatgaggaggaggtgccgcacttgtgcttgcgccttgatcaaagataggttggtgcacttggggagctctaggaatggaaagttggcggcgaggcttatcctccttgtgttctttcaaattatctccagcatgccccaactttctttgaatcaagcgcatgatatagagagcatagtagatgccttgtccaaatgtcccctttgaaatggcaatgtcttgcatcattagattaatgacgtcaaagcgacgaccctccatgatggcatcaatgacatgccatgcgacaacgcgaatgttgtcattgttgccacaccttgggagactagtggctctcacgatgcggttgaccatattagggatggtcctcaaacccgccaccttcccataggtgtgccttccccatctttatagaaccgggcatagtggtcataggggaaaggattgtgggtgtgctcgtcttggagatcatcgccgttgttgaaacggatttgcaacaagtccttgaactcacgccgggtgatggagcactgtagggtccccgacatccatttcatagcatcatactcgccggacacccacacagtggcatagaactgtcggatcaagtcttcatcatagggttgcttcaaggtaacaatcctatcaatgcccactgcctggaacatcccttgtagatccacaaattccgatgtctcactgatatgtctccaagatatctacttgtggttagcaaaagctttgcttgcttatgcttgctcatacacggacttctgtaagcgtgtatggaaccttggatcgttgcaatcatttggcctccggaattgattgtgatgacggaggatagtgtactgttggggatttctcaagttaagcacaaactggatgggctatattatgtgggatgggagtagtggtagtgaggttagttacatatttagtaggttaaggtggatgggctatattatgtatgtgtattgggctatatcttgtgtttttttcgttttgttgaactctatgttatttggacccttcgtggtcatgtaatagcctaggttattatttgtgagccatctttgaacaatttgttacttggatgatctatggatgaacttctataatttggattgttattgatgtgaatttgtgctatgctggatggtggatgtgattttgatatatttgtgaccaacctatgcaattgaatgatctatatgtgaagttcacattatatggtgtatttgtgttgagctatgctgaaatgtgtatttgttcctaatttgtttactgtgattgatatgcacatgtttagggggagcatttgctttttaatgcaatatatccatgtgctttaaatttgatcatatatgttttaggtatttgccatcaattaccaaaaagggggcgattgaagcatcttggctcccgttgatagttttggtaattaatgacgaatgctaattatgtactaaccgttctatcgagtcatatgttttgagttaggttcacatcataggtgcacatggatgattatcgatggactaaaaattaatgaggcaacgctaattgtggattaacctttttttagagtgtctatttaactttcatgtttcttccctgagcgcagatgaaaacagccgcagatatgtgcgttatgttcgatttgaagcacggtaagtgagcagaaacggacaaagattcgtttagtttggcgtttgacatgtggaagaaaaattcatgaggcttgatgcaccgagggcatataaacctaatgtaagattttgacatttctttgacctggttgagggcatgcagacattaacggcgtgaaagaaaaaagatctggtgtatcgagaaaaacagggttgccatgtttttcctacagtgatgaatttgcgtgatctttgtttctttatcaggttgatgtttgttagcagtacttttagctggctgtgtgaatacatttctcacctctgaaaatttggagggcatgaatccggagccatcatttagcattttactccgttgtaaatttgtttacactaatctccaatgaaatgtatttacattgtctcctctattgcgtactgctgtatcacatttataaacagctgtcgcgcccagggattcgacaacccgaatcaccggctagctgtgcatttaacctctatccaggcatcaatcagagtacacagatgataatttgatacagctccacaacttacaaaaataacaaaataaaactcatacacagcggaaaaactaaagaactagacttgatcttcacagcaacgcgaagctttctcgataactccacaggcaaactcttgatggccggcacaaacctaatcttcatagaactcaccatctgaaccaacttctgcttcttggggattgggaaaaagaagcaagactgagtacaaccaccgtactcaaggataacgtaaggataacgtaagggtaatcaaaggattggctcaataggatattttgtagtaaaagcagcatttgtaaatcataagatgaaagccgtaaacaatatataattgagcagtattaacatcatcactgtccaacgctaaaccacgttgtgacaggcccaacccaaaaccacatgaactacaccagttcattaaggcaaattattaaggtgagactaatcacggtgagctagttgaccgcccaataaccgcgggcacggctattcgaatagttttactctgatcagaggtgtacaactttacccacaagacacgattccacatatgaaaccatgccccgaagtaccgccacgatactgcaaaggggaaaatcatgataaaaccctccatataaccacccctaaccaacacatccacctcccgtccccactccaaaatccaggagccattgccaatatcctacgttacctggatatgcgtctcaagtcacgtatctgtatcggatacgtcgctggatacggatacgtatcggatacgcctcgatacgtatccggcatgtatccccaccatccacgattttcaaataaataaaaataatcccgatacatctccgatacgtatgaaccctaaatcagtcgaacaaaacccatagccagcattgagcgagccaaatcccccacacccagtgctgcctgccctaggccccaacccaagctctcgctctatccggcgtggctgcgtcgtccccggcttgctgcgttggcgccgccgccgtccaccgtcgccgggttgcgcctccgccgtccgcagccgtagcgccgcgcctccaccatctgtcgtcgtcctgctggcatagcttcgtcgtctccgagggcgcaacaccgccgccactggtaaatctcctatttccctcttcaggaccccatgttcgatctacattctgcaaagcaacaagacgataatggggcttcaaccacttcagttacattgcatgaaagcaacaattgtttttgggaagatgacgtatcggcgtatccgtatccgtatcgccgtatctgggtaacatagggagcaggcagcccccgctcgtgcctaggtaaatccggcagcagcatagatcgcctccagtccatccatactccatcacgcttacccttgccaatggtgcgctagctagaaaagattatacttaagattcagcctggagcccatctggcttgtggttagtacaagtatatcttctagggattcccgagaaccggtcattatttgtcatgggcacgaccatcaagtgaaacatcatgcatgtgcccacgacccaccaagtaaagcatattttaattaattaaccatatgccaagaaggcatagcatcatcataaaattaaggactatattatagtgaatcctaaagtgagctagttgatctaagcatggctaagcaattctagaccaatcatctagttaaattattaacctaggctatcaatgaatcagggtaaacaaaggctgagtatgggtagaaaccatcccacatgacattataaaagtaatgcaattttgagagaaaagcaggggttttgcaaataggctcagtatgattagtgatatctgtataacttgccttgctcttcagctgacgggacctcggcgaccacttcaaaataaactggagcgtcggaactgctggagtataaacgacaaacaaggcacacaataaatacaagctaaaaggctactgaaatagccaaaagaaaccaattttaatggattcttgacattttaacgaatttactacaatttgaatagattaaaacggagcacagattacttagttatgaattttacaaggtgctctgtgttatttactattgacagaaaaaccttaatcagttgacagggattagagcccaaaaggaacataggattaaaggatagattgactggcaagcgagccttacgagataccgactcaacgagtcaattcgacgtgacacgagatcactcaaataatcaaccgaaaccggcgaacggaactggcggctttgaacggctctagactaaaagacgactcaggacggatgaacgaaccataggggaacaccttgctaggtttcaacgacgcacggctgcgacacggcgacgctagggcggctcagctcggcggctacgtggcggcacacggcggcagcggcggctcggcagggcggcacgcggcggcggttcggctagatggcggcagcggcgtctcggcggcacggctctagggctagggcaacgacacatgacacaaacgctaggaacagaaagacttaaccctaaaaggacggagaacctcatcggaaaacaacggcgagcagagggaggacgacggtagcggcggtggttccggcggcgagctcgggatagacgacgatgacgctagaaaagattgaacggaaggaattagatagatgaattgatgaacgctgcatcaaatacatccaaagtaaggagaacggagtaccggcgacgcaacggcagcggctcgtggctcggcggcgtcttgcggctaggactcgggtgggggtgaaaacggtacggaatttttccggattccggtcatgttttcggaaacggaatcggtctgtcataattttttcagaatttctcggaatcagaatcgaaaacggaaatattttctcggaaatagaattgaatatgataatagcagtttccgtcggaacccggaaacgatcggaaacattctggaaaaattgtcggaatttccgaagttcaaaaagcccatagattcaatagtccataattcatccctaacttcctagcccaacccaaatcgcagtggcatctaccctaactagctaaccctagaggagagagacagtgagacgcgacttgcgagttggaggcggagcaccggagtggcggctgcggcgtccagatcgcggcatcgcggcgcgcccccgtgcccaccgcccgcgccaccgcccaccggtggtcacctggcccctgctgtcctcgcccccaccatctcgcgccgccctcgctcttcgccgtttcgccaccggccgccgccaccatctcgcacctccgccggctggctcggtccccgccatctcatagcgccgtcccgccgcgtctcgccgtttcaccgctgccaccaccaccgacgacgacccgacgacacctcaagccccactgcagtctcttcctcaccgccaccaacgccgacgactcctcgcctcgtagcagccagcagcccagcggcaacatctgcgcaaccagcagcagcaggtgttattcctcattccttaacctccacctctgtcactctgtgttagtgttactgtgtaggctctatttatttgagtgaatgttgaatgattgatgtctttttattttctttgtactaaggagcttggtaatattacgttctatgtagggagcttggatactgtgtaggctttattttctttatatgtttatgccttcttgcttctggattttattttgctctgtaatttagtagaagttattaatatgctctattgccatcagccaagcactccaattatagaaatactgctttgtttgtggggaataatacaagtgcagctgaaaaattttacttgctactatgtccagctaaggacagactgtggtcttgagcctaaaccattgatttgatttcttttatgctgcagatttgtgatggaatcatcacatgcaagtagcagcagtgcaagtgtatgcaatgcgggcattgtagctttgcgagcatcacaaccaactcttgcaaatgtaggagatcctaccacaaatgtggttgcagcagcaagagtagaagttgatttgacacaggaaactaccgaggatgcaaatgtccctccagcaaagaaagcaaagaagtgtagttcagaggtttggagccactttgacaagtatgagaaaaaggtagtaggagatgatggaacagagattgtagagctttgggcaaagtgtaagaagtgcagctatacaactcgtcgtgagagcaacaggggcacaacaatattttggagtcacttagacaagaagcaccaaataaaaagtggccagcagcttctaaatctaaaaaagagtgaaagcggcactgctgttgagacttacaagtatgatgaggctgttagcttgaagaaattttacttggcaatcattatgcatgaatatccctttagtattgttgagcatgagtactttgtggattttattaagtcattgcaccctacctttccaatcaaaagtcgcataactgttaggaaacatatattggatatgtttttggatgagaagaagaaaatgtatgagtactttaaaactcttgcatgccgctttagtacaaccatggacatgtggacctcaaatcaaaataaaggttatatgtgcatcactgtgcattggatagatgatacgtggtgcatgcaaaagagaattataaagtttatgcatgtagagggtcatcactcagggaaaaacttgtgcaaagagttctatgatagtgtactggattggaaccttgataggaaattgcttgcacttactttggacaatgcatctgccaatgatgtatgtgctaggggtttagtagaaaaactgaatgatatacaacccttggtttgtgaggggatctttttccatgtgagatgtttgaatcatattttcaatcttgttgctcaagatgggttgaagcaaatttcatctagtgtttcaaatattagaaacccaattcaatttgaactccccactgcagtggtcagaattcatgaagtgtgcttctgagtgtgatggttagacactacttgtgggctgtctttggatgttccaacaaggtggaattccacatatatcatgttaaagcaagctattcactatagaaatgcttttaataggctctttctttgtcatagaagcaaatatcataaatgtgccccaaaagatgatgattagattatggcaaagtcattgtgcatatgcttgaagagattttatgattctactttgatcttctctggcattagttatccaactgcaaatctgtttttttagaaaattctgtcaaattaagatggcagtagaagaatggtgccgtagttctaatacaatcatagcaactatgggcaagtcaatgaaacctaagtatgataaatattgggagaagtccaatatggctctttctgaagcttgcttgcttgatcctaggttcaagagaacacttcttgagtattatgcagataaggtttatggtgtggtagccccaaaacacatggcggatttcatggttgttattaataagctatttgatacttatgcatctagtcaagcaagttcaaagagtccagcagctacaaatgtgcagaataatcttttagtgagtaaagactatgatggggagagcgatgatgagcttgatgcagatgttcaacaatacttgcgtgctagtactgcccctggaataggcactaagagtgagttagaagtttacttggaacagccactattggaatggtacacatcagacaaaaccacatttaatattttgcattggtggtcactcaagcaacatgagtttcctattctcagtttctcactagacttgctcgtgatgttctggctattcaagtatcaactatagcttcagaatctgcattcagtgtcggtggccgtgttattgatccattccgtagcagtctagaccctgaaattgtgcaagctctgatttgcaccaaagattggactgcagcatcaagaaaaggtaatattcagctgtttgtacacattttttaatgcttttactggtccatattcaaatttttgagttaatatgtgattatgaacatttaggtggaaatgtggttgggtctatcttactgagaaggacatggagaacctggagcagaacttctgtgccatgttgtccttggtttgtgcttgtatcactaacatgtctatatagtgactaactttgtacttttactaatgctctatcattttttttgaaggctaatggaacagagcaagagacagagacagtggaatgttctaatgaggatggcattgcgccaatggatgtttgaagaaaatgttggtcaatttaattttcaagttacatctaatttcaagtttccatttcaaattagtgtactcctgctgcacaagtggatgagatatgttttgtgatgaaccatgtactgatgtgttttgtgattgaactatgttttgtgatgaactatgtatttatagtgtgatgtgttttgtgattgaactaagtactgaaatactgatggactgacgtgtcatgtgtgttgctgttctgtgatgattaatgaactattgctgttctgtgatgattgatgaactaagtattgatgggctgatgttcatttcctggagtgataggctgatagcagtatagcacctgaattgtgtataccttataggcttataccattctgttttgctttattcttttagaatatttgttatgcaaattatatgaagttatagaagaatatatttttgctgttgagactaaacaattagacttgatatatttgtgttttatgatgaattgttgactgttgagacttgcgaattggacttgacaaaagtttgaagctcagtttaaggggtttttgtattccgataaatttttgttaccgtatccacgccggttcattttcgctctgttttcggtttcgatactattcgtttccgttttcgtttccggtgtttccgattccgatttcgaaaaaaaatatgaaaagactatattaggaaaaggaggagtcctagagggagtaggactaggagggagggagtccgactcaaaagggggagaacggaggcgcgcgcggcaaggggaaggggcgtggccggctagggagagggggagggaaaaaaggaaaagtaggggactaggactttcccaaaaaggaaaaacaatacggtgccattttaggaaaggaaagaaaacgaccccgcgaactgacacggatacggttcgtcatgcaaaacgaaactgcgaactgagaggggagtgaattgggcacaattcacgatcaaaggcaaaggaagaagtttaacttgacacttttaactttgcaacattgccttcggtgatctagtatttactctttacgtcctattagtgattttcagagcaaagagaattcgaaaaaaaaatctccctgacaattctgattgttaaatgcattgttaactggggttttctcctggttaaccaaattaaattcttgaagccatttattagtgatttgaaacctaatggaggggaaaactttaggtgtgacaacaacttccattcagaaactaatttttgaaaaacttcacatcaatttatacttgcccaaatttctcttgatttggaatggatttatcttttagatacctagaggttttatctgcaaattttcacacaatctataatttgattaactttcactaaatttgaactcatttggatgggacgaacgatgttgttgctcccctgctgcttgccaatgtcttgtcgtgcatgtacgagcgtcaagaccatcatgcagtggagaatagacaagcattgccctcgtcatggtgtgggataaccatgaaaagatagggggacgttccagacaactaaggaacacgttccaactaacgttccatgttttaggaagaggtatacccatatcattccatgtatttagaaaatggcgtcccacattcctcgttcctgttcctcgatccatcgctccgggaacttttgtgacttagctattaaccgtcaacctctattattatttaaacctactttcaccctatccaccccatcgctaattcatcgacattagttccaatgcctttgtgcatttcacctatcttcagaacctagctacataatctcttctaatatattatagttcttattttaccactgatctatataatgtatctttacctttagatacaatctataaagaataacacaaccacttttacaggtgcagccacttagcatgctcattttctataatatgggtcactgatttctttgatagacattgaaaatatttatagaatacttttctgcagagaacaacaaacacaaatttgcagatctttgcttttgcgccaagaatgtcgacttatcaactcacataaagaagcacatcaaaaaccttgcacatttttttaaaggaatactaccaagggtcacccattagtttttgttatattaatatgtacaaaataatacaaaatgtcaaatattacaaagtttataaccaattaaaaactgaagataaaagaggttccttcatcctacacccatgcaggcccggctctggggcagggtaaagagggtgacggcctagggcccgtcgtggctaggggcccatgtctaaatatgtatgaatactgtatgagccaaagtggtatttaagattagtgaataattccatactagtatctactactcttggttatcaacataatactgattagtgaattaataaagattctagattcaacaatcaaaattgtatgtatagatagattcttgttgataacctttataattttaggtgctgaaaagttgtaattttagtcgagaagcatttttatggtgctaagtaaatgggaaaaataaacaagatcagtttaagtgttgatatttttctatttctaagaacatatatatgaattgttatcaatggtcatttctctctatgattagatttgaaaacacactttgaaaatgaaggggttgtttagattgtagctaaaataaatcttactaaattttggcaatgccaaaattttgacaatttagcaatattgtcaagttttggtaggatttggtaaaaaaactaaataaatgtatatttttgacaactttaccaaaaattgatatggtttaaaatgatatcaatctgaacaacccaaaaaattgtgaatatacatataacaagtctcactgtaggggagagagggttaagggtcatcttgtcaagtttgcgctagggccctcaaaacttaaagccggccctgcacccatgcaggagaactaatccgaaggatggggattcacattttgaaagattaaagcatttctctgcttccaaatatgccaacattcaatagaaaaaaattccaagaagctttttcctctaaagcgcaaccttgccaaaaccaccatctgaaaaaaaaaattccatgttaagattccaagtaaaaccaatcttcctccaacaagtatcactgaatgggcaagaaaagaatagatgttctatagtttccctcacactcagagaacagagagcacaagttagatctgcatcctcatgagcacaatttctcctgtccaacatgtccctagtgttaagacggtcacaaaagagaagccacataaagactttgatcttgttcacacagttcgttttccaattccaaacaaatggtctaggtggagagcgaccaatgaaattcaggccataaaacctttgcgaagaatatgtactgttatcccaaatgaaagacatgcatctcctgaagcattagacagaagcagcctttgcaataattcctgtaaaaccgaaaactcttcatatgactgcgatgagaggggcagttggaaacaatcttcaaactccctttgagcaaagcttttcacagagtcagttttataaaggcactgattgtaaaggctctcaaaatactgacatctgactattccattccacatgtcctcccaaagagtgactgaattaccattaacaactgtacattgtgcccctgctctgtaaatatcaatcaagcttatgatatctttccaccagaaagaacccctattaagtgccacattgcctgcaccatccaagtaaattctatgttgtcactatgaatgagaccttcatgaagcaagacagagtggttagctcttttatctacttctcatccttttataccttaaattaacaactaacactcaatttccattacagtacttttcaaaagagttctctgtgaatcacttaaaaccactcatggacgacgcaacagtgcagattcaggtccaggcattagaaggcccttcaaccaacatgattcttcacagatcaacagaccattgttgcaacttaaagaaaggatgggcagattttgcagtgaacaataacatcaagttgcaaacagtatgcattttgcacttctacaaaacaagccatctgggagcaaccatagatatcttctgaagtccatatcaatgttgtatgatatgatcctttcggtgccagcaaacttccctgtatccattgaacgtgccgtttatgtcctatagtaccagtattatagtacttagccttgcgccttatgggtgtgtttggttgctcatatggatctagcccggctcatctcccttatccaggctaagcttagctaggctagagacataaagatgcagttgtttggttgcctgtattgaatgagccaggatgtggttagatgtgcatccatgatccatccaaacaaagaaatcaaagaaagagtggacaagaaattgaaggtgggaaagggaagaggaataccatccttgcacttaccttagatcttgacggagagagccgaagatgagagggtgtgaggaagacgagcagccacgacagagggagacgagcagccgccggcagagggagatgagcagccgcggtggagggagacgggctggtggcgacggagggagacgagctggtggcgacggagggagacgagcagccgcggtagagggagatgagctggtggcggctgagggagccggcgctcacgcccagcgacggagggagccggccctcatgcctggcgacggagagagcgctcgaggcgggagatgcgctccaaaccctagcttgtctttcggttggaagaaatgaggaggggaaaagtgcttgaggcaagctgcggtgaccccatcgcctgctggttgtacgcgcggatgcagtgcgtgcatgcgtgggtgcagccttgtggttgcacgccacgagccaggccgccctgcgaagcttgaatcggccgtttcccctcagcctggctcgacggacctttttgcatctcctaggcctagctgagacccccatccaaccaaccaaacatgcggtaggctgcacgccaaatgcgggccaagtgcagtccatgcaaccaaacacgtcctataaggtcgctgtggacactgcacttatgaatctattaggtcacttacatatgtatgcactgttggagagaccaaacaaccaccatgctcatctatgagcagttcaggtgcttacctataaacacctgctattctatatttaattcattttcttctgttggatgattaagcacggttgtatagctgcacgttactactgttcccatcactttcgggcaggcggcgcgccaatggcgtgccccaccctctagtatagttttactctaaacattatgtccaatctaccacctcggccggtgtggttcaatccacaacacgaatagacagttattatgcttctatctgaattaatattgtacctccgtggttcttaagaaggaagaacggtccaagaactgatagcagtgatgctgcaaattcattgacaggaaatgtgttgcgatgttgttcgttaattacgtagataggtggcgttgatgtgagcccaccaaagttcaaatccaacctatatgaaatgatcagtatactacagcccccatgttaactaacaagttttaattcaacccaccaaaagaaacgacaaaacctaaagttatgattctctagaatgaattgttcaaattgccctcgatccgcactctttcatacatgtgttctctaagaaaacatttaaaactcttactaaaccaattactttttgatgatcaattgccaacagggacaataccactcaatgtagatacatactatcatgtaggagtagtgtggtaggctggtacccctgcaactgtaatttagccactttctgagccattgaagcagaacagaccacagtcaagcaaaagatgacaactgtcaactcgggcattgttagtcatgcgttcaggctcaaactccatcagtagtgtagctttcagtccagatgccttccatctctatctgaatacatgacggaatgcctctcaacatgcacatagccatcactctcctagtttttttgcctttgtgtccccaatttatatgtgctactatgcgcaaagaagaatataatagtactaattaaaaacttagcttttatttgacaagtgatttctccgccattgtacatcacggtttcagcagtgcccagttgcctattatattgcacaccaatgatactatgcattcaatggcattagcgtgcaatacactgtggggcactacgtttattgccaatgtaaaaaatataaatgttactacgataactattacttactatatgacaatgtgaaaaaggtctaattaaactaatttttattatatgacattgcagttgaaattcttttattatttgaatatataaaattgtattactaccggtattttaacttagatttaaaatattgtcatatttgcttgtatatagatttttcatgaagaaattgtgcacattataattcaaatttacaaagatgtagcatgcacccatttataaactatctaaatgttgttatgaatagcacttgtcactactagaaaaacgatttttcatagcggcaacgagaaaaaaccgccatcgtagaaaatcgggcgggggtggagggtcacggaccaccagcgaaaactgattttcactagcggccacattaagaggtccgccataaaaaatactatatttttcaaagcggagctcttaaatgttcgccagcgaaaattagcgttttcactagcagctactaaagagattcgcttcgccaacaaaaaaaaaaacagatccggcagcgaaaagcaaagcctcgctaaaaaattttggcggcattttaaaccatgcgtgcaagattccttcacccacccacgcatttaaaactgattttcacctacccacccactgccagaggccaccacccacccacccatgcattcatctctcctctatctctttctcctctccacccaccgcatccctctcctcctcccccacctctctcccctcctcctcctcctgtcagcgacgtcgacaatggcgtccacggcaggtgtgggcggcgaggccctcacctctctcccctccctctccctctcccagatctagccagagggagggggtggccgccaccgtggcagcgacggcaggcgggttgtggcggagctaacgctgacgacgacgtgtcggacctgtcaggcacgggccaccagcgaaaaaaaaaattcgctggcagccgtcttaagccaaccaccagcgaaaatggatctttgctggcagctagcttaagacgacagccagcgaagatgaattatcgctggcggttgataaccgctagcgaagatcttgatcttcactggcctttactttgtggctgctctaaattccactagcgaaaacccaaaatagccgccacgaaaaatgggtttcgtaggagtggatatttatttgagggcactacacgaaaaataatttttacccttgtggacaaaaataccctcttataaccgtttgcaaaaaattttatgggtggaagctaaagaggcctgcctgtgaaaataaagcgaatttcccaggcggacatcttaaggctccgcctagaaaaataagattttcgcaagtgagacgttaagtggtccgcccacaaaaatatggaggccctattaaagttggttcagtcccccatctcctcctccagatcctcttgtcccccacctccatccctattcccccaccaactcctctagcctaacccccctcctctccctcaggccacaatgacggcgcctagatccgcgctggctgcaacgacgccagtgcgccgcctgcgagatgatgatgaggacgacaatgatggccgtgactggaactgccaccggttgcgacgacgccttgatccgccatcgggtggcctcaggcatgcggatccgtcgccgtgcggcatcgagcgcatggatctgccgccgatcgtcctcgggtgcttggatctgccgtgggtttgctcacaagcggtgacggctttgatcgataggtgcgttggtaggtcatggtgggggctctcaggttgtggcggtggcttcgactgacgatgaatttttcgctttgtgttgatatgtgatgcatttcttgaatagatttcatgattcgataaatttattaaatggattgggggcttttgaatgtgctcctatgcggggaatcttgagttctctaggtttttttgcgctatgtaaatattttcgaaggcggacctctttaggagtccgcctgttaaaatcggttttcgcaggtggccgtctacacatctatgaaatacactattttaataggtctttgcctgcaggcagttggactggttgccagaaaaaaaaactgatttgtctaactgtaaaaatgatttttttagtagtgatacacagattaaaaaaaacttttacaaataaggaaatacatatccatctaaacagatgtcacatggcatataaatagggggttttctaatccgtgcgtacgcgccggcgagggaacttgcgtgcgcgcgcacggtttccgatttgacctagacacacatggctccttttcttttctggtagcgtcgctggaatacctaatagaatttgttttggataattaccgtaattaacataatttgttttgaataattatcatgtttaaggtcagcttttctctttttcggaaggttgttttgttttttactaaaagtttgaaaatatctatacataaaaatgaaactttccaattaaatttaaaactttctataaaaaatttgaaagccttatcccatattttcaaactttctacttgaaagtttcaaactttgtactaaaaaaatttaaactctaatctcaaattttgaaaattttgaactctaaattttaacttttcagttaaatttcaaaaactttcaacttgaaatttgaaatctttcaactcaattttaaaaaagtttcaactcaaaatttaaacttttaggtcaaaatttgaaaactttcaattcaatatttgaaaactttgaacttagatttgaaaacatgtgtagtgaagattaatgaaaatatgaaaaaaaaacgcataaaaagaaaaaggaaaatgtgacaagggaaggggcgccaaatcggaaagaaaatcagaaaaaaaaagaaagcgcgctaggaggcgagcgccagctgacgcgcacgcgcaaaatagcaatgttgtataaatagtgacgcttttacaagtataatctttattccattgacctcaaatgaataaggtaacaacaacaccaaatattaggtgaaaaaacaacggccatgaaaattccgtggaattcttaatttattcggtatggcattcattaatttaaacccatatatatacctaaattcattaacactatatgaatgtgggcaatgctagaaagtcttacattgtgaaacggatgaagtacaacgtttaaattaatccaatcaccggaattaatactagaactgagacggcaatctctagtcccgctccagcattttcatgttaacctaatcattgaattaacatttttagttagtaaaatgtcaccatcacaggggtaagtgatccaggttgttgaacatcaagcagtagacgatgtatttaacagcagtaggatccctccaaatttcaccacgagagcaacgaatcaacccgggagaggatcctgatatgcaggaacaagaaaagtgttgacgccttccatgcctaagttcatagatacaaatcgcattagcactactactaactgctggattgcggaacgagatcctctgacctatagcaatctacgtcagagggacgtccgatgctgctacgccgctcgatcggcatcaaacggatcagaggtgaacaagcacggcagataaactggcttcttttatgcccacgctgacaaaatcaacccatgagttctacgccgatagtgccgcagcgcagcatcccgcggcggcgccatccgtgttgggtgccgctttgagtgccttcgccgaccccttgccgccggggccagcacttctggccgggatttatttcgcatccccgaggcatccacgcagtactccagatggcgcaggcggtggcggtgcgctccagggcggcgtacagccgtacacactggtgttccggccacacgcacctgcgtgcgacgacgacctgcacgtcgctgtgacgccatcgttctccgcgtcggccgacgtctctgtgagcgagtaaactgttcgattttgtcagcgtgagcagtaaaagaagccagtaagtctatcgtgcttgttcccctccgtctgatgccgatcgagcgggtgtagcagcattggacgtctgtctgacgtagattgctctacgtcggaggatcccattccatttatgagtaatttcaccatttaatattttgtacctcgaggtaccataaaattttaatacctcagatactttctattgtaaaatttggtacctcaagatatctaatatctcgaggtaccaaaatttaatatgcaaaatatggtaccttgacttaccaaatgttggatggtaaaattacacaaatattttttaatatatttttaaagaattgttactaaataatttttatcagcttgtatgatcatttaatatctgaaactaaaacgtaacatgacacatatattgatctattcagttgtagtttgaagtgaactgcatacatcttttgcttttatcgtttgaattaaaatattctatcagctggattctaacgtagatttgaaatatttttcaaaatttctgatgaaaatatattaaatgaacgaattccacatgttatattccaatttcgtaaagatataatccaatttttctggttgcgaaaagcatcactactaattatggtgcttgtgtcacctttctcatcaagagcctggtattcatttcacttgacaattacttctagcttagcaattccttctcctataacatgcgataggagaaagaatagagaaacaatctgcagagttactccatgaatgccaattggggaatagaggaacatgacatcaccggggcattgcccagtcacgagcttgtgtcgtccagacctcatcagcgctactgcagcatgcagtcttgatgccttccatgtctactggatatatgatgaaatgcctctcaatatgctccatcatatagtagctatgcaagtgttagtgtgttgtgttggaaatttggtcataattcggcatattttaatccaaaataacaagataataaacatgatatttacaataggatttgatccagtgatagtggtaaatgtaatcaacatgagcatgcttaacgttgaataagcatcaacaatcacataatgacacaatgttgacattgcgatgaacattaacagtaaaacttctaattgaaataatgtaataaggttataccccaagaatggtcctccgctggagtttgaggcagtattgcctccgttggtgttgacgggagtctccttctccttgtctccagtgttcgacatgttggtgaagatgaagtagatgttgacgaacagtgagtagtcgcgccttgcgctccccaaaaacctgatcgcccgcccgtctgtgcaaacgtcgcagcaacgcgtggtttcggaggcctactctcccaacgcgtgtgcacacactcgtcgggatgggattaccgtagcagcaacagcttttgaaaatggatgaaagtgtgtcttcttcttctcgcgggagatcaaatccattctcattttataagaggaatggaagatgaagagtaagagtcatggaataggaagaggaatggagcaactaattgtcatcaactagccatgaaccatcctccactacacaaccatcaaccaacaatcaattaagagtaattgatgtaagttaccaattccttaatcaaatggattaattctcaaaactcttcatcccattgatatcccatagaagaatgaattcacatgaattcctagcataatgagccttggaatttatttgatttaattgatttaaatggattaattacccaattaaatctaacaatccccaccaaatttcaaggctcatgagaatgctctctattccatagcagcttttatataccagtgtttcggtgaagactgttaagttgaactttcacctagaaaaggagctacacctgaccacaactgaacaatggactatgccttgaattgtcagtcttgtgcagttaggtttcactcaattccataattgatactaggcaatcattagtattccctcgggttggagcttataagtcatactccaggcctttcatgagtatctagagatcacccaaatctcatagactgtgactagcagtcgaactcatataggtgtgttccttctaagatgttctgcaggtcaacatctctgcttggaaaagccactcggatcacattaagacataagccatcctaccatgcaggaaagaagagaagcacatcatgaaaatgagcccttttcaagggtctcttctctcagtcacacaatagtttgtttcaccatccaaattcacgggatctccaatcataatggacaggtttccactattatgcaaccttaggtgggtatcaagcccatttccctcgatgcactgtctatcacattacgtggtagccccttggtaaactgatctgccagatttctagccgtttggacatagtccaatgctatcactccagagtttttctgctttctgacagatttcagtcttctcttgatgtgtctagatgacttcatgttgtcctttgaactgttcactttaataatcactgtttgattatcgcagttcattaggatagctggcactggtttttcaaccaccggcaaatccatcaggagttcacgaagccactcggcctcaactgtcgcaatatctagtgctgtaagttctgcttccattgttgacctcgttaagatggtctgcttgcaagacttccaggaaacagcgccacctccaagtgtgaacacatatccacttgtggcttttatctcatcagcatcagatatccagtttgagtcactatacccttctagtacttttggatacccggtatagtgaattccatagctcatagtaccctttagatagcgcattactctttccagagcctgccaatgatcatctcccggatttgagacaaaccggctcagcttgcttacagcaaatgagatgtcaggcctcgttgcgctagccaagtacatcaatgaaccaatgatttgagagtatctcagctgatcccttgctattcttcggtttttccttaatagcacgctgggatcataaggagtaggagctggcttgcagtcactatatccaaagcgactcaaaaccttgtccacatagtgggattgcacaagtgtaatcccaccctcatctcctctttgtagtttgatgttaagaataacatcagcctctcccaaatctttcatttcaaaactcttggacagatagtctttgacctcctcaatcacattaaggctggtcccaaagatcagtatgtcatcgacatataagcacaagatcaccccttctcccccaccatagcgatagtatacatatttgtcagcttcgttcacaacaaagcctgcagatgtaagcgtggtgtcaaacttctcatgccattgcttaggtgcttgcttgaggccatacaaggatttcaatagtttacacaccattccctcctgaccttctagtacatacccgtctggttgatccatatagatctcttcttccagctctccgtttaagaaagctgtcttaatgtccatctgatggacgagaagaccatgagaggctgccagagcaagtagtactcgaatcgtgggcaagcgaaccactggtgaatatggggccaaaaagtctcccttctttgggttacccttggccaccagccttgccttggacttttcgattggaccatcaagcctaagctttttcttgaaaacccatttgcattctaccggcttgtacccatatggacgctcaacgacttcccaagtaccattagacataatcgagtccatttcactgcgtactgcttccttccagtagtcagcgtcaggagatgaatatgcctcttctatggttcttggggtgtcatccacgaggtatacaatgtagtcatctccaaaggattttgcaaccctttgtctcttactcttgcgagtatctacaatgttgtcctcctcaggattttcctcaggcgtttgatcattgtgttctatcggtgcaaagtgctcatggggcatgacagtttctttactagaagtgctaggtgtatatttcataggaaattcattctcaaagaatatagcatctctggactcaagaattgtaccaacatgcatgtcgggtactccagagtttactattaagaatctataacccacactgtggatagcataaccaagaaacacacaatcaacagtttttggtccaagtttccgctttttggctataggtacatttaccttggccaaacagccccatgttcgtaggtatgagagatttaatttcttcctttcccattcctcgaatggtgttttccttatgcttcattggaattttattcaggacatgacacgcagtcaaaactgcctcaccccaccattccttggaaagccccgcagtgtctaacatggcattcaccatctcagttagagtacggttctttctttcggccaccccatttgattggggtgaatagggaggcgtcatctcatgaataattccaaactcttcgcaaaaggatgcaaactcattggaaaaatactccccacctctatcagacctcaaccgtttgattttcctttcaagttggttttctacctcggctttatagattttaaagaaatgcaatgcctcatcctttgttttcaatagatacacatagcaaaatctagtgcaatcatctatcagtgtcatgaaatatttctttccccctttagtcaacacgccggtcatttcgcacaaatcggaatgaacaagttctagaggtgccaaattcctcgcctcaaatgccttgtgaggcttgcgaggttgtttcgattgaacacaagtatggcacttggaaccttttaccaaagtgaattttggaattaaactcatgttagctaagcgcgtcatacaaccgaaattcacatgacagagtcgtgaatgccacacattagactcatcattctcgctaatatggttcacagcattatgattattacacatgtcattcaaagaaaagcggaacaagcctccgctgtcataaccttttccaacaaaagtcccatatttagatacgacacatttattggactcaaacacaagtctaaaaccttctctacacaatagagagccgctaactagattcttctttattgaagggacatgctgcacgttcttcagctgcacggtctttcccgaagtaaacttcagatcgaccgtaccaacaccatgaacagccgcaagcgacccgtttcccatcaacaaggaggaacctctcccgacctgataagaagaaaatagagaaatgtcagcacatacatgaatattagcaccagtgtccacccaccaatcaggtgaatgaaaaacagagagaactgtaggtaatattttaccgtaccccgatgttcctccgccctcgctaatgatcatgttggcagacttcctgtctttgcgctcaggacagtccttggcccaatgcccagacttgccacacacaaagcagtctccctttgcctttcccttgcttttcttcttaaaattggttgcagccttgggtttgacatcaggcttgactttcttgttgttgtgggatgcatgagggttcttcttctgtaccatattggcactagaacctccctcaacctttttgccccggacgtcctttgccctcgccttctcctcaacacccaaagagccaatgagatcaggaacactgaactcttgtctcttgtgctttagagaagtggcaaagtccgaccaagaaggtggtagtttggcaataatgccacctgccacaaacttgtccggcaactcacagttgttgttctcaagttccttagccagcatctgaatctcatgagcttgttcaactacagaacggtcatcgaccatcttgtagtcatagaactgctccataacatacagctcactgccggcgtcagaaactccgaacttggcctcaagtgcatcccacatttccttcccagaaggcatgtgcatgtacacgtccactatgttgtcagcgagtacactgatcaatgctccacggaacaggcaatccgaagcctcgaacttagcctcttcctcaggagaaagaggtggttcacttcgtttgccccgtgaacatagaagcactcatcgctgtcaaccacaatagtgcacgcgctttccatctcttatagtttgaaccatcaaaggcatgt

SEQ ID NO: 24153 - DNA, 8160 bp, Oryza sativa
gcctactttcccaacgcgtgtgcacacctcgtcggatgggattaccgtaccagcaacagcttttgaaaatggatgaaagtgtgtcttcttcttctcgcgggagatcaaatccattctcattttataagaggaatggaagatgaagagtaagagtcatggaataggaagaggaatggagcaactaattgtcatcaactagccatgaaccatcctccactacacaaccatcaaccaacaatcaattaagagtaattgatgtaagttaccaattccttaatcaaatggattaattctcaaaactcttcatcccattgatatcccatagaagaatgaattcacatgaattcctagcataatgagccttggaatttatttgatttaaatggattaattacccaattaaatctaacatgttggtctattcgaccactgtctttctttctttttagttttcctttggctgcccagctagctatatttgtaggtggaagattgcattatacgagttaaaacttcacgtcatatagtttcagcagttcctagttgcataatgcctcagtttcaggttataacatgttttaactttagtcaaaatcaaactgttttaaatttgactaagtttatagacaaatataataatatttatattaccaaattagttttattaaattaataattaaatatatttttataataaatttatcttgggtcgaaaatattattattttttttataaacttagttttgaccaacaatcagtctattggtaatgttagtacaataattataatattttctgcggccctataatttgctattatcatttgaataaaattacattactcggatttaaacttatcttttttaaaagaaatatatatgcttgtatgtagattatacttcaaatttgcaatgatatagcaggtggggtctgttaaaagcataatttttcttttgctattagaatattacctcgaatgaatagggtgagaggagaaacaacagttattgagtctaaaaccacaattattagaaaaaaaagtgtaacttttattagttgcacttcccaagaagacactgattaaatccaatcaccagaatgatttctataattaactcaaccatatctattctccttctccctcattgtcatgctaattaactgaattggttaacattttctgtttgtctttttaagaaaaagagaacgagtcctcccccatttccattaaagaaatgagcactgagtttctacaaggtttccagaaagataagagctaaaacagagagaattcaggagtacgcatgctcaaagaactactaacatgcatcctcttccagttgcaaactgggacaagaagacgccatcccatcctttcttcgcaccatctgcacctgcttccagacgatcgaccacaaagctcgaaaaggacaacaaataaacgaaccatcgttaacattctcaaaaatcaccatcgcaggggtaagcgatgcatgttaatagacagcactctgccaactatatatttgacaggtgttggaaccctgcaattttcaccacagaactaaaggatcaacccgggagaggatgccagtgcacaggcacaagaatagtctcgatgtcttccatgcccaagttcatggatacagatgtgactgtgccatgcaatttcgcttaagctagctttactactagctacctgctgagtattattgctagctttctatctcacatatatttgaccatccaatttatagatcaggaagatcgagatcccccaatggtttcgctggcccttctgtatgtcacccggtgacctcctagccaaggtaataaatagtgttcataatgcccataatagcggccgctatagcggtagtggacctctaccgctaccgctacaaggtagcggactgaagatagcatgttgtaacttagcatccgctataacgtttcgctaccactatagtagcctgttatataacgcttcgcgaccgctataacagcccactattgactttgttggaccgttataatgcttaaatgctattcttcatatatgaattgtagaactttacattgtttatcttatttatcttatccatctatatgttatttcatattttttatgttatgaaatataggaatgtattattaattctaatttttacgtgaaattgatgttaatattgatatatttatggttattttcttatatttgctattggaacttagcgtccgcaatagcgcccgctatccgtaattcgctacacagacactaattcgctaacaacccgctatacgctatttattagcttgctcctagcgtaggttaatacgccctccaccggaccactttctgtctagaggttacaaccaatctaaccaagacatacgtatttaattggagcctacgaaatacaaccaagagcattaagacttttatagttatatcttcaccactaatcatttatctaagaattgcaagaaataaagtgtcagtgggactaagggagtactatagctagtatataaaatattaccactactataaaacattacgtaaggactgatcttatatgtgctgatttacgtaaaaatgatatctatgaggcatttattgtgtaaacgagtcttttaacaagatagaaataaagaaccggcacctataaccactcattggtgctggtttataataaaaagggttaagtccgatttagccccctcaactatcacaaaagttcaatttagctctcccaactctaatactagatgttttacacctattaactttttaaaccagacccaataccctgaccgaaccaatagtagtttagtcctatgtattatgtaacatatggatgttcatatgggacgcactgtcagccccctattcattgtcttcttccccctaattaacaccccccacacacacacacacgcgagccgcagatctcccaaacatccgcttctcaaaatgtttcctactcggcgagctgcacttgattatgtgatgcatgcatcgtttggttcatccaggttgcactgatcttcaatttgtaataaaaatcatagatcgaacagaccaacaaattaaataacgaggaaacaatttcaaatgggcaattaagtgacaagaaactaaagaattaaagattttgttgtatctaggaaccaacaaatatgtagattatcatatacccgcatggatggttcatccgattgaagataggaggttgggccaattctgcatattatgtaaatagactatactttagaatatttcacaagtcttagttgtgtacgattatgtcaataaatgaggaaaccaagtcgtgtctgagagggtcctctccctggtaaccctgccccctaacctatataaggtgggcatggtcagatcgtcgatcaatacaacacccccggtagattaaatcctcaaaacataactaaggtattacttttcatcgagaagatctaaatctgtataaacctttccccccttactcatccactttagatctcctatgtcatccactttagatctcctatgcaaccctgttttttcattgccgatttttagaatcaacccttagcgcacttagtgcattactcagatacgaggcaaaacctactcttttttttttttttgcgtcgagttttcaactgacaagtgctactggatcaactttgggagccagcgactttgcttttcctccgagccagcatacgcggatctacaggtggtcccgtcagggaaggaccccacgtcctcggttccattcggactcccgtacaccgcccaaacctactcaatgatattctctgagtgtgctacatgtatgagttttattgattaattgagtttttcagatgagagttttttttttgggggggtttgagactagttccagctggcatgtatggagaaacatgtacatctgcattgaaattttgtaacatactcaaaaatcttgaatttttggagaaaatttttcgcgacaagatttccttttggttcttattgcatttttctaaattggagcatttcctatttttatcctttttaaatttatatttctaattaattaggttgtgtttttatttcaaaaacattcaaatccgtttggtaatctaaaagtttattttaaaatttctttgtcaagttcaaaaagtcctcaaatttatctcctcaagtttcatctcctttaaatcctatttcaaatctatttataaattgcaaaaggctcctatttagtttgggccgaagtcccttcattcggcccaattggcaaaagtctatatggcctccctcctccttcctgtgagccgccgccgccaccactgcaaccagccgccgccgccgctagccaatccgccgccgccacctcacccaaccaatccgccgcagccacctcaccgcgtcaatccgccgccgccacgcgtcaccgaaagccgtcgccgaccaacgaaaccgccatcgtcggccaatccgacgaggccacccggcgccgcttctctgcatttaaatcgaagcacgctgtgccgtcgccggtttctcttctatccaccgcctctcgccgcctataaaaggacgacgaggttccctcttcctccccacacaaaccgagctcctcaagctctctctctttctctcccatgtccggccattagtgccaccggcagatctccctcaccggagtttcgcaagccaagcccttgcgccaccaactccgcctcgccgaggtgattccatttttcccatttccccttttcctccaccttgagataagccgccgccaccaccaccttctcttatcgccggagctgagctcttgtcgccgctgttccggccacccctctctctccctccgccttccaccaccctccccgggtgcgcgttgctcgggaacaccatctccaaccggcgttctcacctccaggccaccggagagccggcgccttgcttgccctcctctctgttacctctcagctgccaaacagaagaaaaaaaaaagaacgagaggaagaacaggaaggagaaggcattgacaagtaggccccactgaataataactccctttttcttttatttgttttttaatctttaagagctcatatctcttcaaccacaaatccaattccaagaattctttgatctaaattcatccaatttcaaatcctttattttgataccaaatttcctatttttaaaattttatttaaaattctttatttaaaaaccttttccttatttatttatttatttactttctaattctaaatttattttaattaacctttaaaaaaatatatatattaaatttatttgatttattttatatccctttaattttaaatttcttgtttgaaaaacctttttaaaatttaattttcctttaatttctttaaatgccatttcctttcaaaattcaaatatcttttgaccttttgtatttgcctctcttcatactccaattttgttattttcttttaccatttatttgtagtactttttttttcttataggttttatttgctatcttttacgtatacgtacgttagacaatacagaagatctcatcgacatcacaggagctggcgtggatccagccgactacgctgaagccttcgaaagtttcaaggcacaaggcaagacaattaaaattttgagcacattaaataatcaacccccatatttactttatgcataagttaatcatatgaataacactatggtggtttcaaatgatatataatgcttttaaacattgttatatgagattatggaaagatacactgaacatcattttatgtggtttactattcaaacatcttttacaaacttagaattcggttaaaatgggcatttgtgaatgttgatatatgatgaagtttgttggtgtggggagtttggaaagttttgggtggtttaaccggattataattacccccttataccatagaaatgacatagttgcgtccatccacacgatcaagtaattggacttagcctagtacattgtcccactatatgaaagactgttggttggctcactagaagcaggattggggtaaacgcatgtgtaaggaggttgggggcatggttaacaacggtggaacccgtgaaagcagcaaccaagtagccttgcttaggcccagcaagtgcccgactgctaggacggatcaatatcccactcgtgcagtaactagtagtaagtgggaccttcgaacggctctggtgtcctcagccttgcaaactgttgacatcgtgtgggtaaagctggacagtctctgcagaggtgaattaaatcatttgaatgtccgtactcccgattctggagttgtgtcataagggtgattcctactcctgacatataagtagttttaaacataaaatagtggtaaagataatgagaatttgctgttatatttattttctctttattttaatatcttatgcttagaaggatcatatttaaatttccatgattatgttcataacatattataagtgtcttgcagagtacataagtactcattcttgaattatttaacatatagaagaaccgtgttatgaagaagtcccagaaggtagcgaggcctactacaacgacgagtttttctaggcttaatctatactcaagcttatgcctgtgaagtttagtagctttgggtttttctttgtactttcaaataaggttgtaatagtttgtatctttaaaaccattaacagttgtataattagtttgcatgaacaaatttgtataattaatcgaaagctgttctgtatatcaatctgtgcgtgatcgaaatcctggacgatcacgagtggactttcggggcaccaagcctaaattgggtgtccccacaaatttctatggtaaaaaagtaaacaatgtggacaaaattaccagttctacaaaattaaaattaaggaggacaaaatggacagcgtcccgtcaaattaaaatcagtacacaatgaacaaaattagataaattatactaaaactagtctctactattataaaaagttgaagatatttttaccggttctttagtacgtcatctatgtataagtcggtttttaaatttgtactgttttgaaaatacatatccgtatttgagtggaattttaagtttgttcgcttttggaaataaaaaagagtcgtataagaaatcttttttaaaaaaactcgcatgctaacttgacatgattttctagaaaaatatatatccaagtgaattctcacactgaatttcacattgaacaataataagattaaaaatagccttcgcccgttgcaacgcacatgtattttttctagtattaaaaaaattgaaagtgcattccaacttctggcaaacaaagcaaacaatgggaatatcattactgttatgcaaaactaagaacatttttctgtatgattaaaattgttactagaaataaactgaaatcaccatcctcccaaatgaaactggtattcaaaaataaatgaaaaaagaacgttctgctaaattaaaattagtattagaaaaaaatcagatagagattttctttcagcaggaatatccatacgggacttgttataataaaacaagcagggtgattagcgatttccaggaacaatgcggctgcttattccttgaaatcgcgatccaataaagtgcggcgcggtagctacacgctgggagaaggcgggagccatgcgctgggattgggatttgggagacgggcgtgaacaatgtgggacgatcgagcaaaagtgttagatagcaacagagaactcccacgttatagtttcaccgtagtcagctgagacgccggagaaaatagtcctgataccttccatttctaagtagatcgatgcatggatccaaatgtgcatgcgccagtgtgctataattaagtttgacggacttaaccatggagtacatatataggtttacttaaaacccgtgggatcggttgaagattaggggcgccacgtcagcaaatttacaaaaaaaaccctgtatttttggtaattacatactggtttccaccaacatcgtccgttcgatctcgcggtagagccgatctaaccgtccacatgtccactatggcggccctttctcagccgtgggatcgttgaatcggcaatcaacggcatagat

SEQ ID NO: 24154 - DNA, 2944 bp, Oryza sativa
  unsure (1)..(2944): unsure at all n locations
ccagccatcctcgccctagccgcactactaggctcgcgcgcgcatgacctcacctgccgccgccgccgctcgcccgccgccgcttgcccgccgccgctcgcctgccgctcgcctgccgccgccgccgccgccgccgcggctgctcgcctgccgccgtgccgctcccctcgctcggcacaccaggccaccttctcccctcttctctcctctcatctccaggccacccaccgcctccctcttcctctccctatcctcggtgagctacagatccggttcgggggtcatcggaatcgatggtctcggccattggtctcctcgccggtgaatcgttttgatacccttctgcatacatttagcacaaaatccacatggtaaggcaatggttttgacttgccattaagcatttgcattgcgtttgctggtgtttttacatgatcccccatcttgccttaggttctgtggagaaattgatgggctaggatgaggtgtaagtcgcagattacagagaggacgactttcattctgcgcatctaccgtcatactgaacaagttatcgagctttctcctctcttaatcagggcgtgcgatatttagattatggtgagtttttcttgagttcagattatttcatatgaatttagctgtcagaagttcgatggttattggttttgttgctgcattgtatggcactccttgatagaataacatcaggaagaaaaaagaataccatgataggtgttacaaggctataagtataaggtaatatgagagcattctgcaaacaggatatgcaatggaaggatattctttttattaactttggtaaaatacctgccaatagcccattattgacatcaaaaccccctagctctaatactgggagcataacacgctgatagacagtgtgcaaagcttttactggtgtctaatttgttgcacaaaattattactacttcaccggatttatgtggtttgttgtgttggtccagttcagcaaagaaagttggtaggatcatggagaaaatgaatcgtatggttattttttcattgcttggtggtgtttcacacaactcaatctgctgccatatatccataaaacaaaacattcagaaatgtagttatttagtactatcctaaaacttacattctgccaaaaaaaataacttttagcgtgcctgttatttttataatttaatgtgtaaatgatgaagagtgcaagcatctaattttctcctctgccttgacacaagagtttaggccactagaatgtcctagcagcactgaaaatactctatgcatataagcatataaattttccatgtggcacgtgtccacttatgccacattgcttctggttatgtgcacacacatattcaaagggccaaataaatatatatggtaccctgcctcaaggtccacttcaatccatttttatattggtagggggccttagcctaataaaagtatcccatattcctactatcttctgttaggctttcacatttaactattttattttgtcgacatcgtttaacttggtgttttttccccttttcctaagtggttggttgatactattacaatagtatagatacacataatggagccatgtttcaggttagaacttccaatctgcatcttttattgttatgttcaccttcaaattttcatgatgttcaaatgtgcttagaaaatcaagaaccaaagatggaagacattattaagctagaaacaaattacagccttgcagagttaaaagacttgaaagtggttgaccatgtctcaagacccaacactttcatcttagaaatgttaattgaaagctttctcaatgacattattttccatatatcaattactccaactaatctggtactagctactgtatatgcatagtgaatagttagtattgcttaaacaatgtctgggaccgttatattcgttgtaagcatatatttcaattgttttcctatgatggtcagtcaaaaccagataatcaaaaaagagataaaaaactactctctattggttatttgattttcaggctttcaagagattagactactaggcctgcataatttgaaatgctatttaataaactatatatgtatttaaatgttcagaaatttagttccagtttaaaatttcaggtgtatgcaatgttgaaaaccaccaaatctgggcatttccttccaaacaacttctttgagatgaaatagattctgggcagttgtttcttccaccgtccttcattatctttgtactctcgcatctaaattatcctatgtcaaatgtgcatatgatttagttcacagctaaatgcatctaaagggccaacaccagatcttctgcaggtaactgtggcctaacatctaaagccattagtagtacccatgttcttttttagttcataagtcctggtactgatgtggtgatgctaagaaaggtttatgtgtgatacaattaataagatgttaaccaccaaaaagaatacnaaaagctgtgcacttgtgcattaattgatactccgtaatttgtgtttgcagacgcagcaaaaatatattagagtacaaagggtaatttgtctttgccaaaagaatggagttgattttcctatcttcttaataggaaagaattcaagtacatagtctcttctaggtaatttcttccagagtttcagtgctgtctgggattacaagcagtcaatgcctcttcttaagtaatttccttcagtgtcgtctgggattacaagcagtagatgcccgatgccacaagtgttagcttatatgtgagaaacctacaaatacttaaaattagatgctactgccgaacctacaaatctgttctcaattctgatgggtttgatgcttgcctaaaagtgcagaaaaaacaaggttggtatgccgcatgtcttcactttctaccacagagttattgcacgttt

SEQ ID NO: 24155 - DNA, 1801 bp, Oryza sativa
  unsure (1)..(1801): unsure at all n locations
ccgatccattcccccaccatagccaatagagatccccatccccttccaccccagcgcccgcccgatctccgcccttcccgcgcgatcccgcgcgatggcgctcgatctcccgcgccgcgtgcgccatctcgatcccctcccatgcaagccatctcttcccctttcgcgcgcgaagatctcttcccctctcgatacaaatccacccaaaaaatctccatctactattttgccagccccaaaaatccggtaagattgacggtctccgcccccactatccgccttccctcttccccctcgctaatctctcatgcccgcatgcgacagatttgtaccgaaaaccctagttcccctccaccaacagccatctctcgccggaggaagagggaggttgcgccacctccaccaacacccttgtacatgctatctttttatagaattcccagggggggtgttaaagagaaaatatattttgtaaggagatatttatggcaagaagatcaagggatcataaaatatcaccatgtacaatggccaatagtgtgctctccaaaagagcaaacagtgaaccatattaatattaatgtgtatgattttttatataaaagatgaagcatgaaatttatgtgctaattatacactaaaatgatcttgtgacaagttattgatgcaagtttatttgttgcatggttagttactggtttttaagtatccaactctaggggatttggacccatgtgcccacatgctataagtttcagtagcttgttttagttacaattgcagcagtggtggatccaacataaaaaaattagttatgatgaaactataatcttcttgatttctatataggggagtggaatctcgtcctcctggtgggttcgttaatcttatcaatgccccatcaaaccatatgcatcatgtcgccgaagggagtccatcacagcctatcaatgttgagaatggagatgttgctaggacagagaaacgcttgtcatggacaaacgatgaagacttgagattggagtggcctaagtgagttatttatttgtcaatgtgatgtacatcacttgcattactaacaccggtaaacatctttttcctaaaaattgcaaatcagcgcctagctaaacaactcaaataatcctacagaatcaattttcaagaagaatgataaatattggggcgatgttgctgcagcttacaacagcactaccccaaaaagccgagttaggcaagttaagcaagttaaggatcattttggtaaaattaagaagaaggtagggaatttttgttgctcttggaaggaggttaattcattatatgccacgtacctagaatgccagaccaaaatacactcaaaaaccactaactccaaaaattattagaaatttcagcagagtctcccctaaaaatacggacatccacgacaggcagttataagataactcaacaacaatataatccacacaatacaaaccatcctagctccacaaattccacgtgaaagtaaggaccagactttaaatgaccgttacaagttctacgcaaaacttatgctaagcaaaaacgtaatctaaaactgaatttcaatagtgtgcaataatagtgtagttcaagggtgttactcccatcccatgccgatcaatatcattagatatctaaaaaccaaattaaacacaagaatgagtaaataatactcagcaagtacaatattgaactagtaaaacatacacatgtntaatgcaataagaaaccaatatgaaacttttgttttcctttaatttaaaacgaaggagacaaa

SEQ ID NO: 24156 - DNA, 2807 bp, Oryza sativa
ttgattcaaccctgtactagggcaagggctaatttgtttaagtgtggaaagaatcaccattctgcagatagtgtgtttactagggcatgtcgtgggtgtggaaaggctggacacatggggttggtatgcaagcgtaaaccaaattctatcatcaagtggcaaaggtctagcccctattcagcaaccttttcgagaactagctaccctcgcggttcaggttcttccactagtactccccgtggtgctgttcagatgatgacagcttatccacttccttaccagcggttcacacataattacccaccaccaccattaccaagacagtattggtccatacctcaatctcttgctccacatgctccactctagttgcctgcaccgcctatggcgcatccttctgcttcagctccacctcaccagcaggcctcaggctctactacctcagctatggctggagtctacaacatgcctgcagggtcatcccttggtcgcccggatgtcattacaggtacactttgagttgattcgcatgatgctctaattctgtttgattctggtgctacattttcctttgtttcaatcgagtttgtgaaaagagctgatctatttagtcaagaggtctctcgatctgtccaagtcagctctctagggggtataatctctagttcagtagtatgtccaggttgtacaatctctattgatggggaagaattcgtggcaaatctaattgtgattcccttactactctttgatgtgatcttgggcatggattggttgaaccaatatcgtgctttaatttcttgtttctagaagacaattaccttggaagctccatcaggcgaggagatggttttccaagggagcgcgcctccgcattctcttttcgtgatggcaaggttatttcctgggcagcgtgctgtaaagatagtgttattatgagccttagccgagaaggcatccaagcctttattgattgaagatgttcctgtagtgcgagattatccttatgtttttcccgcagaattgctagggatgccacctgagtgtgatgtagagttccgtattgatcttgttcctagtacacgacctatctccagagccccgtaccggttagctcgtcctttccaagaagagttgaagaaacagttagatgatctattatccaagaaattaatccgatggagtgtgtcgccatgcggtgcacctgttatttttactaagaagaaggatggaagttggggtatgtgtgtggactatcgggccttaaatgccgcgacaatcaagaacaagtacccattgcatcatattgaggatttgtttgatcagttaaagggagcaaaggtgttttctaaaattgacttgcaatctggttataaccaaatacgagtgcgagaagaggatattgaaagaccgcattttccatgacatatgggcattatgtgtatagagttatgtcttttgggctgaccaaagcttcggctattctatggagacgatgaatagcatgttgcatagctttctagataagtttgtggtggtgtttattcatgatattctgatttactccaaagatgtagatgagcataagcatcatttaaggatggtgctagggacttacgggaaaaccaagttccatgttaaattaaaaaagtgtgaattttggcttcctgaggtggttttcttagggcatgtaatcaatcagcggggtatctcagttgatcgagcaaagtttcaagtgttgtcggatgagaaaggccgactaatattaaggatgtgaggagctttttgggtatggcagggtgctaccaacacttcgtgaaggattcgcgattatcgctaaaccaatgatgatgctcacacaaggatgtgaagtttcaatggacggaccaatgtgagaatagtttccaacaattgaagcataggttggtaactgctccagtgcttactttgccccaacctggtaagcgtttcattttctattccgatgcttcacgagtaggccttggttgtgttcttatgcaagagggcaatgttatagcttatgcgtctaggcagttaaggaagcacgagcataattagcccactcatgatcttgagcttgcagcagtggtctttgctctcgaaatttggaggcactatccgtatggagaatcttgtgatattttcactgatcataagagtctaaaatacatctgcactcagtaggatttgaacttaaggtagaggaggtgggtggagttgattaaaaattacgatctcaacattcaatatacaccgggtaagacgaatgtggttgcagatgctctaagccataaggtcgttcctccaactgtgagttttttataactgattttgaacggatggatatctcctattattatgccggagcggcgagtactgagtcacgagtcattcttgagtccacaatacccaacgagtgctagaggcccaacaacatgatcgattgctgcaacaagttaagaaacttgtaaaggaaggaaaaactagagatttcactttggattctttgggagctatgcgattccatgggcgtttatgtgtcccacaaaaagcagaaatcaaggaagagattttgcgagaagcacaccgaacaccatatactatgcatcctggtgagaacaagatgtatcttgatctgaagaagatctattgatggaagaggatgaaagtggatgtggccaagtacgtggcatcatgtgggttatgtcagcgagtaaaggctgaacataagagtcctgctggaaagttacaatcattggaagttcatgtatggtcttgggatgata

SEQ ID NO: 24157 - DNA, 16848 bp, Oryza sativa
  unsure (1)..(16848): unsure at all n locations
tgatactcaattgaaattcagtacggcttttcaccctcagactgatggtcaacctgagcggactattcaaactctagatgatcatgtatctttcatggaaaggcagttgggaggatcatttgccgcttgtagaatttgcatacaacaatagttaccatgctagcattcgaatggcaccatatgaggcactttatggaagaaagtgttgatccccattgtgttgggattccataggggagagagctatgttaggacccgattgggttcaacagtccacaaaacagatagcaaaaatacgacaacacatgcttgcagctcaaagtaggcagaagaactacaccgatgttagaagacgggaattggagtttaaagtgggtgatcaagtacttctaaaggtatcccctaccaaaggtgttgtgagatttggaacaaaaggtaagctcaaccccaggtatattggtccattctcggtagtggaaagagttggaatcctagcctatcgcctcgagtaaccagagtccatgaaaggtgtacattgtattccatatttccatgttaagaaaatatttgagagaccctgaacatcatattaccgtagagccggtgaccattgagccaagatttaacatttgagtctcatcttgtaagaatattggaggaatctgagagggtgctgaggcatagaactatcaagtacatcaagattctctagacgcaccagaccgagcgagaagcaacttgggaacttgagtcacagatgcggaagaagtatccagtgttgttcacacatggtgagttatataagtcctacctatgagttcctttctgtacttgttcaaggtataactggacgaattcgagggcgaattcgattgaaggagggaggaatgtaataccctatgtcctagagtatggttgggcgaattcgagggcgaattcgattgagggggaagaatgtaatgccccgggttttgaattaatatatttcgaggaatattagagcgaacgcgcaaagttcaacttttaaaccattgtttgaataggcgatcaggaaccgtggatgcgtagcgctcgtcgagtagggcgaaatagactataagtttgtggtaatctgagtcctgagttatttccggtgatcgatttaatgtgggccgttcgatcttcattagcctctccctattttaaccaatagaaaggaaaaaaaggaaaaaaaaaaaaggaggcatcgctagcagctagccctagccgccgacgtccgcgtcttcacctctgcgctgccgctgctgtgcgtctgacgccggttgccacagccatcgtctccttggtgagttgctgctgccgatctgatttttgtcttgtgttgctgctgctgccgctaggactgctgcttgtgctgctgcggctgctgccgatctgcttgtggtgctgccgatctgccgttgctgctgctattggctgctgctgcttgttgctgcagaagaacaggaaggaggaagagaaggggaaaaaaattagaagaagggaaattcggggagtttggtggatatttccaaattctttgtttttcttacaaaattagtactgctgggtaatctgttttagtccttagttgtttctaatttatatataagacgatccgtttctggtagctcgaatttatttttatcgaacgctaggctaaaatcgtatttttaattctggtattaaaccatcggattcaggttagttgtcctaaataaagtttgtagtcatcgtcgatatctttctaacaccgctggtttcgttcgattctgataaatggtctgggagaaacaacaaaaacagtactgttgactggatccagaaatcaggacagcaattcgttttccttaatctgggattttcagaggcataactgattttgtgctcaacatgaaagtggtagacaagtttgtctaatgtccgaggttgtattattttgctagagtttcgttagacggtttgcgagttacgcataaaacagtaataaaacagctataggttatttaatacaagtcagtaaaaatttatatgaattgagtttcaatttttagtaaattccttgtaactatgattagttggatatagtggtttatgcgtagttttgctcccaggtgtggagggctccaacgttggaggagttgagtcgaattatcgaaggagttaaggcaagtacaagacggacttgtgtgatggataaactgtgttacttagttcggtttcatttacccaattattattcaaagattcctattatcaattgtgtggtttggtattatgctacgtattcatatttcacttcatgttcaaattcacgacgttattcatatttcattcttccggaagtttttgttacattattcaagtaccatgcgtagtcatgggagtgcaatttggatctttattcatgatccttgagaaacgttgatcacgcttgctcggcttaccggtaatgctaagaggatattcacacctgcccgggagggaactactactttttgtctccttcgttttaaattaaaggaaaacaaaagtatcatattggtttcttattgcattaaacctgtgtatgttttactagttcaatattgtacttgctgagtattctttactcattcttatgtttaatttggtttttaggtacctaatgatattgatcggcatgggatgggagtagcacccttgaactacactattattgcacactattgaaatttagttttaaattatgtttttgcttagcataagttttgcgtagaacttgtaatggttatttaaagttctggtctttactttcacgtggaatttgtggagctaggatggtttggattgtgtggattatattgttgttgagttatcttataactgcctgtcgtggatgtccgtatttttaggggagactttgctgaaatttctaataatttttggagttggtggtttttgagtgtattttggtgtggcattctaggtacgtggctacctggggtgttacagtctcatgattatctgatggctagggcaataaaaatatatgagaatgatttcaaggatggtccattcttgtttatgcattgttggaatgaacttaaaaaccaaccaaagtggcatgcatatttggagcagcttgacaagtcaaacaaaggaaggtagattacaatgatgccattccccttgatgacgaagatagctttattgtagtcagttcaaaattcatatgcagtccctatttcatgcttattaattgcagccaatcaaaaaaacatgtggtcaatccaaatttccatgctgattgcttattagttgcagttagtccaaacaaacatgaagtcagtccaaatttacgtattgtttgcacttggtccaaactataatgcaatcaacacaaatattctttgctagcagccaaggcagtgaaattggcaagcagtacaatagtacaattaagcatgcaaactactagaacctccatctatatatatttattgacccttccattgtgaaactctcaaaccaatccattgtttcattctgaaagtaccatgttagactcatcctcaaactcatcatcctccttagatgatctagacccatctaaatttcttgacaaatacatctctgaccagaatgtcctagactcctttgctactcgaattgtggagaagatcaggccaagtttgcagctgggctagtccagtgccaaggtggaacaaggaatacctttgcaagggatcatggagaaggtcaccgacgtctagtggctgattattttgtagatcggccactctactatgagagaatgttttgcacaagatttcgtatgcgaaagcatatctttttacgtattgtgcaagccctagatcagtggtctccgtactttactcaaagagaagattgttctggtcgcacaggcctttctccacttcaaaagtgcacagcagcgattcatatgttagcatatggaacccctgctgatgccttagatgaatacttgctaactggcaagagcacttccttagagtgtttggacacttttgctatagggatagttgaggtctttggtgggcaatatttgcgacaacccacaagtgaggatatagagcatatactacaggttaacgagtctcgtggctttccgggtatgctagggagtatagattgcatgcactggaggtgggggagttgtcctagagcttggaggggccaattcacccgtggtgactacaaagtcccaacaattatccttgaagcggttgcttcacatgacctttggatttggcatgctttctttggtgtcgctggttctaacaacgacatcaacgtgctgaatcagtccccctctattccttgaataagttagaggggaggctcctcgggttcatttttctgttaacgggaatgagtataacaatgggtataaccttgctgatggtatatacccagattgggtcagcttcatgaagtctatatcacttccacaaacagggaagcataaattgtttgctaaacgtcaagaaggggcaaggaaagatgtggagcgggcttttggagtgttgcaagcccattccaatattgtgcgtcgtccagcgaagaagtggaaacggaagagtgttgggaaaatcatgctagcttttgtgattctcgacaatatgattgttgaagatgagagagaggatgcgatatgtgacattgacctcaatagaattcctaggacatcaatagtcctgcctcctgaagtaacttctggtgataatccatgttttactgatgtgctacgttgaaaatctgctattcgtgctcgttctgtgtataccgaactgaaaactgatttaattgagcatatttggcgtcggtttggacataggcagcagacataaacatggtagggtaataagcatgtcgtttctttgccttttctttgccgtgtgtagattatatcaattaacccttgtgtctaatttatttcaggaacatgctctgctcagtatgtccaaatcatggtgctgcacttcttaaaggtagcttatatgaactaaatttagtgctaggccagattacttacagacacattctaatgattctcttttcttccttgtgatgatttacttgaactaaatgtactcctagtccagactactaatagccacagttcagtatttctcttttctttcttacgatgcagtagcatggtgttttgttattgcttttacccgctgaactcactttgaatttacttgttatgcatctgggcatactgcaaactgttacgaaatggtgatgaaattctcaatttttatgccagtgcaactatttctttgtaagatataccaaccgtagaaaaatgcatgtactgattactccttttagtgaggtttcattgaaaagagatttcattgtttcatttattcatcaaatgacaaactactcaagatgttatgtgttttacttctcccattaggttgatgatagctcaggcaatggtaatatgatgcaatgatcctgctatcaagggtctatcttcgatgaagaaatcattctctcacttgttggacagcatatttatatgtacttttgcttaatgccctattgttgatgtgactaatatccaccgttgaggcagagggagtcgaaatcgtgggggcgcaacggagttggggtcgtcgcggaagccacgatccttggtcttacggggacatttaccggctcaccgccccctgcgatggtgaacaaaggagtgaggtgagcgctgggctgggagagtaggggcacgatgcggtggcatgcggcagggagtctcgaggaggcgcaacagcgagtgaggtggtctggtggtggaagcgcggtagcggaggcactggtccagcagtggactacggcggcagaggggattcnggcggagtgaggaggaaggaggattcnagcggaaagaggaagagtgaggangcggcagggattggcgctggtcccgtggtggactgcagcggcagcggggattcgggaggagcgaggaggcagcagggattcgcgtggcggagtcatcgcgcagtcggaaagagcggtggagaggaatcggtgggattggttatgatttcctacagcaaggaggatacacggatgagattagatgagatagcagatgaacggtagtgattgatctgagtgatttggcatgtaggattggaggggtacaactcctcctgtttatattagtatagatatagatatgttgagcagagcccagctgcccatactacacgtcaatactgagaattcaattgcaaaaagatgcgctacagtatgctatcaaactattcagtaaagacctactcacattatttcctttggctctgctttgtaaatcacttgttgaactagttttactattcatcaatgtatatatactcatttgttccattatcttaaataaatacgcatatatgctatatgatgagtgagaaagaaaacaaacaggagcatagattggatcgaaacaacgcagcctctaaatgcaccggttctttggtttatatgggttatacctgtcatgcaacagtcatgatactggacaactgaagttgttacattttacaaccagagaagaatatgataagagataaaacaagaatcagcagacaaactttatacatctctagtaatttttatatgagtgaactaaatatatcttaagcggggaagacaggattgaccgacaaaaaggtgcacacctaaattatcagaacaaagtaggaggtctaattgtgactgcctagttgtgtacccgcactgatacgcaaatattactgcctattgatgcattgaattggcaatgataatcattctaggcccaaaagaatttacaatatggttgcacgtacgacaaacattccacgattacaaatcaaaacccaattccatcagacttgagaaatgctaaaggtcagcttgtataacatgtgagaaccacgcatggtacagagtcccgatcgatccaacaaatccatattcgatctgcaaacatggctgaactacatgctacacagcagcactatgttgtgttgtaggatccgctttattaggttggtagggccattgattctttctctcttaacagcatgggagagtgacatgaagacgcacgcagtcaggactaaaagcatggctattagtcacgatttgggtgatacatgagcaaaggatgtcggaggggcgagctgatcatgcttctagcggctagcaagcagggtgctaggcaagagtgtccgtgtagaaacttagcagaatcggcttatttgatatttttcttgagagtttgttgggttaatttactagttttgaatctgtcttttttatttaatctccccttcattttgtcaaattattttctaaatgtttgactcagactctcacatgcgtaattaataatgatgatacctacatgtacatgccagtgataatacatgtcaataccagtgatgctatggtatctggaacctatgttaataactggcagtggtaattaatatctgtaggtaccactaatgctacctactacaaataaccatgatacctcgagttactacatataataatactacttctcagtatcaaaacaatatcattgaggtttcattatgaagtaacctagttgacgcgtgtacatacatatatgcttacatgggccaaaatggcatgcatgacctatgttattgtcaaatacctagtgtacaccgctactggctaacacgactttttggatccccatcacactccaaaccatggttgttgtagaagagctatgtgcctctctctatagcttacggacagacagaagggatgagttgtgaaccgccgagcaggcatcctgctaggcaattaggacgtgcatattgcaccacacagtctaatcgatcggctcagcataacatcacctcgtgatgcccattttctggacccacatggcatgctagcctgctctgttgtggttgcctatagctggtcccctgtaaaccgagccgaaaccccattcactaaagccttgtgcacggcgggttgaacattataccatgaaagatcacacagtttaattcgttcctaacatgcggtcatgagatcattgaacaaaaaggtttaagagtgaccaaaatcatgagagatcatccaccgccgccaggcccctcccaaccgccactgccctccccaccacccgatctgctgtcgccgctgaactctccactgtccgagctcgccatggcccttgtgcacgccatcaccgctgccaccgccctccccactgatggaatcgccgccccatgaccgtcgaccaccagtcgtcaggagaaaagtcgagagagagagggaggagatgcaacatgatagacggtctgagctgagccctcgttgacgccgccgctgctcttgcagtcgcccaagaggttagggagagagagtaggttgaggagataggttggatagagatgcagattttttttgtatatctaagcacatgcaagcttttaattatgagtatgagcaacctacgtttggaattttatttgtagacaaaatgtccatgtgaccatgttaatctttcgacctcatacctaaccaaaaaatggcctttttctccattgtttcaagcaataacgtggaaaacttaacatgctagtagagtaaactctcttatttatcagccaatagcaattgtttagatatcttagcttgcatattcagattacactaagaaatacgcatgggatagatataagcaaaataacacagtttatatcatatataaacatgtaagctatgaacaaaccacctaattaagtatatcaaacaatatttcaaagtaataaaactcaattcaatggcccatcatattaagtgttggatatccggttcgatagaactacattgcacttgagaatcctatctatatacttagatctggatttggcttgctcgcatttaaatttacagtgttgcatatgcttacatgcaaaaaaagtggggggggggggtgagtgtagagagaggggggaaaatgagaggtgagagagaaggtgaggagatagggatgaagccttagaaaaatttgaagatgctgagagagaagagaggagaaatgttagacttttaggcagatctctatgagacccgtctgcaaaaatgtatttccgcatacggcctcttaagaatccatgtaggaaaataaatatatttttgcaagtgagcctcttaagcggccgcatgcttttcgcatgcagcacttaaaccgtttttggggaatgatttttgcaggtgatagcagttatggctcgcctgcaatttaaaggagatattgtctagaaaaatcaattatgtagtagtgaaagtttcagaaatgttagatgacatcatctactactcctatcggatggactattagaaatgagagattaactccaactccttgtatagtaacgaaccgtagccgacgttttgtatttgtttaatttgtatctacccattagagagatgagctcgcctctaactgtttgttcctttaatttcagccatatctcaaacagaatctcttcctagcgtattagagattaaataatattcctccaaaaaaaagagagattagataatatactcaaacggttcaaattgaatctttagagatgatcaattggggatgatatggtttatatagaagtgtttgatattgctctatcagtatcaagaaagcgatgatcaggcaagaggaaaaggtttttgtgatgtgtttgctgatcactctgccagtcagcgcccgcgcatgttaagctttgtattgagctttatttgctattgtgggccatccatattttgatctaattgttcaaatcagcttattcaacacaaatgatcctgaaattttctctgatgatattctaggacatttttctacatggttctcgagaatcacaggctttcattttacatctagcagtgctagtactacagttaacttgcagttcagttaactctgcgcagcgtttctgaatcaacttgagctctgcaacattctgcttcgagtctaccactaatggtgagcaacacccctgatcccgatgcctctcagacacacatacaagctctgcctggggctgtcatgacacagctgaatgcgcgagcacctagccggaactgaagaatgtgtagcgcaatttcagttctgggcatcatgaggtgccgttttatagctccgaaaattcttgcacagccatatgttacctactgattactagcctctatcttgaagctgatggtttagtcgcatgagatataattaatcgttcaaccggccctcttaattgctcatatcagagacgtgacaatagtactgttggtctgttgctcgtacaggcatgcagcaattgcaatagcactcgtaattaaatccactacataaattatttgtcagtaatgtactgaaaattttcaatagaaggtgtgctacatagctacctttcaggtaagctatttgcaatatgttagtagctagatttttttttttatagttttgcagtaaccaaaaattgcatacatcacgcggttcattttctttggaaagttctttttctctacgatttttttttggatttatacgttgaagttcttaatttatcgttgtttgaatttgaatgtgtctaatttaaattgagtaaatgtttatcagttctaaattagttttatacctatattagagaatcctatattcgaacttttatctaggaaagacgagaaagtgttttaaattaggaatgacggaagtgatgaaagtgttaggttatatctaagttatgagaaaagtgaagtgaaaaataggcaatcaccttaaatatataaattaactcttcagattaaccgtacttataggcaaaaaaaaaacatgtgacaagtaatctacaacctcatcaagtacaatacaatattttctttcagtgattttccccaaaattaatagtctccataagacacgtaatatcaacaaatactaataggataactaggtgaaaccccacgagttgctacgggagttcagtactcactccgtcccaaaatataagcatttttgataagtcaaacattttcaactttgactattaattgtaaaaaaaataaaaaagatcaatcatgtaaaattaatgttactagatttatcattaaacaaactatcataatatgtaactcattttatttaaaacaccttgttttatagatattgttgatcaaagtggtatctcggagaccgtgccgggtctaaaaatgcttatattttggaacggagggagtatgatttaatgagagaagaaaatgagagataatttagaccatgtatgaattatctaagggctaaacaattaatatgatatgacttattaataagagaggagagaaataatattaagtaagtgaggataaactatataggtatgtaagatattataaaaaataatgaagagatatattaaaacaatatgtgaattatgtagaataataactaaatgcttgcattttaacgctttaaaattcaataaatcatagataatatagcatgcttgcataatatttaagatgtaataattattagtgaataataatttggtatctttacatcttaagttttaaaatttagtgggttataactttatagtaaaataggatatatagcactatttaagtaccttaaatagtcaagaaggaatctgcagcaattaaatagctctcgctaaagaaaattcaggggattgcaaacaggagattgcacgcgaagcacaaattgtgaaatcattgtcatgattaatattttgtgatgaataattggctttacaaatgatttattcgatgaactgatttgaaaagatatgtggatgttggtgtaagtgcgtgtgactaatgagtcaggttatgatatatgtgctcaggaacggttgctttgtctgattgtgtgcaggtgacttcaggtcaaccttggtcaatgatgaggaccgagattatgctcagggaggatcagaggtccagtgcggtcgggatatcatgtgagaaggtgactagagtcagaattcttggaggaaaacttcggtcgatagtgttatcgggtctagactcagggaggaatgaggtgtgagtgcaagcgtcggtgttcgcgaaggagattagagaattggataagtgtatgttgctacattacttcggtttactgtagcatatgttgtatgcatgtgtgttgatcaatgatggcagggcttggatgttactccctccatcccataaaaaactaatctaggaccagatgtgacctatcctaattaacactataaatatggacagtatttggacatatgtctagatttgttatatcaggataagtcatatttgataccatgttggttttttatgggacgtaggtagttatgtagcaggttaggatttggatcctctaccttcgaggggtgaaggcacggtggtgcagtcaaaccatcctcgccatccagcaaaaataagtggctcacattcatgcatgtatatacagagtataatgggccagcccattagtccgtgcagtcaagccagcaaatgaggccgagctagcgttgccacattatggcgcgaaaatgtccgcggtaatggagccgtggagggaaaaatggcatctttactctgttttggcgccagaattacataattctcttcgtctactcttttcacctccatttctcttttcagttccaaaaagattttgtgccctttttcttgtcacctcttcacagcctagctttgagatgcaacaagcttgtgatcggtcagatatggcagaagaacccacttgaagaccatgtgtttgccgcggtgattagtcagtttctacaagagagatggatgaaaaggcggatggtgagcaccatgagttcatcaggtaaataaataccaactctatacttgtcattcttcaagcatggctgcattttctctatagtaataatccacttgtgatttttcagagaggggatgatacctagtacactacctcaacttggaacgaagttttaggatgagatggaggcttgggagttttggaaatcttatggaggtaacatcggtttggaggttaggaagaggtacgcgaataagaggaagtctgatggtaaagttagatcatttagatatgtttgctcaaaagagggtcatcggaaacaagataaaagatatcattaaataaaatgtcctagagctgaaactagaaccggttgtcaagtaagaattggccttatactagaccaaaaagtaggaaattatgaggtgactgatcttgttctagaccacaatcacatcctttatccaccggaaacattccacctaatgtcatcagaaatgaatatttcagatttgcaagcttttgaaattaagacaattaaccgatgactccggaattggaccaaaagctgcacatgagctagctagccgtcaagttggtggatcatttaatcttagctacacccttcgtgatcaaaaaaaaattattcgtgtaccaagcaacagagggaggtggcatatggtctaagtcggaagtatgttgaagtattttcaagacaaaattgctgagaatccttctttcaaatatgctttgcaaatggattgtgatgagcaaatagcaaacatattttggactgatgctaaaattatcatagactatgcacattttgatgatgttgtcattttttatactacttttggaacaaataaagagagtagatctttcagtgtctttgttagtgtcattttcgagaaacatttgagtctttcaagtggttgtttgagacctttgtaaaagcacataatggctaacaaccgcaaacaatttacacaaaccaagatagtgcaatgggcaaagttgttgaagaagtgttcacagaagaatggcatggattatgtacgttccacataatgcagaatgctatcaagcatttatctcaaccggagaatgaaggccaacacctacttctaaataacttgacaaagtgctagtacaagccactggagacaattaacaggctcaaaacctcaaactcaaccatgttgcacagaaaataactataatcagctaaatgttcatggcggcatgagatgagcaagcgggaataagcatctacattgttttgattctattgtattcttctttcttacttgcatatagagactgaacaatgaacaatgaacaattatatttcacatactcatttgttcaatcaatggaaaaacgtaaaaccagcccatataaaattcatcgtcttcgaagagatcacaatggagggcgcttttccttttttttttaatggaaaggagagttttgtttacacatcaacttaggatttttctatcgaacactagacgaggaattcccccatccaactgtgttacagaatcaagcatagctcgcaagatcgttaccaactccactgcactctttgctagccaattcagttttcacttttcacttcaggcaatagccacattgtcgccttaatttcaaccaatagctaagctttataaatactgcttgtcccgcgccttcttcagtcttggtaccaacaagctacagtgaatgagattgttggaatttgaagctatttcaggagtaattgcaaaaactatgagttttgtttcttctaaaatcgatcaaaacatatcgtaaaattcaccatgacgacaaaaggtacctgacatggttatcacgaaccaaaacaactatgcttccattcaccatgacgatgtcatacaggcataaccataacaatgattccgatgtctcaaagcctaacacatattatctctagtatggtatgatgaatgtggaaaacctatatatcataactgaagaattaatatgaattctttacaattgtttcactgaaatcaaattgtgttttgattattattttgtgatgaacaattggtatgtgaaataattgattttttatatttggtggataattgacgaagtgggattggtttggcccagcacagtggtggtcgatcagattggcatatgttgtgcagtcaaattgaccagtccgacaatctgaccggctgactctgactcggtgttggttttacgttgtttatttggatactcgtaattatctcgtgattatgattctagatataatactgttgtgtgccaatgttgagtatcacgatgagggtcatgccgtggaacgagatgcagagttgcatcgtctcacgcctgatagggcatagagggagatgccggggtcgtcgtccgcctccggcgtcgcattgtggtcgtcatccgcgaaaggcgcgccaagccaaaacaggcgcttgcacttatgccctggaataaatttttcatcacaattaaaacaaagaccagcctcacgatgcgagtgcatctcttcaggtgttagtgtacaacgtggagtgcgtccctgttgaactggtttaggtgttgttgtcgtggtattgatgcgaaaaacacacactggcctgagagatttgatttactctggtgcaggtcctaaatcttacttttgggttcagggcgtgccagttggtttgatcctgcaaccaacaagaaacaacgaaaccaaagttaaatctataaactctagtcgatcggctggattgctgatgacgtatcattcatatcaggtcgatgtgatatggatcagatcggatatggcaaagaaaaggttaaatctacgttatctcaataatatataatcttggcttcgaaatacgcttaaaccaagtgattgggatagatcggacagcatgccgagatagaataaaccacttatgtctaaaggtattttaaagcaaagactatatatattcatagcatggccgattggcaaatccaacgtgtatcggctagtgctccgatactactttatactaagatatcaatatagattaaatatactaaacaagaatcaattcaatgttagggtagcctaacagactgatatcggcttgatatattttatccaagtgaggtcttgatataaagggcagattcagtatattaagtaaacaaataagaaacaagataactaaaccaggtaagaccgactgaaactccgatactatcccaattaacagtcatgaagcaggctagatattgtggttctagatatcacttaatagatcaaactcaactgatgtagcattaagcataaagaaaaacataaggtctagacgagccaatgagagccttttcgggatggtggatatactatataatctaattcgacgatagcattggaccctatcggctgttttcgatgatagaggctaaccggtgagatcacatagtaaggtcgatctatattatatagcatatatgataactcgacgacttgcgtggacatgattagagtgtcataaagatgtaagcactaatcccgataacacaagccgccataacaagctttacatcttgtcggagatcgaaactgatgcagcccaactcgaaagcaagaactcgtcgaaaataatgaaaagtaaaagggtggcaatgcaccaagaatgtattgaaatgatgttgttttgtacaaggtattgggtcatatttatatccataatacataatatgtccttgccggacacaactccacttcttattacaactcaaaaagacgaactagtcccttaagcggactcttaccgaaaatatgtataaggaaactaccaaaatatcctagtaatagatacaattgtcatttttggactcaatccatacttagcaatacttgtatagcacttcaaccaatcccggca

SEQ ID NO: 24158 - DNA, 32498 bp, Oryza sativa
  unsure (1)..(32498): unsure at all n locations
tttgactccaaatccaatctatgatttaccacatttggtcgttaacacgtggtcctaatgttgtcgcttggttgccaccgaggttgggcgcgcccagagaggcaatcctcaccggagttcggagggggaggccgggaggcgggagggccggatgctgggcagcgggtgcacgacggcgcggcgcggagcgacaacttggcggcgccggcgcccagagcgaaggcagcggttgcacggtggctggcggggcgcgcgcgggtcttgtgggaggccggacacggcgtggcggctcgaccgcgcgtcgcgcgagtcgggaaggcgccaaggcgagcaggccctggcgcggccgctcggggcttcttccggcgtcggtggcttggtgctggctgcgtggtgcgtgcgggcgtgcaccgtgcgtcgtgactgcgtgagagtgggaggccgggagacgggagtaacaagagttagggttttttttgttgcctattgggccaggctttttctgatgggccaataaaactgaatatctactcttctctgggccaaattctagggtagtcctaggcctatatggactactctctgggcccgctaatgaaccgacgccacggcggagtgccataggcgcgttccacatgagtgtaccactgctgcgcttctcggaggagatgaaacgctacggtccaaaccttctcttcctctatggttcgatgctcgcggaaaaattgttcacagcggctgatccacgttgccggatcgccatgccgtcgtattagggaaaatcccacttgtagtagcggggaacccgagcgtcaccgtgtgtttccgcgtgcggtgtaggcgacggtagtggtctcatgatccccttggaggactcaaggcttttgattgccgtcgagtgttcttggagcgtgatgttgatctttttaagctcatcaaggatggctgccatctgcacattgctctgactcgcagattgctcaggaggagtcgacatcatcacaggcgtatgacgttgctctgataccaagttgtcacaacccggcacatattgcaagcggtagttggggaacaccggcggacgctgtccgggaccgcgagaccggcgaggcgtggtggcggaagaaagaaataatgcgcagaggagagacgcggcgagagaggagaacagagattggaaataggaggagatttaactgatttccttcttaacttaataatccggactacaactccttaaatagcaaatactaatcctaacaaccggctaatgactttagctaatgacaagcacaagataaatgacagaagataaatctatctccagctaatccgaagacacgcgcacgttactttcgcccgccgcgccatccttcttccttcgtctccggaactgaatttcccacatgacattcattttgagggttcctaatttcgtacttgtcgaaattaatttttagcccagtcaaataaatggagaacactgaagagagatttcgtggaaatcagtggcatatatcccaaatggttcccatgtctagtagaatgacggatgacacgcatgtgtctcactatactctctccgtactcataaagaaagttgtttagaacaatatttaagtcaaaccttggaaatataaatcataaataactgtctagttgttgaatttgaaaatgtaaaaattatatgaatagatttgtcttgaaaaatactttcataaaagtatacatatatcactttttaataaatatttttatagaaacaagaagtcaaagttgtgttttagagaccgtgtcgctgttctaaacgacttcctttatgaaaatggagggagcatatgtgctagaatgtccattctagtgttcccgaagcatttgattgttggctgccaattcaaagttgttatgtctccacgtctaatatctctgttttagatgagaaaccggccgatgtgtgatccggcgagtttacagagcaggcttgcagtgattataaccagacggttcctatttgcctctttgtgctatttgggcacaagaggctgggtgtggtttatactttataggtgaatgtatgattcagagttagaactgggtataactaagcttttctagtgtccgatttgtaggtgaatgtatgattcagagttagaattaggaacagtaagctctagtatgatcttcatgtgtccaaattataggagaatgtatgaatcagaattggaacacggaataactaagctttgtgcttgtttttggcccttctgtacatgtacgacaaggtaacctcctatagctagcaaattaatgatatataaagcattaacattgctaatggctacgattctgaaactagaaatgaacttgactttttaagaggtaggagtatgttggtgcactagaagatatgcatgtgtgtatgcaatgaatgcgtacaatacattagcattattattgtgtgctacagctgtaaaatttcggaggatgtcagtaatgttacctgttcaaatttcggaggttgtcagtaatgttacattttcttttctcaaaaaaaaaagttggacaaatttttggatacttatgacacgcttttcaaactgctaaacggaacgttttgtgtgaaaactttctatatgaaagttgttctaaaatatcagattaatccattttttaagtttataataattaaaacccaattaatcacacgttattatcaccttgttttccgtgaaacacttaatctttatctccatctttattttcaagaaattcaaacaccacttagtttgcaccaaatgacataactgggtccatgatcattacaatatcttgttcggttgttctttgtgcagtatgtgagcatgttatgttgggatatacagaaattaaacgagctaggatggccacgtggctccacactagcagctctcccattaaattttactggcgctaacacacacacacacatatatttaactagaaaataccctgcgcgttgctgcgggatatgagtgcaaaaagtagtaccgaactatgtaatttcgaaaagggtgataatatgaacaaacacattctgaaaatatgaacaaacacattctgaaaatatgggaaatctcttatatgtttttgtaatcgaggagtactgatattatagaattgtagtacagataatgctatagctgcaagatgaagaacagaatgggaccctaataaaatatagcaagtcttatgcatatgacataatgaagtcttcatatggaaggaaaatataataagtcttccgcacagtaaaatcaccgtaggtcagacagcatatgttcacctgtattttgtgttggagaatatattagtagtacaacagggatgtgcttgtaagataatggagtaaatctttaggaatgtgaagaataagtaccatttttattatgtagattggtcaggcagattggtatgcaatgcagtttgtagctctatgctgtttggagtggttcataagatattgcagttagtgttaaaggcaaaagtattacaagtcatgagtggatttatctatcacaaaaatcaatataaaaataatgaaatgtgtggtgttataaaataatgtatacactttggttccctcaatggagtcttcaggaaaatcagcctttccctctgtatgttgtagttttttgctgcatgaaatagtttcaaaaatattgtagtcagtattatagttgagttatgttattctatgttttttccaaagtagtacatgcccttctttgtaatgtttgagaacagggagatttttggtagtgtaaaaggaaaaatgttccaaggttggttgtgagttgatatttgttaatcagaaaaggcaatataaatggggttataaaatataccttctggtttcctcaatggagtctttagtgaaatcaatggctctctttgtagttgagctgcagtaatggataataatcatatgaatgattttattaagcataatttttttgtatatttacctggttttttcagttggagttttatcagccaaagatatttcaggtgtacttttgcttgatgctcctgtattatgaatagttgtgctgaaatttatttggcatcagcagttagtactatatatccaatgtgatgtagaggctgggttttaatgaaaatcctttatctaaaaaaaattatggtgttgtacaaatgcaatgaatagaacatttgatagaacaacaaaccttgggttatctgtaagtggtgcaggtggtggaagctgtagtacctctttgttcttcaaaggcttgattagttttatattttaatttaattagtttgaaatatttgaagtaatatggaacaggatatctgaagtaatatggaacagtagtatttactaagctctccatctgtgagcatagggaccgacatagtaggctcaattgtgaaactcttcttaagcacatagctgatagggaacttagaagatgtatcagtattcatccctatagcaaaaatttttgttttaccaatggcattattgagtgctgttggatgatcggctgggtctatcttcatgttttgggaagcttgggctgcatcaagctctaccaaatctttagcaacaaaagaaaatgctactgcatctaaactccctgattcatctgtaatcgtgacagggagtttgtacctgaagcattgtacattagttagatacatctagagtggttcttcgaatgaatgtataagagtaggagattgtacattggtttgcggaatgaaacttcgcaagcacatcttggtgaatcagaattgttgctgtaccctttatcacaacgatggcatcctatgtaataccatttaattgatgacagtatggcagttatttttgcagtagtactgtatgtagctccacccttatgtaataaaaagtattaaatcttggagaaaggaatccatggcatggtaataacaatataattttttttcttttgtattgagttgtacctgaaaggctgaaataggcatagctgatatctcacttaaggtgtacatttttcctgctgcttggatcggggttaaacgtataaccttagggagttgttgctcaagagttggacgttcccattggtagcttcaaattgcaaagagataggttggcatcttttgacgtgaaatataatacatattgaacaggaatattcaagtgcaaatggtttgaaggggttaaagagaattacctagtgcgaaactctctaacttgaggtgtgtccaggtcaatatatatttcagtagcagagcttgaagatgcttctgttatagctgcaggtgaaagtgaagttgaaatgttctgcattctttgtatgggagggcatttgtttgggtcaaagaatgaacctgaaaattttcctgcagtaaggccagcaaagatggctactacaatttcatcctttgatttatggagtgttgcatcttcgttgaatgattctccatattgtccccagagtaggacatcttgagtctgttccctgcaaaaatgttgcatataaacaattgctgagattacacaaaagtaaataatgagagcattgattttaacgatcaggtttggaaaaggtacgtactctaggttttgaattttaattctcctaagttttttgtctgatgttgggctcacaaaatcatatggaccaatataactgattactccaatcaaatctggaggaatattcattcaaaaaaaaatctggaggaataagccaaaagaatgtgaagtgtaataagtatgattcaatgtggaattaaagatagcattacctatgagaggtttggaactgatatttttccctagaacttcatcaaatgggcagaagtcaaaaaagaactttggtatggttaatcctctagattccaggggttgaattcgtgtgtcatgtttaaactggagaatgtagttctggcactggtagatattggtctttctttttgcatcaatggcaacagtattactaattaggtagacagatcctttatttagcaaggggcggaattgctttgcaaacctttttggcacagtgatctatgctattgagccctgaaaaattattgtgcaacaattgatatggctagtattaagtatagcaaagaagtagaatctagtattaatatttggtggaacacataagagaatgacatacatgttcatccaataggatgccgtcaatgctgatgaggggatctgcagattttgatctcatgtttatagcatcccataatcttattagacgtccaaaaactttgcagttttgctggccaacagatatatctttcaatgatgtagctgggttagccattgaggtaaatctgaaaaaacataataaagaaaaaatgaaacttaagtgaatatatgtactgagcaaaatatggaaattgaagtacagtaaaacattatatttacaaaactaataacgaaaccaacctatgcatcacaatataccttatcagttcctgtttctatttattaggttgaatacctcggaatatactacattgtgtgtgcaattttcataagaagcagggctgttctctattagaactttcaaaccattaggtgaagtcactctcgagaatgcaacatataattgaccatgggagaacacaggtgaaggtagatagactccaactctgctcaaggtctgtccttggctcttatttattgtcatagcatatgaaagacgtattggaaattgtcgacgccgcaatttgaagggccacttggattgagttgatgttgtaacaatgcgaggaatatatgcttttgtacctttcgcttttcatgtgattatttctccctctatcacacggtttgttagttgtgtgacaatgagcctagtcccattgcagagtcctcttgatggatctagattacgcaaaagcattataggaacaccaattttcaagtgcagcacatgttctggaagtccatttatagaaattgtgtttagaaactctgttggatatagtgcctctatagcagtacagttagtagaactgtcatcaattgtatctgagctataatatgacatctcacttgcttctaactgagcaatcattctattgtttatttctgaaaccacctcatttgtaggtgctaaaattgcacgctcacacagatatgatataagatttgatggttgacatcctaagttgtagacaaaagaaatcaatccatctagattcctacagtttggtgatagaagaagggactgaggcatctctatgaacatgttcgttagttgctctgggacatcaacaaaaggttctgtgccatttcctattttcaaaagccaattagaaaaatttcttaactcttctctatcttgtgcggaaatagatgcagaggtaagcctcatattttcagttaactcaagaagtatgcactgattccacaaataagagttaacaatgcatgatctcaaaatctgttgctttgtagcattttggatgactggcagtgtctgcctgaaatctccaccaagaactactgttataccaccaaattgtttgtctaatgaatttgggtttgtttcagacaatatatctcgtagagttcgatccaatgactcaaagcaatatttatgattaacaggagcttcatcccacacaatgagagatgtttttttggatcagtttagctaaatttgtatttttctttatactgcacattgaatttttagagatttccaatggaattttgaaacgggaatgaggtgttctcccacctggaagcagcaaggatgcaatacccgatgatgcaacagctaatgctatctttccctggcttcttatagaattaagcaaagttgtccataagaatgtttttccggttcctccatatccataaacaaagaaagtccgtccttcattattgatggcagaattataaatagcattaaaaacttccttctggctgttattcaaacctgaaatagcttcatctatagtggatggcatgttataaacatcgtagctgagctcatctagtacaagtctattctgtgctgaaacacttccaatatcatctggtagtggcaaactaaaatgggataagtcatagtcagcatctcttagcagtttatctaactcaatgagaagaacagatctaacataaggattggtggagctgctggcctgagaagtgttgcggggcattcgatatgatatatcttcgctcatatatgattcatgttcactgaaaagtcttgtaggatttgttacctcacaaaagagtaacattgtaacaaaaagttgtcgcagttgggatggtaaggcccattgagctgcatctttcaaagcatttgaccactcttggtcatcaccaaggagacctaatgcttcacatgctgcccgaaatgtaggatattcatgacctgatatagttctgatttcagcaaaggatctagggcccttaacgatgtgcagtagcattcgcagatagtaagcttctccttgtgaagggtttacataagcaatgtggccaattctacattgagaaccacgacgaccatcccaatatttgccttgattgtgccatgtccaatgttcagggtattctatatatgtaagttgcctagcagaagggttctccctattagcttctaaccatgcagttagtttggtcgtagagctgtttggatcttcaatgacctcttcaagatcatcatcttctgtgaaaataacattattctcaaatgggagttggacaggtaggcgttctacggagggatctgtgtggtggatgtcaaattgttgcaatcgccaagcagcatcatttggactgacacaacgacattctagataattatctatttcattgatagtttcacttgatgattgtgatcctgaattagagtgaattccaacccttgaacaatcaaatccctttgttacatacttaaaaagatatttgtgcatgccatcataattaactttctctagatttatatgtgcctaaaacttcacaaccaaatcaacattatgaggaacaacaaatctgttatcaacgtcaactccattttttgtaacagttcttccattgtttggacgtgcatactgtgtaaaaccattttttaatatagttgtttcttcacagaattccttagggtagaattttgtgcattttccttcagacatgcagattgaagaagtgttgtgaggaccgcaaggtccatgcaccataaaagaagatacagcctcaaatcctatttggtcaattgcaggatctggtaattgagctgaaatataatgatcaatcttctgggaatctaagggttctgttttggccaaccatatgattatgtgaacatgaggtaaaccacgtttctgaaattcgattgtatagataactgcatgaaaaatgatatgttttaagggttgcatggtggtaacatgcatgtttaaacctacaaaaggaagagaaaggaaaatttatcttttggaaaccaatgtaaaatttgatacctgcatttatagggccaaaaaatttgtgcttctttatatcatccattaaaatattgagcttcattttgaaaacactattgacaatatctggacgatcggaaggttgttggccaggaattgatgctaaagcttctctaatttcaggccaagcagaattcgatgtgaatgtcaaaaaaagatcagggcaaccatattttctacaaatagcaatagaatcttgataattttgatacaaataccgaggtcctccggtaaatgaagatggcaatattatcctttgcccaacagaagatccagatgtaatacctcttgagacagaattaatcaatgagttgaatggtgatgatctatatttactttggaaggctggtgtgagataatgtgctatccggctcccctcgacacaacaataaaaatctacttcataagattgtgttagccttttacaccgtaacggtgtattgaagtctcctggcctatcatgcaacctatatgcatagcactctagcattgtaactttattccgttgcatggattgagtgcgtgctgttgtacgatatgtgatgttttcatgataaccatcctctccatatgggaacaaaagtggatattgcatagccataaacttgcggtgattttcattgattagctacaaacgtgatgcacgatcttggattataatatctcgccctacatcagctgatccaacatcaccaacaatcaggccaacaacttcagaagcgactggagcactataaatatctccatgtgcatccggcttaccaaataaccttatgcaaaactgatcagatgcgtctagggatattctttcatgtgctgttctgaatagttgaacaatgggattatttgtattcaacatttctatcaaggatgcaacaatttgttcattagcatggaaagtgacacgggaagatgaagcaatattgatccggtttgagatctcatgttctatatcaaaaatatataattgcacatattctggacgttgaccttgtggtgggagcagagaaccaattcgatgacagacttgaccactaattttgaaaacatatggtgttcttccatcatttatggactcattaattttagctcccattgaagtaattgcaaacatgctattgtattgccgaatatgatcaaagaagtggttagaaagagtgctgttttgtgaggtcaataaatccaacaatggctgtggaggaggttggtagggtgacagccatattctccctcctttgcaacacaaattatatgatggatttgaagtatgtctctctctacgtgttcgctcctcataccaaaaaaaagcaccacagtggctacaagaatgatgtggaccaccaagattcaatggttcaaatatagtgcctgaaaggtgtgtcattggtatatgtgaaggaatctttatagcaaatggataccttaaagtggttagatcctaggagtagaaaagacaacttatgcctgtgattgaatgattgattggatgtagatgaaccaatatgaatatggggttcattttgtgctatatgattagaattagaagattcaccaattaaccgtgggcgtaatattcgttgatctgcagaggttgatgctagggaaaaatgatgaaattgataatgtgagtcatttttttcgtctgcataaaatgctgacaacttgtaggaatgttaatcttctaacaaacctttgttcctatttgcatcgataacttgcctacgcctacgtcgagattcagcagcaacagtttgattaggacgtgggatcgggatattagaaggctgctggcgtggtcgaccacgacgacgtataattagtcgagaagaacctgccgtattatccattctacccgagagcataaaccaaggaatcctataagtcgaaagaaataggtgtactataactgaataaaatcaaactgaacttatcttgtaaacaattgttgaacttacaaaaagataataggtcaaattgagcattcatcatcaagagtagaaacaaaagccgggggaaagcataagggagaagaggcacatactagatttatctttcctgaatgaaaatccacaggagccacataacaattcaaaaggaaggccgtcggtaccacataaacaaatacccttctgtagacatgagagattcaaactgatgaaaaaacctatcagaagatcattgtactccgaataaatccaataatatgtacctatgcaatggagattcagatgaaacgaagcagttggtgcaggtggattgcagaatttcattggcaatataagcgaagggccgcaatgatatcgccatggcgttatgagcaaacaaaattaatgtcttgatgacggtgatgaagtctggttttagtgggcggcggtcgttaagcttctctcggatatggaatcggaacggcgcgggaaaaggagaagcaaccgtcgttggggcggtgtgggtcgcaaaaccaaaggctgggtggcgctgnaggggcaaaggggggaggcgaagagtggcgcaagaggaggaggcgaagcggatcancgtggatgcggtgcggcgtggatgcggtgggggggttgggggggcggcggcgcgagatgcgggagaggggaggagcgatgcaggagaggggagtcgatgcgcgtgggccggtggagcagcgcgatgcgggagaggagaggaggggagcgatgcgcgagaggaggtggggctggcgagtagcgatgcgggagaggagaggagaggagcgatgcgggagaggaggtggggccggcgtgtagcgatgcgggagaggagaggagaggagcgatgcagaaggaaggaagcgctcgatgcttatccaacggtggggataaaaagggtgacgtggaagcaccaggaagcagagaattgtagtagtggggatgatttgtataggtatataggattatctttgttcaaacaaacatgttgatggaattaaattttaaaatacactgttcatttttatttttctcagaaatattgcaactctattggctgaaattagggatattaggcatatatatagaataacagagtctagctggtcgatcgtgacataatcctttatgctatcggttgagacattagttctactgtccttcaatctcgtaccatgtatgtaagtaaagccctcgtttgatcctatctttgctccatgatttaataatatagtgctacagtaaacatttgctaatgacagattaattaaccttaataaattcatcttgcggtttactgattgattctgtaattagtttttttattggtgcctgaatactctatgcgacaccctatataatacccgatgtgacacgccaaaactttacacccctagatctaaacaccacctaacttctacttattagcaaaataaattgttttctgtaccaaaagattgtactgataaatatggggtacatatatacctctgagcagagcaacttctcagagactgtaaagctactcacataaaccactggtcaactaatccatcacacatcatcatacaaatacaatatatagtacataccatctaatctagcctacagaacagttcataaaattctcttcactacaatatcattccatatcctttcagagtaaaaatattcgctgaaactaataataatcaacgtgccatataattgtctgaacaggcgaatgagctacagttgaacacgtatctattagcgaacaaagatgaacagtgaaaaccagtgaatcctccaagtcttattgatctcaaaatgtccccttttatagtggggatttacatatgcacaagcctaggatactcctaggaattaaggagcctaggatactcctaggaattaagggtgatttaagccactaaatatggatgattatgtgtcacaaattcaccatagtatggcggttacaagtcacttgattcctgccattgttgctctttgatgagcctttgatgagataaaaaatgtctcatgatgcttttgtaacactcccccttttgatcgagtccatcttgagatcaacttgttctttaattccttcgaaaaaccctgtggggaaaaaaaataggaataatgtgattggtgattactctatcagaaacctgaaaggtttaaggagtaatccatgccatgttttatctctagaaaaacccctgtgaggaaaacatgagataaggcataagcttgtatctaacattgtctcattaaaaactttgtatgagaaaaaccggatggtaaaaactcacaaaaggaaaaagagtacaatgtgatgtgtttcaacaaagtacatcattcagagagtctccccctgaagcttgcaagtctctgagtagtctcataccaattccccttaacacacctctcgaacgaagaagtaggtagggatttagtgaagagatccggcagatatcgcaagactttggctgtaagatgtttatttctccactttgctgaagctcatgcggataaaacaacttaggagcaatatgtttggtgatattgctcttgatgtagcctgtttgcatctgtgtaatataagcagcattgtcttcatagataatagtaggtgattctgatgaaccgatgccacaagattgctcaatgtggtttatcatcctgcggagccacacgcattcacgtgatgcttcaaacagtgcgatgatttctgaatgatttgtggaggtagccactaatgtttgtttagatgacttccacgatatggccgttcctccatggaggaatacaaagcctgtttgtgatctggcgttgtggggatcagacatatagctagcatcagtgtacccaaccaaactaggatcagcagttttctgaaagaataagccaagatccttagtgccatttaggtacctgaggatttgttttccgccggtccaatgacgcttagttggagcagcactatgtcttgctaatagattgactgcaaacgcaatgtctggtctagtactatttgcaagatacataagtgctccaatgagactgagatagggatattctggtcccaatatcccctctccttcctcccgtggccggaaaatgtctttttctttatcgagtgatcgaacaaccatgggggttttgtttggatgtgctttgtccatattgaatttctccaataatttctggacataggcagattggtgcactaaaatgattgagtgaaggtgctcgatttgcaaacctaagcaaaatctggttttacccaaatccttcatctcaaattccgccttaaggtggtggcgggcttcatcaatatcttgtgtgttgccaatgatattcaaatcatctacatacactgatatgatgcaaaatcctgtggaggatcttttgatgaatatgcaggggcaatcatctttgttggagtaacctttctgcagaaggtactcactcagtcagttataccacattctgcctgactgtttgagaccatagagtgatcttttgagctttacacaatacatcttgcgatttgcgcttccattcggtatagagatcccatcggggaccttcatatatatgtccgaatctagtgacccatataagtatgttgtcacgacatccatcaattgcatagatagacgattttgaattgccagtgaaatcaaatatcggaacgaaattccactagtgactggagaatatgtttcattgaaatcaatgatgggtctctgcgtgaacccttgtgctacaagcctcgccttatatctcaccacctcattgttctcattccgtttccggatgaaaacccatttgaaacccacggggaaggttttggaggtgtaggtattacttgtgagaatacctctcttttattgagggaggctaactctgcttcaattgcttccttctatttgttcagtccgagtgtttctaccttggattttggatctggatcattttggatggtatctgcaactgatgatgcaaagtatatgccgacaattgtagtcctacggttgaatgattctccagattcaacatagtttacggaaatttcatgcaccccagttgacggctcagtatttcccaatatgaccgcattggggcgttccaatgtcccatcatcaaaaattgagtgcactgttgatgtgggaagtgaatctgatgaatccacttggtgtctctcaacttgaggttgagtttcatttactgtatcagaggattctatcctttgtttcctcgtgcgcattcgaggatttgccgtacttctcccactcttttgaggaagggagttgaatagttttatttggtacctctattcttttcggcacattccttgcgggaatgtatgattttgtgactcttttactcacagtaaattagtctcacagtaaatgagtctggcaaattgtttgcagctacctgcaaatcaatgatctgtggtacgaagatcctcctttagggtgtttaaggcatccatatttatttccgggcattcagtgtgatacttgaattctccccctaatgcctggaaaaatgatcttcattgaagataaaatcagcgtatcgggccgtgagtaaatccccagtaaggggctctaggtatttaataatcgacggggataaatatcccacgtagatccccattttcctgtgaggacccattgatgtacgtttgggtggtgagatcggtacgtatacaatgcaaccgaattttcgcagatgggaaatattaggaggatcaccacgaaccaattgcaacggggaagttgtatggtatacagttaggcgcaattgtattaagtgaccagcgtgtaagactgcgtgaccccaacatgaggttggataggttacaattttgcaataatggtctggtaatgagttttattctcttgataagagattcgactaaaccattctgtgtgtgaacatacggtatagaatgttggactttaattcctaaagccatacaataatcattgaaagctttggaagaaaattctgccgcattgtccaatctgattgatttttatctggtgttcaggttgatctgctctaagtctgatgactagtgcaattaattttgcaaaggcatggttccgtgccgataagagacacatgggactatcttgtggatgcgtctattagaaccatgaaatacctaaatggcccagacaatgattgaatggggccacaaaagtcttcttgaatgcattcaagaaactttaatggctcagcctttactttgagatatgagggtctcaaaattaatttcccagttgcacatgaggtgcacacaaaatccgaggattctgggaattttctatcactcataccatgtccatcattccaatgccgggatgattcccataataatctatataatgtgaaatttaaattcataagaataaaagcaaaatatagaagaacacacatgaatatgtgtgattgttatatgtataaataggggtagcaacatcatgtctattattataatggttactcatgcaaaattaaacatagaagttatatggcgcctaattaagctctctataaatgtcgttggaagaatattccacgagcatgtcgtcgatgtccaaagagccttcctcttcatttgctggagtcttggttttgctcggttcccctccttcaggaatggggtccatagctccagtctccagcacatgagaggcaaagtgtgcttcatgcttttggttggtctgtgtatgacccacagacttcatgtatagatcaacaagatgtttaggggtcctgcatttcttagcaatatgattatagcaactacacctgtagcaggcggttttgttgccactatcattatttggcttcgaattgccttttcccttttgagcgttcccacgttgctttttgccctttcctgaggaatttccagtctgtgtattcccattgggaacttgtttcttctcattcgcatttacttcaggcaatggtgcagtgcccaacgggcgctggttcgagttccatacagtgagctcatggttcttttctgcctgtttcaatgtctgaataagtgaagagtagacagtgaaattcttctcacggtattgttgagtgatgatccgttttgatgggagcattgtagacagagtcttctcaattttctccgcttcagaaggttcattcttacaaaaccggagtttagagcatatcttatgaacagcatggttgtattcgtctatagttttaaaatcctgtagacgcaagtgattccactcgtgcgatgcctcagggaagataatcgccatatgctgttcataacgatttttcagagatgtccgtaaaactcgtgggtcctcctctaacatgtattccattttcaaatctgggtggatatgattccttattattcttaaggcagagaattttgacatgttagagggggggacggttccatctgctgtatcgtctatacatctgtatagtccattggttgacagactcactttgagatccatcgcccaaatagggaaattggaaccatcgagagcgagtatatcgaactctttggttgccatcttacctacattgtgatagccaaaattttgagaaattatggcatggttggaaaaataaaaataaaatagggcgagaataaatttgcaaagtaattgtataataaaagacatggaaatgcttaaacacacccatatattaacaatatcagagaagtacaaagtgctgatggcaaatgtaaaactctaattatttgctaaaatttaaatgaccaaaaggtcaagtactataatgtaaatgcagaaaatataaatattattgggtgatgggccgaaaataatgagtattttggccctccaccactgtaggtccatggaggcgaggagggatggcgcaggggttggcggcccatcagtggatggcaaatgggccggcctggccgccgcctcaagccaccgccgtcgccgcccgcaacggaggccgcccctgccgccgctaatgtggggcacagccaccgccgtcgggggccggcgcggctgggcgcagtcgccgccgcggaggccgtctccgtcgagcaccggcgtggctagagcacggccgtcgccgccgacggctcgccgccgccattgacgctgtgcagctgtggctgccatctccgccgaggactccccccgacgccgtggacgttggtcccgccgccgcgggatgcagcaaacgccggtgacgcccgcaccggcgccaccctgcaccctccgccctcccggaccctttactcccctttgctcaggccttccccttcacccaagggtgggggatggctaggcttgccgccaccgcttgtcttggccggggcatgcccggcttgatgatgcgacgggggttggggagcgatggggccagtggcgaggcggagctctcgccgaagccccctgctgccatgtagaacggtggggctctgtggcatgcagcaagggttcctctgaggaggaactccggcgggttggccggtgtcagtgtgtgcagcagtgtctccggtgtctccggcatgcagtccggtgatgatggtggagagatgacgcggcggagatgatgggtccagccatgatgagggcagaaggccgtcaccacgtccggcatgtccagctgcggtcgcacccatgcggtccacccatgggacgcacagtggtgcggtgcctctaccagaattctttctggcgctgagcacatgtccggcgttgctggagaccctcgacgagtggcgagggtactggagtcggtgctgccggctccggagttcctttgggcagcctcttcctccatgtccggcaaagccaggaggaggagacggggggccacggccggcattgccagcacgacggcccctgccgcgtcgtgtacgacgcacgggagcccgaaggatcgtctcgagctgttgcaagagacgacgaaggtggcgtgcacggaggttgcggggaagggaggagtcggcagtgaggggaacaggacgagccattcttaccacgcacgtgccggtgagtcttttcactcttctctcttggtagagctgctaataacgtattagagaacaaagatgaacagtgaaaaacagtgaatcctccaagtcttattgatctcaaaatgtccccttttatagtgtggatttacatatgcacaagcctaggatactcctaggaattaaggagcctaggatactcctaggaattaagggtgatttaagccactaaatatgactgattatgtgtcaaaaattcaccatagtatggcggttacaagtcacttgattcctaccattgttgctctttgatgagcctttgatgagatcaaaaatgtctcatgatgcttttgtaacagaatcatcagttatctcgcagtttgacgtttgtactccaattaactgatcgatcaaaacttgtgattggtttcaaacataatggctgctccatttcggcagaccgccaggcccatatgactgagggttgtgcctaccttggttatagtgagcctgtcgtcagtgacgaaccgggaatgacaggacaagtactgaaggtcaacactcctgtatgagccacacacagcatatttcacagaaatagagatggcacacggctataataaccatggtcctgatgtctccaaagcctcacacatatgatctccacaatattatccatgtatatatatatatgaaactatacaaacatcgacacttagcaagttatggtgcctaaacggtttgatgaagatgcgatccgagagcagtgaaacgaaatcataagtaaaggttcaccaacaataagttgaggaacatagtgtttttcaggacactaggttggacaacggtgagctatatatatacaccgtaggatcctttcctacagtttttgttaaaaaaaaatcagctctcagtcgcattaattcagctctcatcaattcagctcagcagggactgaaatttttgtgggaagaaacggaaccactgacgatatattagggccttgtttagtttcctaactttttcttcaaacttctaacttttccatcacatcgaaacttttctactcacaccaacttccaactttgttcctcaaacttccaatttcaattaaactttcaatttggtgcggaactaaatacggcctaggtcgcatgcatgcatgtggagaagatctcttctttgtccttaagaaatagtactaccaccttggccaacttgacaatgtaagaagcccgaggccaacacctacttctaaataacttgacaaagaactagtacaagccgctggagataattaacaggctcaaactcaaccatgttggacagaagatagctataatcagctaagcgttcatggcggcataagatgagcaaacgagaataagcatctacattgtcttgattctaatggattcttctttcttatttgcatatagagactgaacaatgaacaattgtatttcacatactcattttttcaatcaatggaaaaacgtaaaaccagcccatataaaattcactgtcttcgaagagatcacatgggagggtgcttttcctttcttttaatggaaaagagagttttattaaatgaataaatatttacatattaacttaggattttttctgtcgaacactagacgaggaattccccccatcgaactgtgttacagaatcaagcacagctagcaagaccgttaccaactccactgcactctctgctagccaattcagtttttacttttcacttaatttcaatagccacattgtcgccttaatttcaaccaatagataagtttcataaatactgcttgtcctgtgccttctttaatctttggtaccaacaagctacagtgaatgagattgttggaatttgaagctatttcaggagtaattgcaaaaactatgaattttgtttcttctaaatcgatcaaaacatctcgtaaaattcaccaagacgataaaaggtacctgacatgattatcacgaaccaaaacaactatgcttccattcaccatgacgatgtcatacaggcataaccataaccatgatcccgatgtctccaaagcctaacacatattatctctagcatagtatgatgaatgtggaaaacctatatatcataactgaagaattaatatgaattctttacaattgtttcactaaaatcaaattgtgttttgattattattttgtgatgaacaataggcatatgaaataattgattttgatatttggtggataattgacgaagtgggattggtttggtccagtcatactgcacagtggtggtcgatcagattggcgtatgttgtgcggtcagattggccagtctgacagtatgaccggctgattctgtctcggtgttggttttaggttgtttctttggatactcgtaattatctcgtgattatgatttctagatgatttctatgcgtatataatactgttatgtgacaatgttgagtaaagttgggaaagaacttgtgctgggatatggtttcttgttgattaatgtgtaagtgtgtcttgatgatgcagtagcactgccggtgatggatcgggaatcaacttgggagaaaataatgtccgaacgattagaatatcatacgggatgcttaggctaaagaacaatgcacgtggttgatagagattccatgtgacatacgatgggagattgcgtgcatatagaaagtgcagtcaaatttggaagtagtccaagtttgggaatattagagtttaaattgaaaagatataagtttgtttcttgtacgggaaggtttcctagtgaactaggacttcttataaagattggattcatggctttaggcagcttacctcacatataaatagagaggaggttaagacctctcggtattgttttttctaagagttgagtttagagtaaagttaaggtttcgagtttagtcgaattttgtgataggagtgttattgttgcactttgtaaatatgaatagaagcagtaaagtttaatctattttcaagagattttcagtttgtatttgctcgagtttggcggtcagaccggcgaatcatcggcggtcagaccgatggcatagcttcggtcagaccagcgacttccaggcagttggaccggtagcgactacaggcgacgacaactaggcagacggtcagaccgaagtgactacaccggtcaaattagaggcgtctatgcggtcagaccggtgcaacaactccagtcagagagatctgcatcggtttcgagggtagcttttagttcagttacatgttttcggtttttggtgtttctaccatttaccctagtaggcttagttcttgttgttttgaaccgtgacagcaacaatcttttctgggaggctgaataaagtacaacaaacacagaacatggacgacgaggtgaaattcaactatcctgaaggtatctgcaagcacagcgtgaccgcggcgatggctggggaggccacagacggtgtcccatggagggcacatcgtgtagctgccaccatcgtcaacaaagaactcgattgatgtgaaccgatccactcctggtgcaatgagttttgtgtcctatcgaagctccaggtctcttaacaatacataggatgcggcttccacactggtgcagttgatttattcggaagcatggcgatcctgttgcctcccaaccccagtatggtgcatgcagccagtcagatcctacaaatgaatcatatcactgtcagtttatatttgaaagtcaaaacacgaaatacattttaggggctagttaaaattgtgttacactcagtaatacttgctaactactccgtatgtaagatgattttgtagtttccactaccattgttggccaaactgacatggcatggttattggtgctgcacgtgaggatgtatatgattgaaatgcacaattttcacatgtatcatttttcacggtatctaaagcgtggaatagagatatttgaaccatttcctcaggcctccgttactttaataaatggattctatatcaagctatagctattgcattaaacaataaaagaaactaatagaaatcaaaggaatgggacagcagtaaattgagaggaagattcttctagttttcttgttcttggaaacattcataattcgagagctacaaaaggagatccatcgtttgcaatgaaaactacataaaaagagctctagaaaatttaaaaatcagtctaggtgtctttaacacttgcaaaaaagaatcattattggttgaccattgacttaacatttaactagttgtatatatcactattggtttgatacaaaggatggcaatgtttcaagtacgttaagaatatagatgtaggacaatttatctagaattacttaaaagcctatttcctatatcatatttatatctcatgaaattcttgagccgaaagacggatgcgtatgctatgtttcatttgctaaacgatatcaattgaaattgaatggtgtattaactccataaatcatatatagcaataaatatataagcaaaatcttttattttagttagaagaaaagtttcttccatgattgatacctccttcttccatgcattcaccatcaggtggcatgtcttgcagatgtttctataagagaaaggcttccattattttgagaaatggatacaattcaaatatagatattgcatttgcactaaagaagaatataagttttcttgttcctgaaaatattctatctcctagtcgctttagagaattgaaaattgtcatgccttttgattcttctactagtacttggaagaaagttatggaataaaaaaaaacttagacaatttaaaaatcaagcaagtgtattaatacatatgcgaaaaaaccattgttaacccatgattgtttggaagatttaacttgtataaatcatatcagtttgatacaaataatggcaattgtttcagtatgttaatggtacagatgtatccacgatttattttaagagctacttaatagcctacttctaataccatatctctgtcctgtgaaattcttgagccaaaagatagattgcatatgctatgtttcatttgctaaacgatatcaattaaatagtgcatcaactccataaattagcaaaattcttttattttagctagaagaaaagtttcttctccgatttatacctccttgttcccctgcatccgtaaacaagcatgtcaaatgaggattagtgtacttgagttttgcataggtcttttccaagctccccttctcagcctcaacccataaagatctgaaatataaaaaaaagcccaagtgaatgctgggatttgtagcatggacatgtatgctaatatgatttaaaaagcagaatatatttttttttaacaaaaaacgagaggcaggaggcttggctcatatattagtaggaatagaacgtttaggacattgtaatcccttaaatacgaggaaacaaatcagatctaatgattaatttaaaacggggaacatgaactattgttataattgcaaataagttagatggattgcaaataagtctagtaatccacctgcgtggtctaatcaattgaaggttgacaaaatgcatactggtatacaggacatttgttaagccaactatggacaggtattgagcaattaaaaaaatttcagtttggcaaaaattcaggaagttgtttctttaagttatgaaagttggctttgtaatctgacagattgtggaaatgcgacgttctagaggcattatcatttaccataaaatttttatttgccagaattatactaagaatttggcctatgaaatactccaagaaccaatataaatggttgtggaattttttagatgatataaatggttgtggatgtatagcccgaccttaactaatctgatccattgcattgaaaagagtggacagttcatgcacatgtgtgcatactgtaaaaaaaaaaacataactcttaatagggtacatgagacctttaaagcaatagttaaaaatacaataacaggctgtatgacaaatacaataacaggctggagtaaaaatacaataatagggtacatgagaccttaaaaaaaaacataacttaccaccctagttgtatgacaagtacaataacaggctgaagaaaaatatcgtacaattcaaattagagaggatattataatcttaaaaggtaaaaccaactatgatatttcaaaattataattcccatattaatcacataatatatctgagatttataataaatttatggaacatatgaatagttttttacacataaactggctgtgtagtttaatatctagtgatagcatatgtgtcccttttttaatggaaggcaccagagaatcaatggcatgttttccttttataaattggtcctttccttctttttttttctctttccaaatactaacgtgtaaagtaatggtgtacagagacagaattgaccttcagattgtcaaatagcctttgaccctcaaaggaaatagtcaaataggaaaataataccatcatatcatataagataaatggttccaatgaattgtagttcacctcaaaatgctcagcatagaacagaacaaaaaggcttgtaaaaataaactagtttcttactttgattcaggaaaatagtactcatcatcttttgagtaatctactttccaatcaagaaacttccctggaagtggcttagcagcacttaagggtatcaatgaagatttgacctgcataagaggagcattaggcagtttgttcttgtatagacaagaacttacaacagcattaactgtttaaggggaaaaacccacacctctattgtcaggatatcagactgctgtccgaaaacgaaacaaaaggatgtaatgtcgtcgaaggggatgtcaaccttcctacacagcttgtccttggacatttggaatataactgactttttgtggtagaagaacttaacaaatatgtcgcattcatttgtccgagcgaactaaatgtgttcaaaaccatgaacagaatcatcatgatcagcacataacagcaaacattttatagaaaaccaagagtacattcaggcatatatacctttttgttgccaatgtgaagtgccaggacaggcaatcttgttggctttatctggctgtgccattcaagctgatcttgtgcagttttgagttggcactcagaagtaaagccttgaccccactgcggtataagtctgagtctcatgaagttaagaaaaggttcatttaacttcagttcaagatcttcagctcgcagctcatctttcttatcatgtgcatcctctaatatttctcctctctgcagagttgttaataaaaagtttaaaaggcttaatgcgagtcaataggctgtaatgctcatgggacatgccaaatgaaaatgattttgagggaaacaaaaacctcagttagatgcgtgtggttgctgccaccacctggaccagatatttccattctgagatttggctagggcctaaactttgcaattatagatctacctgcaagaatggtcttgattttagatagaataatgtaaaatttacacaagataatgaagagtagtatgcccatccctatgtagaacaaatatagcatttagttgggaaaacaatctgcatttgttcatatcattgcagaatctttgaaatgtatacaaaaaggcatgattactgagatttatactctgaaaatgacattttagcttataatgtaggaaaactgactccatacgacgctaaacatgttattgcgaagcaattgaatggtttcaggatccaagaactggttttacaatcatgcgcactactagtatgcaggcacctagttcagccagatgagagaatgtggctactattttttttataaaggaagcttttattaatctcagacgattacatcaagttgatagaaccatataccattacatctatttgtgcttagaattagttgcattgtaccatagaattgtaccttatttctcctgttctctggcctacatctgcacacgtaatttgctgtgctgatgtcaagttgtctaatgttcaaagttatgttcaggatgctcacatgccttcatgttggtgttggtacagcaacatggaaattccactggcagcagctcagttcgtaactgtgaattggctgtcgaacgatgactttttctcggatatggttttctagtagcaaatctaattcttctatatataagttgcactgcgggggcatgaattgttcaagtcactacatacattatgatacatatacgccccaaattgaacagattagcacaagtatacgccctaaactatctgaacagaatttcgcccaaaattcaggcgagatcccgtcgaaaaataccaaatgcgtcttaaaacttgtcaaactagagccgaaacggcaaataaccacagattagcaagtgcacgcagtacacgtcctaaattacttcaatctaagaaccaaccataattgcagcgtgcctggtaatgtctgggccagaagaatgtaaaagcgacactgatcaaatagaagtatatagaacccgggggtgaaaaacctaagcacggaaacacggatataattccgcccttgcggtgagtacttccctccagccgatgaaccaatcaaagggaaccacagagaaattcgtcttacctccccgtaggatcggagagtggctcggtccgcggcggcgaagatgaggaggaggagagcagcaggtgcggtgtggcttgccgttcccggccacggtgtggcgagtggcgacggggtggggggagggaacgaagcggctgcggacggcgggcgcagccggtggggatgggaagggccctagggcggcggaggcggtggcggtggcgcggcgtagcggaagaggagaggtgacgcgcgggacgacgggacgagacgagacgagggagacagttcgtttatggtgtcttcttctcagcccactcccgtgcccagtggacggaggaggaaaacgggagcttcacgtgtaccgcggcgcaggcaaagccggactccaccgtgtttcttccccttctttccagctaggcaaattttgctagacaatttgatgatttcgtggttttagccgtagtacaccgctcgaactcacttttagggaataacactacataaacatggtaatttaccaatggacactgcaccgattaccataataattttcggttgaagagtaaagagaaatcgcttgaaatataaaaaaaaaatcgttgggcccacgtgtcagctcttctatctctcttctcttctcttatctctctatcttctctcccagaagataacgcggctgctggcctcctcgatcgagggcgcgcgcggggaggaggcggcaggcgggagtggagggggcagggaggtggaaggcggcggcgggtgtgtcgacgaaggaggccacgacgaggaagcgtcgggcgagcagtggcgaggccaggtggttgtggtggcgaagcggcacggggcagcgtcggtcgtggggaggaggagggagacgaaggacatcgcgtcgcttcgcgaggcgttcgccgcgccggtggatggggaggtggaggacttggatgttgcggcagcgaggtgtgacttctacggggtgttcgacgggcatggctgctcgcacgtggcggacgcgtgcagggagcggatgcacgagctcgtcgcggaggagatgggcgcgggggcggcgccgcgcgagccggcgtcttggacaggcgccatggagcggagttttgccaggatggatgccgaggtgattgccggctgccgagccgagagcggcagctgccggtgcaaggggtggaagtgcgaccacatggggtccaccacggtggtggccatcgtggaggagagccacgtcatcgtcgccaactgcggggactccagcgtcatgctccgccgcgacggcgcgcccgtgccggaggtgacggtgaccgataggtcggacggcaatgagtgcctcatcctcgccagcgacggcctctaggacgtcatcagcaatgaggtctcgtgcgaggtggcaataggagagaagagaagagagataggagagctgacacgtgggccaagagtatttttgacatttcacgtgatttttctctcctcttcaataagaaattattattctaatcggcgcggtgtgcattggcaaattactacgttcatgaagtgtttcccccaaaagtgagtccgggcggtgtcctacagctaaaaccacgaaatcgaagtgtccagtagcaaaatttgccttccaactaacctcttttccgcaatcgaagtgtcctgtagtaaaatttgccttccaactaacctcttttccgcacacgcgcacgtttactgaactattaaaaaattatgttttaaagatttttttaaaaaaaattgcttcaaaaaattatattaagctataaagaacctgtgtttgttattttttctttattgttctcgtttctttctttagagttgtaggctggttttttttttttatagttgccatcatttcggagattccatagtgcagtttgagtttgtcgtggaagcttcagaagccctccttttctctgagcaaggcaagtcatgctctcctttagcatattgaatcctaatttgtgaaaagtattttaattgaaattattgtattcactttattaaatttaccgagttataattgttttacttatcatttcctatatttccttcactcctagaaaaatcattttcgccgatgttagggttttctttcgcaggcgggtactgttggtaattcataacgtcacagatagaatccgcaagcgcacggattaccgaagtagcacttcccctatggagtattccaagggtatcgaatccaagggaacgtgtgtgattatctcttcctccggttcatccaaggacacaaagctaatgttggcaaagggcagagagaatttcctaatgagaaacagtgtctagggaaagcttaagtttaatcctaacgcaatacttcaggcaccggcaacccgctgttcccagatgatgctctactacgtacccgggcagggaggacttaagtgctcttgagggctgtcaccacctctacacccacctcaaacgtactgtgggatacgcagcaaccactggagattaattacccagacaccgcgtctatgcaattaataactactctagtgccgatcaaacactaaagtagtcactataaataaatggactatagtgaacaatgatcccgtatgctaattaggaactaaccaagaagtaattctcactaatcaaaccttaattactcagaatgatatttctattaaagcagagtaataaataagatacaaaagtaggaggagattaccgacaactccgggattcctccgattccttctatcttactctctccctattctaatatacaataaagtacactagagcctcttgtaattcagctcatgctttggtgtgtgtgaatgagggagaggagaagggtatttatagtgtggaggtgacttgagagagtggagatcctccaagcatccaatgagcatcttcatcctcctagtgccatgtgtccagctgatgacggttattcaggtaaagtcggtaactgccggcctgtgaagtttggggccgaacgacgcagctaggggttcggccgaaccacttggttcggccaaaccctttctggcccgttttgctccgaattttctcatgggctttggtggataaccccttagcccaaatgtacatgcaattggcccatttgaatgtgtttcattaggtttgtgggtccaaagctccataggctggaaaatggatgtttaattcacctcctcctccatgtatcttttgtctcaactttggtggttcgtcacctgcatccaaatatgcaccaacactcgtggaaatggttagaaataaaccctaccactacattagatgttttacttttatggttttatgcaggtattgacggcgttattttggcacttaacagccgtcaacaaaaccccccagacttagctctttactcgtcctgagtaaaggttatgtattaatgtggaataaaatttcccaagatataatacaagtacacaaattattctaagccatacttgtacctgtgaacttttcaagtgtctaacttaccaccttgagcaattgatgaatggaacggtcgtgactcaagtcctccttaatcctcctgtcaatctcttgggggtttttatatatttttgcaaagtagctatacttctcaaatgaccttctctcatatcactcatgtgaatttatttgtggatcctcaccaaggcatgtttgccgaattgtccctattctaagaggttgtataggtggggctcggtagggatcaatcggggcatacatgcatcacatatattgcaaagccaaaataccagacccaaggagataccaagtcatactctctgatcaagaatgtgcatgtgtgtgatatgtgcatgggtatgtgtatgtgtatagcaagttttgtggatggaaaaaggaaaataaaagataacaactcctttgatatacctcctcctctaattttttctctttggagatttaagagagtgcatggctatctcttttctttttttttcaatcatggcccatactttgtatgagcaagatttgttttttcatttttttctctttttttttatcaatgctccatacttgtatgagcaatactttttttttccttcttttgcatagccatgcctctctctatctctgtttttttctttgaaagaatttttggaggaaaaggcataaatgacatggagtatttattttgtggataatgaataaaataaataatggatgagggatgctagcttccagtgtagaagtttagcatagtgtgtgtatgtggagtgtgcgtgcgatcttgatcatggaagtatgaaaagcatctcacacgggtcacaataatttgac

SEQ ID NO: 24159 - DNA, 1798 bp, Oryza sativa
cccacctacggccggaacccccgggacatgcaggcaggactgagcccctagcagcaggacaccggccctgtgccatgacatctcgactaccgggccgcagctcgtgtagccttcatttgccctggagaatgtccatcgacccccgacttcatccatctccatccgtgtacttttgtttataaccagactgagccacaaactaagccttacccactagacatgtgaaagtacggtagtgctttgcaacagaggcccgaagaccggtccttatatggccgaggtgctactatcaaaaccatgcaccccgagcccagcctaaaaccattttggggattttgaatagaaggagcggtgtgaagccaattccacaataaccaaaccattccaaagtgtccaggtgatatgaatatttcccaaagtctatagttgaaaaaccacctaatgttacctaattaaattgcgaagcatctacctaaaattaaactagtggtgccatgagtagagtgtccactagttgaggttttgtttattctagggtgaacaaggtaataataacaataacaataataaggtcataacaaaggtaaataggcatggctaaataaaacagtgataacgcgggaatttaaataaagcgataatgcaataatttaaatcaacataattttacaaactgggattcaatatgttcaaagatgatgtgacttgccttgctcgctttcccaaacgtcggcttcaacttccacgaagagcggatcttccgaagctgtagcgtctacacgaccaacggaaaagaaaaggcttttactctaataaactccatataacagcagaaacaaagcataaaaatgggttcttggcttcataaggaaaaattagagacttgaacggtccaattccgagttcaaatggccaagttatggccatttgaagtttatatgctctttaaatggatatttgcgaatttcttcatttaaattttaattaaaaatcggatttattgcgtcagccgagagaggggcgcgcggaccgggtccacgggagtggggcccacgcgtcagcctcatggtccacggtggaccgggcgcacgcggctgacgccggctggcgccgtgggtcccacgcgtcagccgtacccgcaggcgcgggcggctgacggccgggccccacctggcagccgcggggcgcgcccgaaggcggcctcgccggcacggccgacgggaggcggcgcgcccgcgcccctatggtcgccggcggcggccataggcacgcggagcggcggccgagagaggggagggaagggggaaacgaaatggcggtcctcggctcaccccgggtcgacggcgatgacgggaacggcgaccaaagcggagagaggcggcggcgcggctcgggtcgacgaggacggcggtgctccggcggttggcgggcgaaacggaggagtggacgaggtcgacgagaacgcggcgaagccgaaggaggcgatgccgaagcgggaggaggtacggggcgacgacggcggcgaaccggagctcggcgccgacggcggagagagaggacgacggcgcgagctcgaatccgacggggagagagtgcggcgagtggcggaaacggaggagagaggcacggggagcgtttaaatagcgtcgggagtgagagagggcggccggaggggaaggaatcggccgcggaaatctcgggctccatcaatggcgccggcgaggtttgcgggagcaaatccgaacgaatccgagggagagagagaggggaaagagggggaaaagagggagggaatcac

SEQ ID NO: 24160 - DNA, 2128 bp, Oryza sativa
caagccttatttgacttttaaatttgcacattttaattgttggaggctttcacatgaattttaattattctcggcataattttgaggatgtattttagagtcgttttgggacgcgacaaacctaccccccttaaacggaatctcgaccccgagattcggaagaactggcgaagagatcgggatgggctgccttcagctcgtcttcacactcccaagtagcttcttcttcggcatggttgctccactggaccttgcaaaaacggattacccggttcctggtcctgcgctccatggtgtccaggattttcactggcctctccacgtatgtcaaatcttcgcgaacttcaatttgctctgagtcggcctgctcggatggcactcgaagacatttcttgagttgcgacacatgaaacacatcatgcacgttgcccaaggaggcgggcagctccaactggtaagcgacttctccacgccgagcattgatacggaaaggacccacataccgaggtgcgagcttcccctttgtctgaaacctgtgtacacctcgcaatggcgtgacccgaagatacacaaagtcatccactgcgaattccaggtcatggcgtcggttatctgcataacttttctgccgggactgtgccacctttagattatcccgaatgattctgactttagcttcagcttctctcaggatatcagtcccgaacacttggctttctccaacttggtcccacaatagtggtgtccggcatttgcgcccgtacaacgcttcataaggtgccatttgtatgctggcttgataactgttattgtaggagaactcggcataggggagactcttatcccaggtcttcccaaaatctagtacacatgcgcggagcatatcttctaggatctgatttagacgctcggtctgtccatctgtctgcgggtgataggcggtgctgaaatttaatcgggtacccagctcttcttggagcttcttccaaaagtgagaggtgaattggcttcccctatcagatacgattttcttgggaacgccatggagactcacgatcctagcgaagtagagctcggctagcttgttccctccataggtggtcttcacaggaataaatcgagctaccttggttaatcgacccacaactacccatatagaatcatatccaccttgggtttttggaagtccggtgatgaaatccatcccaatttcatcccatttccattctggtacttggagaggttggagaagtccggccggtcgttggtgctctgccttgacacgctggcacacatcacatagggccacaaactctgcaatttcccgcttcatgctaacccaccagtatttctccttcaagtctaagtacatctttgtactgcccgggtgaatggaataagggctctcgtgagcttcctgaagtatcagctgtttaagttctctgttatctggaacgcatacccgctttccgttccatagggttccgtgttcatcctctgtgaaaccagcggctttaccctgtttcatattcttgaggagtccatgcatgtccggatcattcttctgagcctcgcggatttgatcgagcaaggtaggcttggcttctaacgcagccaagaatccgcgaccaactatgcttaggttcagggcttccatctgttgattaagttcgggtggaatgccacggacgttaagagtgttgcaatggctctttcgacttagagcgtcggcaaccacgttggccttaccaggatgatagtgaattcccacatcatagtccttgatgagttctaaccatctcctttgccgaagattcagatccgactgggtgaagatgtatttcaaactcttatgatcggtatatatttcacagcgattcccaatgagatagtgccgccagatttttagagcatgaaccaccgcggctaactccaagtcatgtgtagggtagttgccttcatgaggtcgtagctgacgtgaggcataggctaccacatgaccgtcctgcatgaacacgcaccccaatccttggcgcgaagcgtcacaatacaccatgaaatccttgcgagtatccggcaagattaacaccggcgaggaaacagcttttccttgagggtttgcaacgcc

SEQ ID NO: 24161 - DNA, 15642 bp, Oryza sativa
aattcctgcagccccttctcaattattatttgtgctctgaaaattccactaaaatttatttacgcattttaggcttttaggaaatatacaaaaatcctccaagccttatttgacttttaaatttgcacattttaatttttggaggctttcacatgaattttaattattctcggcataattttgaggatgtattttagagtcgttttgggacgcgacaccggccgcacggcgagacgatgctcaatcacctccctagggaccccgggcatgtccgccggtctccaggcgaagacgttggcgtttgcccgcaggaaggagacgagcgcgtcttcctatttgttgtccagaagaccaccgattcgtgtggtcttggacgggccgtcgcccagggcaacctccttgactgggacctcgtcgcacgtgaccatccgctgccttggggcggccgggacggaggtgctgagcctctcgtcgccacccgcgggcttggacgccgcggcgagatggtccgcgcgctgctccatacaagcaagcgcgactttgaggtcgccatggtcggtgatggggccaccgggtcccggcatcttcatctgaagataggcgtagtggaccgccgacatgaacttcaccaacgcgggcctccccaggaccgcgttgtagggcagactgaggtccgccacatcgaagtccacccgctccgtgcggaagttggcggaatcaccgatggtgaccgggaggtcgatatgacccagcggccaggtgtgccccggcgtcacaccgatgatcggctgggacggccggagcaccatccctggggccttgatggcgtcaaaggctgcgggggaaaggatgttgagggctgcacccccgtctatgaggacacgccccaacttcacattgcaaatggtgggggaaaccaccatcgcgatctgtcctccccgggcaacgcacggcgggtggtcggtctgtgtcgcgaccgagaaaattgccttttcccgaacgctagtgtattaatccccgtctcaggaaaagccggggtacaccacacaaacatgatataaaagacacatctttattatatcgatagtatttacattattacagaggcgcttcaggcctggcgatcaaaaataaatagcagcggactagcgggcctacggctccatcttcacaggcgctcaactggggtataagccaggactccacctaagacttcttctccaaagcttctcttactgaaggggggagaaagatagagcaagaatgagtacaaccacagtactcagcaagccacaccggcggatgcacgattaatgcaagggggtacaaggggataataataggggttaagttttgcagtaaacagcatttaaaagtcacttagttgcccaaagccattttaaaaagacgatcctagagctacacagtattgttaatcaaggtcgtgaacccgcacgaacctgccttaacccaaggcctacgatgattcagaccgaactggcaacccgaccctgggtcccagctcgtcccaagccaacccaggccaaccattccacattttagttgttgagcaaattttaagaattaaaacactaacttgggtacattgctcggcttgcccataaccgagggcgcggctattcgaatagattatactctgatcagaggtgtacatctttacccacaagacacgtcttcctcacgtgtaaccacgtgccacataccaccacggtatacggacggaagacgtgacatagttcccaacccatcctagccatagacaagagtactgacccaaccccacctacggccggaacctccgggacaggtaggcaggattgagcccctagcagcaggacaccagccctgtgccatgacatctcgactaccgggccgcaactcgtgtagccttcatttgtcctagagatgtccatcgacccccgacttcgtccatctccatccgtgtacttttgtttataaccagactgagccacaaactaagccttacccactagacatgtggaagtacggtaatgctttgcaacagaggcccgaagaccggtccttatatggccgaggtgctactatcaaaaccatgcaccccgagcccagcctaaaaccattttggggattttgaatagagggggccgtgtgaatccaattccacaataaacaaacaattccaaagtgtccaggtgatatgaatatcccaaagtctagagctgtaaaatcacctaatgttacctagttaatcagcgaagcatctacctaaattcatactagtggaaccatgaatagagtacccactagctggggttttgtttattctagggtgaacaaggtaataataacaatagcaataataataaggtcataacaaaggtaaataggcatggctaaataaaacagtgctaaagcaggaatttaaataaagcgataatgcattaatttaaatcaaaataattttataaactgggattcaatatgctcaaggatgatatgacttgccttgctcagagagaacggccttccgaaccttcggcgacgaccacgaaccacgcttcgggaacctccggaacgacagaagctacgcgaagcacacaagcaaagctacaagcctataaagaagcaataacaatacataaagagaaaacacagggttctttaggttataacaaacattaggagacttgaacgggtcgattcagagttcgtatgaccaagatatgatcatccgaagtttaatgctgttatatggagatttgcggattattataattaggctttgcaaccataaaacatgtgtaagcgctagcctggaaaagacaggaaggctgcgccgttgacatgcggaccccacatgtcaacctaaaggaccgcggtagaccgggtacacagagacggtccacgggtcgacggaagcggactccgtgtgtcaaccgaggcgagtagccgacaaacggactccactagacaccacacgggctgcacacgtggaaaccacgcggctaccgagcggacacactaacacagtcaccacacgcacaagcgaacgactaccgacaccggtacacgggtaccggggtcgacaaccgcacaacgggtacggggcgacaccgaaaggacgaggacggggcagcgagaggacggatccttaccaccacgcgacgaggcgtgggaacgacaacgacgaacgggcgcggcggagacagacgggcacaacggagacgaacggcgaggggacggcttcggcggcgatccttggacgaaggcgagacgtggccggcacaaggcttgacgacgcggagccgaggacgaagacgacgacggggctgcagcggctcgcttgacgaacgcggacgacggacgagaacggctcgacggagggacgaacgccacgacgaccgggaacgacgagaggacgacgacgacgacgaccggggccggcgaggaagcgacgagggcagccggcagtggctgcacggagacggggacgacgtggaacacgccgctgcgatgacgatgacggaggcggcgccgcgagacgacgagccgggcgaccgacgggacgtcgacgacgagaacgaacggagacaacgacgatggaccgcggaggggttcggtcgaaggggaggcgaggccaagggcgaccttgccgctgcgatgccggaggtggtggtgccgcggctgactggtaaacaagcgaggaggaacgggcggccggaggactccggcgaggcgggtggaggggttggtggcgacacggcggtgttccggcgaaaccgaggtgtggccggggaaggagacgttgccacggcgtcgacgaaggagatggcgacgtcggccgacgctccgacgagggacagcagccggctggagggagtacagtggcaccaatgccactggttgccggcgggaacgcgtctccggtggtctccgcatgaaacggaggcgacgccggtggaggggaagcagctgcgacgctgctggcggcgacggcgcgaccggacgacgctccggcgaggagggagaggcggctggaggcggccggcggcacgggagagagaggacgacggcggggagaggcggggcggccacgagagagcgcgggagggggctaaaactggagaacgtaccgaggtggttccattttataagatgggggagggagccgggcacgggagagggcggaacggcgacgggaaacacggccggcggccatggaaggcggccgggaaagacgcgtccattcccgacgattgggggcgccattcaagggggaaattgggcgggattgaagaggaatcaatggggattaaaaccccctaaccaattttggaattggccaattgaatcaagcggatttggaggagagagcgagctagggttcgcacgggagagagagaagccgggcggaaggaaggagacgaccgggtgagtgggacccaccggtcgggcgcgcggcgtcagcgcgcgtgcggcgcgcgtgcgcacgcgggagggggagcggctcgggaggctgggtggggcggcttgggccgggcggcggcccaggcgggaggaggcgggagaaggtgggccgggaaagagaggagggaggggcagcccgggagagagaggggaggggaggaggcccaagaggaggagggagagaaggagagggagagaaagagagggaggagagggagactttgggctgggcttggcccaaaggaggaagaggatttatttttaggtttttctttttaataaactctaataattgtttttgttgcttaataattatttccggtactctgaaaattcaagtaaaatttgagggctccttttagaccaaggagaatttaacaaaaattctccgggccacattcgaatttttcttgtacgtattttagtgtttgccaatttcttttcgaattttaattaattctattattccttttagcgaatgatttttaattcgggatgaatttatcaggacgtgacagtctggtcgaaggtgagggcaacctccgaccaccgcgcccgccgcatcgcctcatgggtaggggccgcggccagaagctcgcgcttcatggccttgaggctccggcgagaagcgtgagcgcacgctcccccatcgacggtggcgacggtggcctcaggctcctggaaccccaggtcctcgtcgccatcgtcgatgtcctcggcggtggccttctgcttggcctcacctcgccggttgccggcgggagccgccggggccttgccctcacggcgctcctgcctcttctcctcctcccacttcctcgtccgttcagccaaacttttgaccgcgcggcagtccgcgaggtcgtggagggaggtgttgtgcacggtacaccacttgccggtcgggcgctccctgctaggagcgccggcctccttctttttgtcgctcgcaggcctccctttcggggggcccgcgaagcgccctcgacggcgaggacatgaccctcgtcgtcggaacgggccgaccccttcttcctcctcctgtcccgccgccctgaccgagcggcggacccgggggcggccggagctgccacaccagaaccgaaggagttccaggtccaggcctcctccttgcgagccacacggtccgcgagctcaaaaagctgcgcggtggtctggggctccttggaggcgatcttctcgagcatgcggttgtgccgcacgccccccctgaacacgtagatgtcacaccccgaagttttcctcccaagccaaaaattgaatttacaaatgaccccaagaaaatgcaggtgaaatcaggaaaaaaaccctaataaagtaatgcaaataataatcggattggacatgtggaatttttcttgagttctacatgtcaaaattcattaacaggatttttagtggaattttcagagctctagaaataattttaaccaattaaaattgagcaagcaatattgttaattccagggaaaatcctttttctttttctttttctttttcctctctttttcctccttcttgtcaaatgggccgtcggcccatttcccttttcctccccctcctctttgttgggccggccgcaggccgaggcccagcccggcagccggccgcccgcctccctcctctctcggggtcgccgacaggtggggcccacctgtcgggcccgtctcccacctcccgccgatcccggcgcgccgccgcgcccgcaaccgccgccgcgcccacgtctccgccttccccgggccacgtcgaccacgcccgcgcgtgcgccgcatcccccgcgcccgttcccctctctctcccgctcgcgcccgcgcccgagatggccgggattcgaaaaccgaatcccgcctctctctcctccccactcccccacgtcggccggcgaatcccgcctcttccggccacgtccggtcctctctccccctatttaagcatcgccggcaccccctctcgctttttccccatttcgccgacccctcccgagctcccaatcgtcctcgcgccgtgcaaccacccgccgccgccgtttttgctacttcggccgccgctagccgccgctaggctcgccgccgtcttgcgccgtcgccgccgttagattcgcggggtcgagatctacctcggccgccccttccccgttgaggttcgccgccggagacccatccccgtcgtgcgccagtgagtgacgccatggccgccgccttcggccggcgctctcgctctctcgcgctcttccctctccctctaatccctctccttttgttcattaggaggttccggagctcgtcccgccgtcgccatcgtcctccgtcgccgccgtcgtcgaccgttgtcggtgaggccctcctcctcgttttctctctctcccgcaccgtttagccgccgcgtcgccgcctagctgcgtagccgccgctcctcctctagccgccgctctccgccgccggtcggtcgccgtcggccgtcgccttgcgccgctgccgcatgcgcaccgccgccgcgtgagcgctgcgccgccggcgccatggtcgccggttcggcttgcgccgtgcccgcgcgcccggccgcgagctcccaccgccgtccgatctacccttgggtagatcggggccgtcggttcggccgccacgtggcgccgccgccccttccatctcccgtgccgctgacagtgggcccgcgggccgacgcctcctctctcctccccgtgccgctgaccggtgggtcccgcatgtcggcgccgcactcccctgtgctgacgtcagccctggttaatattgcgcaataaatgatttaaggtttttcttttatagtaataaacacagtgaatcttctaaaaatcataactaattcatccgagctccgtttaatcccattcaagtctcagtaaatcaagaaaaatgtgtagaatccattaaaaatggttttgttctctgtttcagtagtcttatagcctgtttgcaatgtttgctttgtatgtcgctagattccggttctttcgacgctccggtgtacttcgagatagtcgccgaggttcctccagcagcagagcaaggcaagtcatgcttgtcacttgatcatattgatcctatattgcaaatgctctattgttttctttcaaatgttgcattgttttataatattactatgggatggttacctattgttacagccatgtttttggatatcatgctcctttgttagcttggggttataacatgattagagtttggactaggaattgcttagccatgcttagttcaactagttcacaatggggaaaatcatattaatgtttagactgttggttctaatgataatgttggattagtaccaccgctctggtgttggttaattaaaatgaatcacatggtgggctgtgggtgcatggttttgctggtcgcacccatggcagttaaggaccggttcgcgggatgccctggaagaacttatcgtacttaccacaagccagcgtgggcaacggctgggcttgtagtgtagctttcctctagccgacgcatccaggcaagggtgggcgtgatggagtttggatgggccctgcgacggcctatgcggcttccggattcacctaggcacgagaggggactgcccgctgccttgcgaggagtgggggtgaaacctgaggtgtggtgtgcttggttagagggggttatgcgaagggtcctgtcacggcctctttccggtatgtcgtggtggcatgtcggcgcacggaaacgtgtcgtggggctgtgtcttgtgggtacagttgtacacctctgatcagagtaaaactattcgaatagccgtgcccgcggttatgggcggtcaaccagattcaccgtgattagtctcaccctagtgtaatcttttgaatgtggatagtttaggtggatggttgggcctgtcgcaacgtgggttagcgttggacggcggatgtttaatactgcttaattattacaaccgttttcgcattcaattcctgtttttaaatgccaatatttatgcaaatgaaccactttagctcttctttgttaattccctgcatcatacccctattccggtatgacttgctgagtacagtgggtagtactcagtcttgctctacttttcccaaccccagaggacgggtatgtgtcagatgaaggtttccccgaggagtaggcttcgtccgtgccgtcgaggatgcctgtggagtggtgttcccgctgcagtttagtcaaggcttagctccagtttcttttgttttccgctgcatttctgtaagacttttatgatgtttgtaagacgtggatctgaatgtcaacattgtcgtttgtgtaccccggctggtcctggacggggattttaatgcacattctgcttggaattctattcgggaatttctgggcgtgacaagttggtatcagagccgaccttgaccgtaggacaagccaaatggaaaaacctaagagccctctgaatccttttcattgcatatgttctttgcaattggatttgttccggaaaatggggatctgttcttgtggttcgagggaaaaatcttggtcgctcgtttaagcggggtttttcaaaacaagtcagtctagggttttagtaaaattattgggatttattcgtcagtcagttggggtttgatgggtgaaatgcattaggtcctagctctataacatgggttgcaaggtgtttatgcttcgtttgttattattaatatgtatctaatttctcattattttatcgttatgtgagtctgtcttatttattcgctctcatgcaaaatgatctatgcacgaaaatttcgcttttattcgtttcccttatttgagtcttttattgctttatttaaatttggatttgagcatgcattgatcctactcctttgtcttctctagatggccggtcacccacccaaccaccgcggagaaggcatgatcgacttcgtggcagagctggcacgcatgacactggtggtgggctatcccaacgcgccagagtacacgaccatcccaccgctcagtggcgagcttcctcaccgtgtccgcttggaggtccatggctacgtggggacttgcctcgctaacatggcggtcgaggcatctggaggcacagtagatcacgcctgtcaggaggcggcctacttgatgatggccaggttatgggagcgccacgactacatcttccacgacacggcgtaccgctaccaccctcgtcgagcccatggtgatggcgtcagctccttccgtccgacagctggcgagaacgacaccacctttggtcacatgtgtgctgtgatgaggggattggataggatgcactcggacctgcacaaggcgaccaaggccttgaacgatgggaagctcatgaggatcgtcgctctgaaggacgagatagcgcgcctgaagaaggagaatgctcagttgaagggtcttccagcgccaggaggagtccggatccgcactacgccccgtaagaggacgactgcacctgtgcgcatccagcttgcgcccaggaacccacctccagcagcagctcccgcagcacctccagttccgcccgcagttcctgcagctccagctccagctcccgcgttcactctctccttcgctccagcatcagccgccagaggtccagccagtggtaccggaggttggttgtctgctactcccagtggcagcggcgagactgatctgtcaggctccaggagtcgctcagagggaccgggtgacgagcaggaggacgccttcgactccaccgaccgcaggagccgttccgagcattaggctcgttttcccattagtttatcgattgtctagcttctgtttgttagtttgtgtgtttaggttgcttgtttggggtcagtcgacggtcgatatcatgtgcctatgatatggctgtcttaataaggatttttgcttgctcttttgagtgttttaattcagatcagaacaattgcagttttaattcctttgtaataaagcttagttcttgagcatctgtttttctccttttcccccgtctgcttttccctccagatggtctacaccaggactggcaaccgcacgacaggcgagggcagcaacggcgaagaacgcgccgatggtgtgcaccccaacagtgattctggcaatggtccgccaccacttcccgagaatccgacgcttgcccaagttatggcacatcagactcagatgatggcagccatgatgcagcagatgcagcagcagcaccagcaaatgcaccaaaggatgatgcagcacgccgaacagcagcatcaacagtttggtccccctccccctcagtccaagttgccagaatttctacgcgtcaggccacccaccttctccagcaccaccaaccctatggaggcgaacgactggctccatgcaatagagaagaagctgaatctcctgcagtgcaatgatcaggagaaggtcgctttcgccacacaccagcttcagggtcccgcgtcagcttggtgggacaaccacatggccacccgcccaccgggtactgaagtcacatgggcagagttctgccgtagcttcaggaaggcacaggtgccagatggggtcgtggcacaaaagaagagggaatttcgtgcactccatcagggcaaccggactgtgacagagtacctccacgagttcaatcgcctcgcgcgatatgcaccagaggatgtccgcaccgacgccgagaagcaggagaagttcatggcgggtttggatgacgagttgaccaaccaactgatatccggggactacgctgactttgaaaggctggttgacaaggcaatccgtcaggaggatcagcgcaacaaaatggacaggaaaagaaaggcggcgcagttccggtccaaccaaggtagtcagcaccgaccgcgcttcactcccggacagcagggtggacctaccaccatgatcgtccgtcagcaccgcccgttcaactccagcaacttccaccagggcactagtggcagtcagaaccaccagggaggccagcccaaccgcggtgcagctccacgcccaccaatggcaccggcacagtcaggccagcccgcgcaagccaagaaggagacgggagcaaaaccagggtcctgcttcaactgtggcgagcttggccacttcgctgacaaatgcccgaagcccaggcgtgccgggccaaggtttatccaggctcgtgtcaaccacgcgtctgcggaggaggcacaagcagcaccagaggtcgtactgggtacgttccctgttaactcaatccctgcaacagtactttttgattctggtgcaacgcattctttcatttcaaagaaatttgtggggaagtatgggttaaggaaagaagagcttagcacaccaatgagggttcataccccgggaaatagttcaacctcagtcagttttagcccttcagtgctaatagaaatccaaagatcaccatttctagccaacctcattcttctcgaatccaaagacctagatgtcattcttgggatggattggctgaccaagtttaagggggtcattgattgtgcgaatcgcacagtcaccttgaccaacgagaagggagaaaccgtagtgtacaaatcaccagactcaccaaagcaaggagtctccttgaatcaaattgaaacggaaatcccagtggacaccgtggagaagaacttgagaaaattggaagatatacccatagtctgcgagtatccggaagtgttccccgaagacctcactaccatgccacccaagagagagattgaattccggattgacttggcaccgggaaccgctccaatttacaagagaccatacaggatggcggccaacgaattagcagaggtcaagaagcaagttgatgagcagctgcagaaagggtacgtacgaccgagcacttcgccttggggcgctccggtcatatttgtggagaaaaaggataagacgaagaggatgtgcgtcgattatcgcgcacttaacgaggtcacaatcaagaataaatatcctttaccgcgaatcgacgatttatttgatcaactgaaaggagctaaagtgttctctaagatagacctgcgatcaggctaccaccagttgagaattcgggaagaggatattccgaagacggccttcaccactcggtacgggctatatgagtgcacggttatgtctttcagacttaccaacgcacccgcattcttcatgaatctgatgaacaaagtgttcatggaatttctggacaagtttgttgtggtgtttatcgacgacattcttatctattcaaagtccggagaagaacatgaacaacatctccgtctggtactcgaaaagttgaaggagcaccagctatacgccaagttcagcaagtgtgacttctggttgacggaagtcaaatttctgggtcatgtcattacagctcagggtgtggcagttgatccgtcgaacgtggagtcagttaccaaatggaccccacctaagaccgtgtcgcagattcgaagttttctaggactggcgggttattaccgccgattcatcgaaaatttctccagaatcgcccgacccatgactcagttgcttaagaaggatgagaagtttaaatggacagctgagtgcgataagagctttgaggagctcaagaagaaattagtatccgcaccagttttgattctgcccgacccgactaaggacttccaagtctattgtgatgcatcccgtcacggacttggatgtgtcctaatgcaggaaggcagagtggttgcgtatgcctcgcggcagttgcgtccacacgaaggaaattatcccactcatgacttggaattggcagcagtggttcatgctttgaagatctggaggcactatctgattggaaaccgctgcgaagtatatacggaccataagagtctgaaatacatcttcacccaaccggatctaaaccttcggcaacgaagatggttggaactaatcaaagactatgacatgagtattcactaccacccgggtaaagccaatgtggtggcagacgcattaagccggaaaagttactgcactgccctatgcatcgagggcatgtgtgaggaattgcggcaggagtttgagcatctcaacgtgggaattgttgaacacgggttcgtagccgctctggaggcacggcctacgctcgtggatcaagttagagccgctcaagtaaatgatccggaaatagcagagctgaaaaagaacatgagagtcggaaaggctcgggacttctttgaggatgagcatggcacaatctggatgggagaaagattgtgtgtacctgacgacaaggaattgaaggatctgatactcaccgaggctcatcagacccagtactccattcatccaggcagcaccaaaatgtatcaagacctcaaagaaaagttttggtgggtcagcatgaggagagaaatagctgaattcgtcgcactctgcgatgtttgccaacgagtgaaggcagagcaccaaagacccgcaggtttactccaacctcttcaaatcccggaatggaaatgggaggagattggaatggactttataacgggactgccccggacatcatcgggacatgattcaatctgggtagtcgtggatcgactcaccaaggtggctcactttataccagtacataccacctatacgggaaagagattggcagaattgtatctcgcaaggatcatgtgtttgcatggggtacccaagaagatagtatccgaccgaggtagtcagttcacctcaaagttttggcagaaactgcaggaagaattggggacccgtttaaatttcagcacggcctatcacccgcaaactgatggtcagaccgagcgagtcaatcaaatcttggaagatatgttgagagcttgcgctcttgattttggtggagcttgggacaaaagcttgccatatgcggaattctcgtacaacaacagctaccaggccagtctacagatggcaccgtttgaagctttatacggccggaagtgccgcacacctctcttctgggatcagacaggcgaacgtcaactgttcggaacagaagtattagcggaagcagaagagaaagtcagaaccatcagggaaaggttgaggattgctcagtctcgacagaagagctacgcggataaccgccgaagggagctcacttttgaggccggagattacgtgtatcttcgtgtcactccgctccggggagtacaccgttttcagacgaaaggcaagttggcaccacgcttcgtgggaccatacaaaattttggaacgaagaggagaagttgcttatcagctagaacttccatccaacatgatcggcatccatgacgtgttccatgtgtcccaattaaagaagtgcttaagggtacctgaagaacaggctgattcggagcacattgatatccaagaggacctaacatatgtggagaagccggttcgtatacttgatactagcgaaaggagaaccagaaataaggtcaccaggttttgccgtgttcagtggagtcatcattcagaagaggaagcaacctgggaaagggaagatgagttgaaggccgcccatccgcacctcttcaccagctcctccgaatctcggggccgagattccgtttaaggggggtaggtttgtcacaccccgaagttttcctcccaagccaaaaattgaatttacaaatgaccccaagaaaatgcaggtgaaatcaggaaaaaaaccctaataaagtaatgcaaataataatcggattggacatgtggaatttttcttgagttctacatgtcaaaattcattaacaggatttttagtggaattttcagagctctagaaataattttaaccaattaaaattgagcaagcaatattgttaattccagggaaaatcctttttctttttctttttctttttcctctctttttcctccttcttgtcaaatgggccgtcggcccatttcccttttcctccccctcctctttgttgggccggccgcaggccgaggcccagcccggcagccggccgcccgcctccctcctctctcggggtcgccgacaggtggggcccacctgtcgggcccgtctcccacctcccgccgatcccggcgcgccgccgcgcccgcaaccgccgccgcgcccacgtctccgccttccccgggccacgtcgaccacgcccgcgcgtgcgccg

SEQ ID NO: 24162 - DNA, 2310 bp, Oryza sativa
gcggtcaaccagattcaccgtgattagtctcaccctagtgtaatcttttgaatgtggatagtttaggtggatggttgggcctgtcgcaacgtgggttagcgttggacggcggatgtttaatactgcttaattattacaaccgttttcgcattcaattcctgtttttaaatgccaatatttatgcaaatgaaccactttagctcttctttgttaattccctgcatcatacccctattccggtatgacttgctgagtacagtgggtagtactcagtcttgctctacttttctgtcacgcccagaaatttagcccaaatttccagactattttgtgtattaaatccctgtccaggaccagccagggtacacaaaacgacaagtaatatacagttccaaacgtaaataaagcgtaaaatacttacagaaaaggcacttagtcctcacaccgaaacaaaaacagcagcagcggaaaaaggcgatcctagcggggcttctgctccactccacaggcaaaactcaactggggtctgagccttggtcctctaacttcgtcttcagctcagaagcactacacttctgaaaagggggaataatagcaagactgagtacaaccaccgtactcagcaagccacaccaacgatgcagacgtgcaaggggaacacaaggacggtttgtggctatttgcataaaggcggttgtaaaacattttattgagcaaaacagtaaaactgttgagtaattaaagtaacattaaatctccactgatcaacgctacaccacgttgaacaggcccaaccaacccacctgaactacagtgcattgggtcgatttattaagatgggactaatcacggtgaatctggttgaccgcccataaccgcgggcgcggctattcgaatagttttactctgatcagaggtgtacaactgtacccacaagacacagccccacgacacgtttccgtgcgccgacatgccaccacgacataccggaaagaggccgtgacaggacccttcgcataaccccctctagccaagcacaccacacctcaggtttcacccccgttcccagcgggcaacgggcagtcccctctcgtgcctaggtgaatccggaagcgacagaggccgtcgcagggcccgccccgctccatcacgcccacccttgcctggatgcgtcgactagaggaaagatacactacaagtccagccgttgcccacgctggcttgtggtaagtacgataagttcttccagggcatcccgcgaaccggtccttaactgccatgggtgcgactagcaaaaccatgcacccacagcccaccattcagttgcattttagttggataattacgaccatgaagcatggccaggtgtctcgagcacgcagctcactctgatactaaaaaggtctaatattgtaattatcccatcaactgagctagtagtaattaagcatggctaagcatatagttctagctaggtcacataagtaacatgagctagtcgatttattacccaatgttgacaaaggatagatatcaagtaaacatggcacaagcgagcagataggtaaaccctgatcccgtgtaattagcaaaacatgcatatttatttgcaaacagtaaaacatttataaattaggatcaaaatgctcaaggggaatgtgtgacttgccttgcttcttcactttgatcttccgaactcttttcctcgcgaccgcggacttccgaaacgacggaaactacacgctggcacgcaaaacgagaaaaaactctaataaaaaccaaggaaacagtacataaaaactaaacaaacatgtagagctcaattttagatgaattttgcaagttgaatggctcaattcggagttcgaatgaattagatatgaattttagaagttttgagccatttaaatgaatttctataattattatcgaattattgcgcaattattaattatttttacaaaggaaaaggatctcgctgacgtcagcaaggggcagccggcgccgacacgcgggccccacacgtcagcggcactaagaaagggagagggggcggctggcaggcgggccccaccggcagcggctcaagggcgccggtccaccgtggaccgagaccaccgaggcggtccaccgtcggtccacgggaaccgacggcccggatcggcccaaagccgatcggacggccacgaggcggcgcggccgagaccgacccggccggccatggcacggcggctacgcgcacgcggccagacgaccaccggcgacggcagcgcgtcgcggtggcgggcatggggagcggcggatggggaa

SEQ ID NO: 24163 - DNA, 3302 bp, Oryza sativa
acgggaggcgacgggaacggcgttcgacgacgcccgaccacggtggagccgcggccgagggccggcaagacctagggaaaatattggagcggttagggagagaaataggcgaccggagcggtgaggagcggtggtttgagacgacaacggcggtagcggagctcgggtcgacggcggaaaggtggttgcggcgatgaaatggggaaacagagcagaggccgaggtagagcttggcacagcgttgccgacgacgcaaacgacgaggtgcggcgacgactaacgcggcagcagcggccggctgaagacggcggcggcggggaagagaggtggtgcacgaggcggcggtgttccagaggcggagaggggaaatggagtagaggccgggctgcggcacggcgccgcgaagccgacagtggtggcggattggcgcggcggtgggtggagcggcggaatcggccggccggagctcgccggaaagcggtggtgcacgggagcacggtggggaggtgtctagggagcgcggggtgctcggggagaggggaaaacggatgaagggaggcacgtgagtcgtttatataggtcccggagggggagaacgtggccgggagaggcggatttgaagggggaagaggcgccggcgatgtgggcgagtggggtggttcggcgccggttttggagggggaaagtgggggaggagagcggggtcgtgggcggcgaggtcccacggacaaacgcgcgcgcgcggggtggaggaggtgggcggaaacggcggcgacgtgggcggttttcggcggccatggcggcaacggcagctgccggcctgaggttggggatgaccccgacaggtggggccgcgggtcccacctgtcggccaaagaggagagggaggccggctggggaggcaaagtagacttcggggaggagagggccgagcggcgagctgggccgagggagagagagggcccgagagggggaggaatttgggccgagcccgaaagcaaggaaggggaaaaatattttcttttctttttattttaattggttaaatgaactttgtgactttaaaactatttctcgagctccgaaaattcacggaaaattccggagagtattttagggcacaaagaatattgcaaaatattcccggccaatgatttttaagggaaaattttaattctcccaataattcacttgattaaattgcttaactttttatttaatttctagaaaatgcattatttaatgatttttaatcccgaacgaaaatcggggcgttacaaatctaccccccttacaggaatctcgtcccgagattctgggatggctagaaagaaagctggtgtaggctgtcggtttgactgatctgacgggtctgcacactgcactgcccctttctatcttgaactgactgattgactgattgatccaacctgcaccattgaaatggctggattcgacctttctattcctttgctttgccaaaactaggccggctagttctgcttgaactgacccagaccagaactgtggctgctcacgaaacttacttatcttgatctgaactgttgatactggcagtttgataacctgacgattcaccaagctggctagagaagggtgaagttgttcctaagacttgcatctggcatttgtaactcattaatcctacgtccgcttgaacgggtcctggctcgaatgacacgtaattccaggaaacctgcttgacctgtcttttgtctgaactgcaaccgtccctgatgctgcttctcaaagctgagctattgacctggcctcaccggtgtacctcagaattcaatcagataacttgagattggtgtaactctgctgacaccttgcaactggcttcttcaagtactacccggattgttgcactgggttgaaccttcaactaaaacagcgacgaagtgagccaaaactcatctccgagacctaccccccttacagggagtagtcttactttctcctgactaggaacaattggactattgtccttgaaaaataaccaacacttctcttgcttacaaaggccctcactttgaaaactgaaacttcaccgattcatcaaaatagagtaatgacggcgcactttcatcccagcaagatttggaacttaatcctcagttgctgatgggagattccacataaaagtgactctcatttagctcatgaacacactgactcttgactaactttcccataagttctaactactggcatgactgtcctgcttctatcttgacttcggtgtcgagttgcaaaaactgaactaaccgactctgcattggaactgacacaactcgaggagttggggtgtcgctaacaaagctcttgatgtgatgacgctgacgccttactgtggaacaaccctctgagaggtgccctgtcgtacatcttccatggatagttggacactttgcaaaaactgctcttgaaaaccataaccactgtaggtagcatttgttgcctctgggattggtggtgacttagctgtgctggtctgctgaagacttggtggcgtactgtctgaggttgcaggtgcttcctctttgaaaacaaactggctttggctccgatcctgattccggcttgcatctgagtttgtacttgttgttggagacattgtcgttgcatctgccgctttggactctgcggttgctatatcaatatctggcacatccatcttccaatcttggttaaccagagcgaggtgctctgtcttagctggtagcttgttgtcttgaactgatccactgactctgactgcaacacactactgctggagttatttccgctacatttgactaggtatcgaacctgcttctcccacatcgaatacacccatctcctgatcttggacaccaaaagttgatcatgagcagggttcatctggcattggggcaccttgcagctttcaactaaaccattgatccgtggctttagtacaccgtcgttgctcttctctctaacactgaccatctgctgccagaacggaagagaggtggaagagaggggttgctaaagataaggtactaaaccacttgtctactgatctgttgtgagtagatttttatggtttaagttgcttaagcaaacaacctagtatggtcgcatccccaccaatgatgcaaaccatacccctacacacaagcaaacaacacacgatctagaaagctaacggaactactcttctgggaaagattgggtttaggtcatctccgagaaaacttcacttgatcttcgcagaacgacgactctgaactgatcttctcgctccttgcacg

SEQ ID NO: 24164 - DNA, 1061 bp, Oryza sativa
ggttgtataaaaagaaaaaccctaaaagtcttctttccccccctcccttcttgggccggctcggcccaactccctccctctctctcgtctcccccgcggcccatcggccttcccccgcgcgcgcgccgctgacgggcgggcccgcccgccaccctcgctgacgggtggggcccacccgtcatcccctaccttccgccgctcccgccgcccgcccgtgccctagcgccgccgccgccgccgaatccgccgcatcccgccgtccccgcgcgccataaagagggggaaatcactccccgtgattccctccctcttttcccccacttttccctctctctctccctcggattcgttcggatttactcccgcgaacttcgccggcgcatcaatggagcccgagatcgccgcgccgatttccttcccctccggccgccctctctcactcccaaccctatttaaacgctccccgtgcctccctcctccgtttccgccactcgccgctttctctccccgtcggaatcgagcccgcgccgtcgtcctctctctccgccgtcgctgccgagctccggttcgccgccgtcgtcgccccggacctcctcccgcttcggcatcgcctccttcggcttcgccgcgttctcgtcgacctcgtccactcctccgtttcgcccgccgaccgccggagcaccgccgtcctcgtcgacccgagccgcgccgccgcctctctctgcttcggtcgccgttcccgtcgtcgccgtcgacccggggtgagccgaggaccgccatttcgtttcccccttccctcccctctctcggccgccgctccgccgtgcctatggccgccgccggcgaccataggggcgcgggcgcgccgcctcccgtcggccgtgccggcgaggccgccttcgggcgcgccccgcggctgccaggtggggcccggccgtcagccgcccgcgccctcgggtgcggctgacgcgtgggacccacggcgccggccggtgcaagccgcgtgcacccggtccaccgtggaccgtgaggctgccgcgtgggccccactcccggggacc

SEQ ID NO: 24165 - DNA, 6099 bp, Oryza sativa
cctgtgtcgcgccctatcttccgctgtttcccgtttgtctttgtgtgtgctgggccttcgctgcccatgtaataagttaactatttacgcttccgcttgttaaactctgaattgtatcaacttttggtgtaccttgcctcctgggacaaggattaatgcacgcacgtcaggaacgcccgttgggttatttccggtcgtgacagccgggcgcaaggccggtccggcagaaagtgcggcggcaggccccggaacgtcaagccttcatccgcgaggaggtggcgcaacttctggaggccgtattcatccgtgaggtcatccatccggagtggctggcgaacccggtcgtcgttcctaaggcgaacggcaagcttcggatgtgcatcgactacaccgaccttaacaaggcatgtcctaaggacccttaccccctgccatgcatagatcagattgtcgactccaccgcggggtgcgaccttttgtgttttctagatgcatactctggttatcatcagattcgcatggctagggaggatgaggaaaaaactgcattcattacccccataggaacttattgttatacaacaatgcctttcgggttaaagaatgcaggccctacttttcaacatactactcgaatttatttgggtagccagataggacgcaatgttgaggcctatgttgatgacttggttgtgaagacgcgcaaccaagagaccttactctcggatctagcggaaactttcgaaagtctccgctccgcccgcataaagctgaaccccgataagtgcgtgttcggcgtgcctgcgggcaagcttcttgggttcttggtctctgcccgaggcatcgaggccaaccccgagaagatacgagctatagagcggatgcgcccccccagcaagcttagggatgtgcagtgcatcaccggctgcatggccgccctaagtcgattcatatcgaggctgggagagaaggcactacccctatttaagctcctcaaacgctccgggccgtttacctggacggaggaggctgagcgggccttcactcagttgaaggcgtacctcagttctcccctggtcctggtcgccccggagccagatgagccgttgctactctacctagcggcaaccccgcaggtggtcagcgcggcgttggtcgtggagcgcgacgaggacaaccctcactccgcacatccccaccctgtgtcgactcgacccgggagagagcagggaggagaggcccccaagccgaacggcggcccaaggcccccgacggccggagctggccctccgcctgcttgtccgacggtgccaggcgcccccgacccccaggatggccccggggccactgcgggaaggccgcgcctgtcgccctctgaccccgaggtcatcagcacagaagccgagtgcgccccgcgtggcctctcggacgaagagcgccctggagatgcggcccctagcgaagaggatcggccccgccgaaaggtgcagcggcccgtctacttcgttagcgaggccctccgggacgccaagacccgataccctcaggcccagaagatgctttacgctattctgatggcttcgaggaagttgcgccattatttccaggcgcatcgggtcacggtggttacgacttaccccctcggccaaatcttgcataaccgagagggtactggacgggtggtgagatgggcaatcgaactctctgaattcgatttgcgctttgaaccacgccacgcgatcaagagcgaggccctcgccgactttgtggcggagtgaaccccagctcccgagcccgtctccgcccccgaggccacctcgggcccctcgcagctgcctcacaccgcctactgggtgatgcagttcgacggctccctgtctcttcagggcgtcggtgcgggggtcacgttgacctcgccgagcggagacgtcctcagatacctggtccgcctcgactttcgggcgaccaacaatatggcggagtacgagggactccttgcgggactcagagtggcagctgaactggggatccgccgcctcctggtgttaggcgactcccagttggtcattaaccaggtctgtaaggagtaccagtgctctgacccgcagatggacgcttacgtgcgccaggtgcggcgtacggagcgccatttcgacgggatagagcttcggcacgtgcccagacgggataacgcggtcgccgacgaactctcaaggctcgcttcctcgcgagcccagaccccaccgagcgcctttgaagaaaggcttgcccagccgtcggcgcgacccgaccccctaggggagacggacgcgcctgaatggcccccgaggcccgtcggagtccaggcctcaggacccgaggggagcgctcccagctcccctagattgattgcttggatcactgagatccaggcgtacctcgcagataagactctacctgaggatcgcgaagggagtgaacgcgtccggcgcatctccaagcgctacgtgctggtggaagggaccctctatcggcgcgcggctaacggagtcctcctgaagtgcattcctcgggaacaaggcgtcgagcttctcgccgatgtccatgaaggcgagtgcggagcccactccgcctcacgcaccttggttggcaaggcctttcgctagggtttctattggccgacggctctcaacgatgcggtcgacctggtccgacggtgcagggcgtgccagttccacgccaggcaaacccattagccggcccaggccctgcagaccatacctctttcgtggccgtttgctgtctgggggctcgatatcctgggtccgttcaggcgggccccgggcgggttcgagtatttgtatgtcgctgtcgacaagttcactaagtggcccgaggcttatccggtcatcaagatcgataagcactccgcgcttaaattcatgaggggcatcactgctcggtttggggtgcctaaccgtatcattacggataacggcacccagttcaccagtgagctcttcggtgactactgcgaagacatgggcatcaagctctgcttcgcctcccccgcccaccccagaagcaatggccaagtggagcgcgccaacgcggcaatcctcaagagcctcaaaaccaagaccttcaacatcctcaagaagcacggggactcgtggatcgaggagctgccagcggtgctctgggcgaaccgaaccacgccaagccgagcaaccggggaaacccctttcttcctcgtctacggcgcggaggcggtcctcccatctgagcacaccctgaggtcccctcgggtcactatgtattgtgaggctgatcaagatcagcttcgccgagacgaccttgactatttggaagagcgaagacggcgcgcggccctccgagccgcgcgctaccagcagagcctgcggcgctaccatcagcgccacgtccgggcccgatcactctgcgtcgacgacctcgtcctatgccgcgtccaaacgcgtgctggactgagcaagctctcaccaatgtgggagggtccgtatcgagtgatcggcgtcccccggccgggctccgttcggctggccacgggcgacggcacagagctgcctaacccgtggaacatcgaacaccttcgtcacttctacccctagtgggggtcgggtgtcatttcttgggctcgggccaaccccgcacccccccgggcgtgcagggttggccgggggctaccacatgcatatacttaccttttttctcttccgtatttcaataaaagcattttcgatttcctgaggactgtgtctgtgccatcgtttccttttgaagaatcttggcttgaattagcacactcgttcccgaccctgccctcggtggcccgggccggctaaaatcgccaaacggggcccagaaccgagccgtgccccggggcgtagtgaactccgggggggaatcggcaaaggcccacaatcgggtcatccataaccctcggtcaccgcgctcccggcctggccagtctcgacacgtggatcttcccaggcactagccccgacccgcgccgtttgaggctgggacctgggcacgagcccttgttcaagccaagacacagaaggaccgcggcacaggccatcctcgtctcatacacacaacaaacagaactgacgcagaaatttcttctttacttgattgcagaataaatcagtctatacaagaagggggcccgaaggcctcggaagaagaaggaaaagttattaagattggtgggggcctgggggctcactccgacgcgcccgggtcgccggcctcgtcgtcgctgtcgtccgcactgtcgtcaccgccctcctcgtcggagtcgagcgcgaacgcgagctgaggggccgtaccctcgaagctgtggacgatgtggtcggcggcgtcccggacctgcgcgcgcgcgccgtcctcggttccgggagggaactcttccagcgctgcccacggggagaagtcagggtccctggcctggtaacttgccagtacgagctccaccgccccccgggcgaggtctctcgaggatgacttgatcgtctcctcgagctcctcagggagccgcttgagggtcccggccatctctgagaggcgctgggcgaggcccccctggttggcggcgtacttcgcgtaccgcccgccccagaggcccgcctgccgcccggcgcagtctagacgggagacggcgtcccgaagcatgccgggccctacctcgctcgccaatcggagggcctcgacctccccggcggacgagtccagcgcgcccggcagctcggcgatggtgtgttcagcggctgcgaggcgggcggctaggtcgccgtcgcccgcggccgccccgccgctgtgcgctctcgcgtccagctccttcgcccgcgcctcgagctctgcggcccgctgatccagtgcggccctctcggcgcgggcgccttccagattgcggcgcgcctgctcctcccgcgctgcctcgcggaggaacaggctgtccgccagccgctgcgccgtagcctcggcctcctcgagagctcgcccccgctcggtgagctcgtcctcgcggaggcggagtgcggactcctcttcggcgcaggcggcctcgtgcgccgccagtgttgcttaccgggtggcgacagcggcctcgcggtccgccaggtctctctccttcgcgtccagggcgcgggcgcgctcctccagctccgtggcgcgagcctcaagggcctcttcgcgctgccgggacgccgcctcgttctccgccgcccgccgttcccgggcagcggcggcgtcgaggactccccgggcggcgatgagggcactctcccgctcctcctccacctccctggcgatctccgccaggtccctacgacgggcctcgagttgtgaggcgtgccggcggtgtgccttgcggcccgcctccaccatggcctccaccgagcgccgcccctcctcgacgcgcgcccacgccgcgtcgagctccgcccgctccgcctgcagggcctccatctgggcgcttcacccgtccagcaccgtgctgttcgcggcggccaaggcctgcaggaggggctccgcgctcagtggggcagcggaaggcagaggggagagccgcctcggtgtgggtgctgcgcggctcggcccgccgatcgacgtgccggactcgggggcgtcccccgaagctggctcgtcccaagcgtcgcccgaggggtcgggctcgagcggcgcgcccgcggcctcgtcgtgggtggcctcggaagtcgttgtcgcctcgggcggagtcgggtcgggggcttggcaggccgcctggcgtgcgcgcgccgcctctgcctcccggatggactccccggcccggcggagtctggcctcctcccgagcgacctcctcagcctggcgaacccggacggcctcctgggcagcctcctcggcttcccggaggcggtccgcggcttctcgcgggtcagcttcctgcctccgggcctccgcggtcgccgtctcctcggccacagaccggccggacttggaatggcgggggggggggggggggggcgacgggatctagctaaggcagaagaaaaaccagaagacaaaaagaaacgggtaagtgaaaactcgcct

SEQ ID NO: 24166 - DNA, 1052 bp, Oryza sativa
gtacggtgaaaaaccaccggaacagccggagagatgggcgcaccccgataaacatctcgcacaggtgcgcgaagatggccaacgtcattatcgcgttgggggtaaggtgcgccatctggagatcataaaactccagaatatccatgaaaaaaatagagaatggcgggaccagccccgccattgcaaaagagaggaagaagacggaccgccccgggtagtctggcgccgggcatcccttgcccagcgcgaccacctcccggccggtggcagattccggcatgaatcggcgcggcagcccggcctgcctctcgctcacgatgcaggaaggcggcagcacgctaccatcgagcagtgcggagccccgtgccatgacgccggcggaggaggagcttgagagcgagcgagtgcggcaagggtagggcacaggaaacgaagagttagagcgcaagtggcgaaggcaaggggaagagtggcgagaggaaggaaacgaatcccttcctcggcgtctttacacccttgccaacgctatgcccggctcctcgcttcccgcgcgcactacctcgccccctcgtttctcgcgcccacgcctccactaaccccactcgcccgtctgcggcgcacgcggcagatgtgcggccgtggcggttgagatggggcagatcgtgcgcgcattaactacgctcgccaaccgcggaaagcgccatcatcatgtctccaggcgaaacgaaccggctcgtcccgattcgcgcgctactcgaataatgtagcggtcttaaagaggccgctcattattgtcagtcggttttcccttgccgatgcgcgcgatttgcgaccgctgggtttctgcccgcctgtagggaccggccccacctgtcaccgggcctaaggagtggcgtcacgcccgagtgcttccctcgaggggcgcgatcgccctggcgtaatgccgggggctactgtcggtgacatggggccgggggtatcgtgactagaggcttgggtagccgcggtcacccacgtggcctgaccccctcgggggggggggggcgggcccg

SEQ ID NO: 24167 - DNA, 1934 bp, Oryza sativa
gagagcttcctggctctcgtccctagctggagccggcgtgctgactcctggagttggtatgtcagtcccggtcagattcattccaggcttcagcgcaagtatggcaaggaagtcgctggccattaaatgaaggttgaaatgggcgtccacgggaaaagcgggcgagcggggcaggaggcgtgtgctctgcttgtcagaagtcatttccggctgtagactagccctcattgtaaaaagcatgtttcctttcttaggcagcgagaggcccatgtggtgacccctgaccagataaaaaggaggcccaggcctagagggaggaaaaaagaagaggagggaaaaaggagcaggaaggggggttgtgggactctggcgaacgggttctagagcctgaactctctctcgctctccggctctctgtattccttcagacacagatccaccagaacacaggagtagggtgttacgcatctcagcggcccgaacctgtctacgtcgcccgtgtcttgtgcgcttcctctctcgctgacgttcctcagatcgagggcgaagaacctcacttagcgcccccggccgaaccggcaaaggggggcctgcgcggtctcccggtgaggagccccacgctccgtcagagctgaagctattgctagaccattattccactgctgtttttttttcttttataagtatgtaacgttattattatgatggatttgtatattaaattgtcagtttgtgtacctcggctgattcctggacgaggattttatgcacaaataagttcggaaattactagtgaatttccgggcgtgacagattatgtggtacagatttctggggattcagttatggctaaagggaatttggatttttgaatagaagggattgaaatggtttcttagcacaagagaaattattctggaaatattattcttgtgccagaaagaatcaaaccttgggtatcaaactggcggtttgatttatagatagaagaatttggataatggaatatctagaggaatttgtggaaggtgttgtatgaaagagaacaaggatttctaaagataggtctagatcaagggtttgatccagaataaatttcagcaaaaaggaaattatactggtttagccccaaggataaaatggttaatggaatataacaaagagtcgggtcaatcagggaattattggcccaagctaaatagtagactttgaaatcttgagtggataatttagatgaacgagattttaaagggaaatatttgtgggagtatagaactggattcagaagtatatatggatgggaatttctacagatggaattggtggtagattgataaactctaagggatgggtatgttaacttaaagggggattgaagagtatattttatggactctgggaatattgagatgaaaaggaaaggtattaactctgaggaaattggaaattgtctatgtactctagggaggttagagaatgacatttcatatactctggagatagttgagtgaagatcaaaaggaaagtattggttctggagaaaataagaattgatatttcgtgtgtttgggtagagatcaaaggggaagtattttgtggaagataaaactggatttggtggtagtggtaatctctaaatgaaaaggtattaactctagagagattgatatctcatatgctctagagatggttgaacggcaattgaaagggtatttgttggaggtgttcgggaatggattcaaaggaaatataattttgagtcaaagttaaagattaaagaaaataaataaataggtttttataaaattaaaaagggatttaaaagagagcttttaatttagtaaataaaatctagatccaagttaaagaaaaggttaaaagcaagattattccaatggaagaatcgaaagagcataacttaaaatatttcgcaa

SEQ ID NO: 24168 - DNA, 7082 bp, Oryza sativa
aaatcgactgcaaattgatatgcaagtttctatgcgggcctatcaaatgcagggttagccatctcatccggctacttatgggcaataatgtggcttaatttgtcgagacaaataatgtgtatttaatcagtgtgcaaattgatatgtaagtttttctataaatgtagggtcaggcgtctcatctgtactcggtagtttgattttggagtgtattttttacattttggactttttcaaacttattttacaaatatacccttaaaaatgtcatatttcgaaaatggatcattttcgcaacgccaacatcattgacgccgtttctcttgacttatcttcgctggagagactagagggacaacactaatgtttagtaccgtcatgttagaccatggtatcaatgacattgacgacatgaaaatgatttatttttagaataagctttttgaaaaatttatttgtaaaataagttttcacagtagaccaaaaagtgaaaaatcgagatattttggagtggtcatcatcactccctcgtcgctgtcgttgttgtcatcgttctttaatttcctgtcctttcacgaccatgtcagagaagataagaatacaatacatgcatatccagttactgatatgtacttggttcgattttggagtggtcatcatcactccattgccgctgtatttgttgtcatcgttttcttcgtgtcctttcatgatcatgtaaaaaagataagacttcctttgttaagggcttgtttagtctaaaaacttttcccaaaaacatcccatcaaatctttagacacatatataaaaccttaaatatagattaaaagaaaaaaataattacacaataattatatgtaaattgcgagacgaatcttttgagcctaattaggccatccatgattacccataaagtgctgcagtaatccacatgtgctaatgacggattaattaggctcaaaagattcgtttcgcggtttccagacgagttataaaattagtttttttcattcgtatctgaaaaccccttctgatatccggtcaaacatctgatgtgacatccaaaaatttttatttcaccgagtcctaaaatgtaccccttcatagtatcctactatgtacttcctctgtcaaaaaatcagtgtcaacttcatcatcggcccagtttctcgagggatatatagccattataggacatattgtatagtcaaaactgcattattggtgatatgtgacgcatgacgcatggctacatatcactaataatttagctcagtttgacaagacggatatcgcgtatttaaatcgagtgtaacttgatatgcaattctagctatgcaggcctctcaaatgtttgccaagaagtagtaaagattaatttactatcagaatactcttacaatattagagtacacggccatagaaaacggccacatcaaccaatgtacccatgccatcgctgccgctatcagctctacatataggattctccccctctttctggtggagaaatgatctttgctaggtcgatccaaaaccataatagtctcgattccaaaaaaaaccgggattaaaaatgatctttagtcccggttaaagatcctactaaaaatgtcagatgtatgtcgggggccgaggatctttagtcctggttggtgtcacgccaactgggactaaagatcaccactttagtcttggttggtaataccaaccgggactaaagatcatctagactctcggttggtattaccaaccagaactaaaattaaacgcgtaatatataatccctatcacttatcctctcctctacaatcgcaactcacacagatcaactctctccccctcttccctttcctcctcctctcctctcctacagtctatcctctcttcctcatcccctctcctccacctcctgcccttcctcctctcctccccctcctccccttcccatccggcgggccggcggccgtggcgagcagtggcagcggctttgtttgtctttttttatataatctgtgattcactaagatgtttaaatttgtgattcaatgcatggatctgagatgtataatctgtaatgtatttgatttgtgtgtaattttttaggatttgtgatgtatttgatttttgtgtataagtaactttaagatttatgatgtagatttgggatgttacattgatttggggatttagggtttgatttgatttggggatttggggtatgatttagggatatgcatgccacttgattcgggagaaaataaaaaaagaaaaaaaagaaaaggggatcatctggtactgccgctattctttctttactctcggttgataacatcaaccgggactaaagatccctctctttagtccggttggtccatctttagtcttggattcctattccggttggaaaaccgagactaaaagggttactaaccgggagtaaaaatagtttccacctatatataaagtaaaatatatgactgattcaatatgtcatctgaggtccaacgtgtaacgatcgatcgaatcgccatcgtagcacccactgtggcgagaaatttgtatttagacccctcgtgctatataatatgccttcaagtcaacttccaaacactcccagaccttttgagaaaaaaaattcaaaaatatacttttttttcattggttttatataaatatacaggtttagaaagaaattatagaaatctaatcgtcacgaaagaaagttcaaaatcgcgtgttgccgcacgacttgcgcgagaccgctcagtctcgcgcgcgtctcctgtgtgcaagaccggacttcgcttccctaacctttgattaataaattaattaattagtgtcattagcatttaattaattaatagtaatattttttaataaacatcattagtaattaattaatcggtaattgtctgttaattatccactaatcatgatgccagttgccaggccatctcgcgagcggatgaagcgagaccgtgactggacctacggtatcgcggcaggatttggcgagaccgcggcacggcgtcacgccattgtaattttcgctgaatggatatcgttttgatttcgtactccgacaacggtatatttgttataaaaaatttagggtaattgtgttcttgttcttgctttacagttgaattgtgattttacccctactttttagggtttatgattttgtcctatctttttgaaatgaaggagtggagtgcccctattatgttaaaatttgctaacggtgttacatgggcgacacaacgacgagtatacctcttgtgcaaatatgtgttcacttgtgtatttacccgttttgagttcagctttgaacggaactttacaaatgtttcgaagtgaactttgctatacttggaatttataaaaagtttgactatatttcagcaatagcttaacaaatatcacaaaatttcaacaggattccaacatgatttcagcaatgattagacaagatttcatttcacaaaatttcaacatactttgaaaaaagagatctcactgaatttcaacacaatgttagctagcatcacaaagtccagcagcaccacctgtggtcgtccctgagctccccttcgcgccggaccacactggcctgcggtcgccgccgcgcctcccttcgtgccggccagtggtcgctgccgccacgctggcccgcggtcgccgtctcgcctcctgcgcaccggccagcactccttgccgccgcacaggcccgcggtcgccgcctcgcctcctgcacgtcggccagcggtcaccgccgccgcgctggaccgccgtcgccgtctcgcctcctgcgcaccggccagaggtcttcgccgcctcgcctcctgcgcgtcggcctgcggtcgccgccgccgcgctagcccgcggtcgccgtctcgcctccaacgtgctcgccagtggtcgccgccgctgccaccggttgaatggtcatgttgctgcgccatcgccaccactcgctaggccatgctggatggggaaatacacagcttcaacccgatacacacagctgcttagtgatttactactcaccatgggtataacagtcattgagaaattgcaatatcattttttattttcttttccctttgtttaactcaaaaattccgggcccacctaactcccgtcaaaaccaggggcaaaaggctgctcatttcgaaaaagcaggggcaaaagcacaaaccctaaaaaataggggtaaaatcacaattagatcgcaaagcaagaacaagaacgcaatagctccaaaaaatttacatctccgatatttatgagaaaagaaggccttgtttaattccaaactttttttttcaaacttccaacttttccatcacatcaaaactttcctacacaaataaacttccaacttttccatcacatcgttccaatttcaaccaaacttccaattttagcgtgaactaaacacacccgaagtaaatgaatagaatatttgtagatttactttcatcttttgatgcatgacttgagctataaatttttcagacgttgagaaatgcatatgtgttgattagggatgataggagttgatttttttaggaagtagcagttaattttgagggcataacttcgcaaatagaccaagtgtaaaattcttattaccgtggactgtcacttgagctgcgtcatttaaactttagatcttgagttatacattgaagcaagagatgggtgaaaaggacagtattcatccgagcttaagcaccaacaatgtattttacccatataattgttgggaattgataggctagtgcgaagtggatgaaggatagtgattctaggtaaatcgagactaagaagggttgaaaggactgatactaaagatacatactaagccaaaataatatgtgagatgttgcattcgaactcaaaatctttcaccttagccctcacgcacattaccatctcacctactacacacatctaacttgaatatagatgtttttcttttaaactaactctgaagatatctttactaccatttggtaacatcaaccggttttagaaatatctttagtacgggttgttgttttcaaccgatacaaaaaatgcatctttaatgctggatagtaattaacatcaaccaaactaaagatcatccaacattagtctcggttggtactaccaaccggtactaaagatatattttttattggttgataacaccaaccgagattagagatgtttatagcgatttggacttttagaaacggtactaccggtacttaatctagttgaaatatttatgttttggggctttggataaaaactcgtttgtcaagtagtgactatagtcttctaaaggggtatacatacaaaacaacgtacatattatagtcaacgcataaccacacgcacctgctgagtacacaccaaactggaatttcatatgtacaaaattaaaagaaaggagagaatatggtacttagagtatcacttctgtcttagtctcgtcataaatgtcatcggttgtaactttctgacgtcggaagaaaaggttagtgtctatactagttactaccatattcgtctcataatataagggtttttagcgttggatacggttattaagaaagttggtagaattaaacgagagaatgttgtgattgaatgggatgtgaaggtagatggaaaaattaaatagtggagggttgtgattggttgggaagagaatactagagaagaaattgttatattttggaaaaattttgaaggctaaaagttattatattttggaagggagggagtacctcggtttcatattataatacactttcatttttccctaaataaaatttctataaatttaatcttttttcacgaacgcgtaaaataattgcacgtcaatatattaaacgaatctataaaattaatcaagtttatagtgaaatctaacaactcttaaaacatcaaattagatccattaaatctaatattaaatatattttgatagcatgtttgtttgctgttgaaaatattatcatgtttttctgtaaacttaatcaaaattatataaatttgacttagaaaaaaagttaaagctcttacgaaatgaagggtgtacatgtttgggctttggacaactacatctgtatataagtttgccctcaaatctgagtttaagtgcaccaccttgtggccctccagcgcgcgcatatatatatatatataccagcctttcccacatagatcatccaaccaatagctaaccacgaaagtgcaagtgagactaaccttgtacctgtagtgagtactggtgatgatggctgcgagtaacggagaggaacctcctagcacatccatggcaacaagttcttctccattgcccatggtcgctcaactgatggtcaccacagaccgtgctgtaagccagcagctgaaggatctagtgaataaggaaaactccactaccatggtggcggcgttgtccttaagtagagaggcttatgaggtggcgatggcgttgaagaacggggaggagcatcggcaagggagatgcagcggcaagggagatgcagcggcaatgttgatgatgatggcgtccaaaaaagaagacgccgcaaagccttccactgcgtccatgaaccccctgttgctatcactagcatcgcagggtcgtctaaatgattatggtagtattctttccttacagagattaagatttactaaacggtgtgtttcatatgaaatatatatatatatatatatatatatatatattgctttaaaatattaaatatatctatttgttaagttttcaataattaaaacttaattaatcgtgtgttaatatattctgaacatggaagcaatatatagctgctgctcgagcatttcctaatgatctccaacgggactcttcgggtaatggatctaataataactaggcgattcccatgctctgaggaattttatactttatagttcttgagaaagtatcttgagatatctaaattttatgttcttgagaaagtatcttgagatatctaaattttatgaaaaattttttagtaccttagtagctagtacctataggtac

SEQ ID NO: 24169 - DNA, 9471 bp, Oryza sativa
ataaaaaactaaataatttcccatgctttgatatggaatatatggatgaatcactagaacggtaaccaccatctcaatcaggcggcaacccccatctcagtcggacatggcgtccgtcacagcctagaaatcacagatgtgaaaagttatctcaatcggacaaacggctgtcactaatgaagctatctcaatcaggcctcaattaaagcccgtcactgatagccttgaaccagacgaccagtcaaactatagcccatcacggctgacctatctcaatcgggccacaactagcaaatatctcttatttggtttataaactataaaatagatatgtaaaatttgtgaacaatgttactaacactttgtctgacgaagaaatgaaaaaaataaaaattatagatcttgatgagttatacaactttgttgttgatgactttttagttgaaatcatttagtatttgaaaatgttgtttgaagttgtcatattttcaaattcaaattcaaactgttcaaaaaaaaagttatatagaaaaataaccaaaataaaagttatagatcttgataagttatacaaatttgttgttgatgacttttttagttgaaatcatttagtatttgaaaatgttgttttgaagttgttatattttgaaattcaaattcaaactattcaaaaagagttatatagaaaaatgaccaaaataaaagttctaaatcttgataagttatacaagtttgttgttgacaatttttccatttgaaatcatttactacccgaaaaaataataaaatgaattattatactgcagttaattattttgatataggtcaactcacaaatataaacatttcatatgaaaaatggaaaaatactaagtcatattaatcgggcattactatagttaacggatgagtcatgtgtgacaggcctaattattatcgattgagatatggtcgcacgtacatgttagatgggcataaaaatcaggcccgccactgatgacctctatcagtgacaggccgtagtttaggcccgattgagataacgatccatatctcaatcgggtctcaagttggcgcccgtcacggatgatcatcaagtttagccccgatagagataatgttccatttctcaaacttgaggcccgattgagctatggaacgttatttcaatcgggcctaaattacggcccgtcactgataggtgtcatccgtgacgagcctgagttttatgcccatttaatatgtctatgcgactatatcttaatcggacactttttcggcccgattgagatgactttctagtgacggcctactaattctaggcatgttagagaccgtcacagatgaaaggttttgtactagtgaatatacatgtcaagtattataaaaatgatgactatatatgttaaaatattttagaaatgatgtgagaggtgatgatgattggatatgtttacatgttgatttatagaatttaataaattataaatgatattgtatgtatgcattagcttttttataactaatattattgctagtagataataatgtggtatctttatatattatgtttaatatttagtgagttataactctggaaggtatagatatgacgacgcagcaagcttctggtgcagatgcagagtcgggcatggatctggacggggtcaccactgaagggaacactgcactccatgttgtggccacctgcggtgatggcccgggctacttgaggagtgcaggcgtcatctacagcaggtcccaacatctcatgttagtgcagaacaacaacggtgacacacctctgcactgcgctgtccgggctggccattccaaaatggttgatcatctaattgatctggttgaaactaaggacaactcccctagcagcgcgagactggaggaactcctgagaaaggaaaactgccgtaaggagacggcctttcatgatgccgtctgcattggaaataaggatataatcaccaaccttcttaaatattattcagaattggccggcttccttatggatgcaacaggtacttcaccgttgtacctagctgtcttgcatcaacaggtcgacattgcaaagttattgcatcaaatgacagacgggaatctttcgtactctggcccaaatagacaaaatgcattgcacgcagccgttctacaagaccaaggtacgtgtgcaatttatatttgctgttttgaatttcattctagctatattccatacttattttgaatcatatatttgcttttatcataaagcgacaacttaatttgttttataagtttataggtcaatatgtcatacacaaatgcaaaactcatgcttttgcaagttggggcccacaatgcaagtcatacgcacatatatagtgggaaatatttgtagctttctaataaaaataaaatggtttgctatcgtgtcaatttcgttgaaagtatataagattgattgagcgagagagattgagcgagagagagaattgaacgcaatagagcgaatgagcggatgtcctttattgatcaatgcggtacaatttatagataggaaatgggtgctaaggagtgcctagggaagaggggggtgctaatgggcgggtgatcgctctccgtccccctatactctactctttcccttcctcctccccttcttctcttcctactacaccataaatttaaaaaaaataaaaaaataaagttggaaaaatttatgtatagaaaatactatatataaaaatatttgaatttaaattcaaatttgaaatgggtatgtaaacttttgacttataaactttgggtctataaactaatatttgaattcaaattcaaatttgaatcgggtatgtaaacttttgactcataaactttgggtctataaactttaggtgtataaactttagatgtaaagaaatactatatataaaaaatatttgaattcaagttcaaatttgaatcggatataatttaaattcaaatttgaatcgggtatataaacttttgaattataaactttaggtctataaactttagatgtacagaaatattatatataaaatatatttgaattcaaattcaaatttgaatctgatgtataaacttttgacttataaactttgggtctctaaactttaagtgtataaactttagatgtgtaaacttgaggtgtacaaactttaggtgcataaatttactaaaataggaaagtaatgcggtgccaaaaaaggaacccacgtggaggagggggagggggatcggatctgatcgccctgagcgagcaatcgcctagtagcaattccgtagggaagaggcgtggttgccttcggttgcgatcaatccttttatatggatgagatcaccctattgtttcataatactctcccttgatcgaatccagctttgatcattgctctttcattgttccagaatatttgtaaacataatcttagaaataattataatttattgtattagatacatcaggtaaactcctcaaaaacccattgggaaaataaggagaagaaccgtgatatatagttaactatttttagactttatgagtaaagctcatagtatggtccaaaattagtataatgtctatagttatcatttagtaaaaaccctagtggggaaaagcaaaatgataagacatataacttatgttgatattacctcgttaaaaactttggatgagaaaatataaagggtaaaactcatacaaaggaaaaatagtataatatgacgaaaataggttatttcccagagagagttactccccctcaatcctgcaaatttttaagtcatctcataccaattccttcgacacatttaaaaaatatggagtatggcagagattttatgaataaatcagcgagattatcacatgacttagtttgcaagatgtttatctctccatgttgctgaagctcatgaggataaaataatttaggagcaatattcttagtgatgttgctcttaatataaccagtttccatctaaacaacacaagcggcattatcttcatagataatggtaggtgattctaatgaaccaataccacaagatgttaatatgtggttaatcattctgtgaagccataaacattcacgtgatgcctcatataatgcaattatttcaaaatgatttgtggaagtggctaccagtgtctgtttagaagacttccatgaaatagcagttccaccttgtaaaagtacgaatcctgtttgtgatttggcattgtagggatcagatagatagccagcatcagtatacccaattaaggtcgaatcttggttctttttaaagaaaagtctaagatctcttgtgctattaagatatcgaaagacattcttaactctagtcgaatggcgtttggtaggagcagcgatatatcttgctaatagatttaccgagaaagcaatatttggcctcgtactatttgcaagatacataagtgcgccaatagcactaagatatggaaaatcaggtccaagcacatcctcaccatcttcctttggtctaaatgggactttctccacgtctagagatcgaaccaccataagggttttggaaagatatgacttgtccatatattgaatttctccaaaattttctaggtatatgcactttggtgcacaaggattccagaaggtaaatgctcaagttgtatacctaagcaaaatttggtttgacccaaattcttcatctcaaattccgtctttaaatgatgacgtgcttcattaatatcttgtgtattgccaatgatgttaagatcatcgacatataccgagataatacaaaatcctgtgggggactttttgataaggacacatgggcaatcatcatttttagtgtatctctttagtgaaaggaatttacttaatcggttgtaccacatcctgcccgattgttttaagccacaaagtgacttctgcaacttaacacaatacatgttacgatttaccttctgattcggcatgtcgattccgtcaggaaccttcatgtaaatattagaatcaagtgatccataaaggtatgctgtcactacgtccatcaactgcataaatagacgattttgtactatcaatgatattaaatatcggaaagttataccacccataactggagagtaagtttagttgaaatcaacgccatgtttttgcgtaaaactttgtgctacaagccttgctttatatctcaccacctcattgttttcattccgtttccagacgaaaacccatttgtatcccacaggaaagataccacgaggagtaggcattacagccgagaatacatctcttttgtaaagcgaggctaattctgcgtcagttgcgtccttccatttgttccagtcagagcgcttttggcactcttttatagacctaggttctggatcaacttgcaggcaatcagcaatttattcagaaaaattaatgtcaacaattgtagctcttctatcaaaagattctccagtttccgagtagttgatggcaatttcatcaacccttatagactcattgtgatttcccaaaacaatgtgtctatggtcttctgaattcctagtctcagcattatgcacaactgggctaggttgcagattatcacgatctgcttgatacatagtatcaatttggtgtgtaccaacttaaggttggtttgcatttattgtctttcttttcttgctagcaactgtatctcgctgagtggccaaacttcttcctctctttttagtgagtggaagttgagtggttttatttggtacctccactctttctagcgcattctgagcaggaatgaaagatttagtaacacctttataattagtaaatgcatctggcaggttatttgcaagtctttgcaaatgtataatttcctaaacttgaagttcagtttcagtagtgcgtgggtgtgaggctggaataccctgggcatcccaatcaatttcctgtcattctttctggtacttgaagtctcccgctaatgccgggaaattttcctcatcaaagatagagtcagcgaaccgggcagtaaatagatcacctattaagggttttaaatactttatgatcgacggagatttaaatcccacatagatccccactttcctgtgtgggcccatagcggtacgatgtggtggtgagatcagtatgtatacaatacaaccgaacttacacaaatgggaaatacttggaggatttccacgtactaactgcattggggaagtttcacgatatgcagtttcctcaatgcagttggtcgtagttggacaaggtcagcagtgtgcagaactacatgaccacaacacaacgaaggtaatttgcagtttatcaataatggtcgggcaataagcttaattctttagatcaatgattcagccaaaccattttgtgtgtggacatatggaacagagtgttgaacctgaattcccaatgccatacaataatcatcgaaagcatgagatgtaaattcggcagcgttgtctatacggattgattgaatcctatgttcaggataatttcccttcagccttataatttgagacattagtttggcaaaggcatggtttcgtgtcgatagaagacacacatgagaccatctagtagatgcgtcaatcaaaaccataaagtacctgaacggtctagatcttggcaccatagggccacagatatctccttgaatgcgttcaaggaatttaagtggttcggctctaattttgagataagatggtctcaaaatcagtttcccagtagcacatgctgtgcatacgaaatcagagtatttgggaaatttgtcagtgatcaaatgatgaccaatagaattgtcaataatttttctcaccatcccgataccgggtgctcaagtcgatcatgccaagtgtggaatgcatcaacattttaaaaaatcactttgtacacaacatgtgcaatgggcttaatgtatgtatagtacaatcccaatgtgagagatggaattttctcgcaaatgcgtttgccatatcccttttgtttggttaagagaagaaattcttctcgattatgcatatgggtttcaatgtgaaacccaatttgacggatatctctataacttagtagggtatgggttgaatcaggatacaataaagcatcctcgattgtaatttgtgtatccattgggagtgtaatagttgctcgtcctgagccaaatatcacagtatcgcgcccagcgatagtcaaaactttgccttctctctttttgagagcttgaaagtatttgatctccctaagtatagagtttgtggtaccactgtccacaagacataattcatctccaatcggagtcatatccttagacatctatagtgaaagaagaattgcttagtgaagaattctttatccacaatatatacatacatacaataattaaaacatcaaatacatagtatgatgtttacaaatgttataagtacatactctaatgactagcaagtcttacaaccttataatataagggagtttgtacttatctacttattacaaccaatattgttttgacaaactataggatatcaatataatgtctcaaacacactgagattaaagcagctttatctctaagtggggtgcactgcgatcatagtaaatctccaactgggtccgttgagcagtactcgatgagcatgtcatccattgcagaaagtgccgcggtatcctctaggagaagagcgaggttgttctctggttcaataggagcctggtgagaactttcaatctcaggtttttcttttgtaagattgaagtgagcttcaacctggtgagaactttcaatctcaggtctttcttttgtaagattaaagtgagcttcaaatcttagttctttagaagatttatttttctcctttagggatttctgatacatgagaacaagatgtttttgggatgcggcaatctttagtgacatgatagtcagatccacacttgttgtaatgcctgttgctatttgccacgaggttgtggtgcctgacctttcccttttcctttctgtcgaccattggatttgcgcctgttgttgcgtttgcgttgtccagttagattcttagggttattcgaggaatttctcttgaatccttttagtgcgatactattggttcagtatcctgtcctttggaaacatagttgatagagttttctctatcttctctgcttccgttggctctttttcgcaaaatcctgtaggcgtaaatgaatccactcataattagcctcaggccaaatgagttccttttgctgatcataacgctcttttagagctttctataggttgagagggctcgtctccaacatgtactcatgtttgagatctttatagatgtagagccttagaaggaaaatggcaatatatagctttctgttctcaactagtggatcccaatcattgggttcctaaattgtatttgaaatcccacgagaacaaaaatttattttgatatcggaagcccaaattgggtagttactcccatcgagggcgagttcgtcgaactctatagttgtcatgtccctataatcatgattaacattatttatttacagaggtaaattaataaaaacatgacattgaggttgtaatctcaatgcgaaatgtaagacttcatattttgtaatgtttcgaaaagatgtaggttatagacctgataatttgagttagaattcgaaattaggtggcacaatgtggataatctccaagtaattaaacagtggagtagatctcttaatagtgggcaagttatacttgctgcctaaaacatgatctctaggcaaatatattctggtgaatataccgcagccaatgtttaggactccactaccttgtgtttatccaaatttcaaataatctcatttttcaaaacatattctcggaaaataccacatgtgggtaatcatcgtgagatgtagacctctgtgtgataggcgagatactcgctgcctaggttatgaccagtgtggccaatttgtaggactccaccgggtaatcatctcaaaatgtagaacacttaatgatgggcaacatacttgctacctaggttatggtcacgatgaccaaaatataggactccagctacatgtgattaatttccgagtcaaaatgtgtagtggaacatgcattaaatcctccattaatcatgttgtacataattaagagaatttgctaaattaaagtacaaaatttaaagaattttgtaaattaatgaagcgaggaagtagagcatgtctcaaaataatatgcaaaaggcatttaattaagacaacatgaaatttagtgaagcagggtatttgaataaacacctatgttaagtaacatataacaccagtggtcttacattgtaatttgtacaactgatgaactgcttgtactaaattaaataaaacacagggactaatatgaaattgctgctaaaataaaattaaaaactaaaataaaggggtaaatgggtgg

SEQ ID NO: 24170 - DNA, 9156 bp, Oryza sativa
cacatgatgtcgccgaggcggcgccgcctcctgcacctcttctgccgccaccgtccatttcggcgcctccttcttcaccacttccagcgccgtttccactgccgactccctcatccaccaccgattccttttctgccgcaccttcttcccctgttacaccactgccggcgcctccatttctgccgccctcaccgctatagtcaccgcagcccccgtcgtccgccgacagccccctctcctcatcggagtaagagtccggtcgggttcggacgccgttctccccactccatttgagagcgtgcaactcggggagtcgtgaggaatggcgcgggcggaaagtagcggggaggctgggtggcaagcggcggcttcaccagcatggtggcgagactatgatggagggtagaaggccggctaccccgtgcgcgtggtgagagttccaatccccgaaaccccggcggcgcgggatcgggggagcagctccgacgaggtgaaggtgatggcggagcggcgacgaacggtgccggtggcgactccatctccagtgggagggagcactgctcgccggcgggtgtcaccaccgcaatccatccatggtgcctggacctggacgcggcggggcgccggtgccatggcgggcgcttgtggtggtggagtcggaggtgtagcagcgacggcaaatgctgcgccgaggatggtggcggcggccaccaaccctagaatggtgcccggcatggcgatggtggcgactcctcgaatcgacagaggaggtggcgaaggcgatgggtgcggtctcggcgagggaggccgagaacggcatcgaggatgaaatcaaggtagacataccttatgcgcttccttagtttcttctgttcttcgctttttcttgagataaaaagcaatcggatttcttctcttcgcttagagctaagtgctgataacatgttgaaagtgggtaagattgattgagcgagagagagaattgaccacaatagagcgaatgagtggatgtcctttattgatcaatgcggtcctttattgatcaatgcggtacaatttatagagggggaagaggtggcaactgtagacgcgtccgttgccaaggagcgcctagggaagaggcgtggatgccttcggttgcgatccatccttttatatggatgagttcaccctattgtttcataacaaattttgtgaaataccttactataaatttgtaacaaactggcagttttaaccaaataattgtcaatatatgtaacaacattagcatttgataagggaaacatgacatcactgctacagagtacccatagataccggatgggaacttcttctcaactggcaccaatttagagacatatttcacaaaggtgtactaggtttttaaaactaacacctaaaaagatgtgccagttttccatggtaaaagaaaaagaatagccggctctctaccggctcaaatggatgcaaccctgattattgccgccgttattaacaacttgatcattaaaaggaaagtcaagcgcaattaccaaaattagagcaggaaaaatggatcttctaaaaaaaacaaacaataaaaagatgtaactacacagagaccgcaccctatattgtcttaaccagagactcatctttagatctggttgcctactagtaaaccgaataatacatgccttttttttcttcttatagatttttcttttaaattacttatctatccataatccgattacaccattgtgtttgttgcaattaaatttgtacaacaagatcttacatgactatattttgataaaagaaataaatatatatatatatatatatattgtaaaatatttttattatataaataagttacttttatcatatatataaattacttttcgatttgattaaattacttcttatacattcatgatgttgtgaatatattgtttattttattatcatttttggtcaattccgtaatttgtgctaattaaatttaattgctagataaactcatgtttttatctccataacggatttacttttaatatcatcacaaagttactttcttttttttaagttacttctataatatatgtaaattattattttaagttacttctataatataatatatgtaattacttttatgctttattgaatttacttttatatgtcgaagaagtagtttagtgaaatttaaaattaattaaggtatattataagagtaatttatatttttttcattaaaacataatcatgtgagatcttgttataaaactttaacttttatgaacacaacggtgtaattggatcatagatcggataagtattttaagagaattttatttgaagcacatgtgataggaatatatttttttctacttgcttgttggactagctagtactatagtgaaggtatattgttagggcctctcgttagcattaaaacaagatgcctcttgatttagattttaccaaaaaaaaaaggttcgtatggagaaaaaaaaggagaaaacttttgggaaggaaaagaatcacgaagaaacagcgaaaccaagaaattcccacctcaaccagtcaaataataaacaaaattagcttaattggatccatgcctttacaaatttgcctattcaaataaatgacattaaaattcgtctattaatagtcgtatcactaaaattttacaaaattggaccgtgccactgtcttcacgttttccatcaatatcctttattttccatcttcttccttctttctctcgtcttcttcctagaagaagagggcatacaatcacgagccatagagagccatagccacaagccacgttaagagatagccaacaggaagacaatcgctaagagataggacaactgtagtttcctattgcaaaactatatcctgataattaaatcaatacttcaacatatccacctcatttaattagatgatgcggtcatattatctatatttttaatagataatatcttcaaataaaatattgtaaaattcacaaagacatatatagtatgaaaaaaatgttacttagtagaatttagaaattccaaaagtaagatacttacaaaaacacacttatgtacaaatgttatatagtttcataggtagcaacttcatcgtgacacgatattttcttataaattcaaaactcggtgtttttaagtaattttagtttacaagttatacattgttatacgccacaatggtaatcccaaataaatttttttaaaaaaaacatgtttacaatagaataagtataaatattcgtaataaaaaagatggacgcgcatgtgtgcaagctatcttccaatttcattaaacaaataaaaacatccagctgccgcaccaaattgcactcagcggaaaaaaacacatccactgatgcagaagaaaaattgagaacaagtactacggggacttccccatacatcgtgagtaagctaaacctgagatacaaagttagataatataaccttctttatccactgtgcactgtgtgtttatttagacgcgttaaagcacgcaatgcaagatacttttcttttcttttttacgtttaaaatgaacaactacaagtccacaacctaatgttttggctaattaaataatgctatttagttactgcagcgttaatttgctccccttaataacatagtttcacatgaatataccttgtatgcagtgatgaccaaaatgttgttgaactggaacaatggcctcacagagcaatcggacgaaaatgggagcacgccactccatttcgctgcatcacttctacggagaggaatatacaatacggtcatccctgtgctgagagccaacccagttcagttgtataagcaagactctgaaggattgtaccccatacacgtcgctgcctcctccggtgccaatctgacagtcaagtcctttattagagagcgacctgagatcgctggtttacgcgattctaaggggaggactttccttcatgttgccgttgaaagggaaagatggaatgtagttgtgtatgcttgccatactcaatcgttggctaggattttgaatatgcaagacaacgatggaaacactgcattgcacatagcagtgaagcatgggaataaggctatcttctgttctctactgatgaataaggaggtaaacttaaatatatcaaataataaggggcaaactgctttagatatatcgcagagtaagattcttgcaggatatttctatggatgggtaagattacacttttaaccctttttgattaacaaagaaaaatgagtaaattacgttcatggtacacaaacttgtatggtgggtgcaaataggtacaataacttacaaattgcttattcgggtacaataacttggctagttcatgcaaacataggccaaaccgatccgcaaaagtaaaattgatctaatatgatacatactactggtgtaattgttgttacacatcaaaattttatactgacacatattattactattattcgcatgatactttcaagatttagaaaaaaaaacaaaataattaaaaatacctaatcattaaaatacactttcaatgaaagtgtcggaacatgaaaatgaaaattaaaatgttcttttagtagttaattgtacatataaaaattatcttggtcttgaatagataaataaacattagacgagttatatagatgatcaattttttccaaaaaatgaaataaatattgtatcctatacatgaaaaataaacttttggacatctaattcctctttttatttggattcgaaataagatctccaaatcatagttgtacgtatatgctgttatgtcattattgtgcactaatttagaacaattttacttgtatggatcattttggcccggttcgcacctactagccaagttattatatcaaagtgagcaatttgcaagctgttatatctatttgcacccaccacacaaattcatgtaccgtgagtgtaatttactcaagaaaaataaagagtactgacctactgatccattatgtttgctttgcagaaccctaacaaactgatattgcgggcactaacgttttgcaatgcaagaggtggttgtcgtcgggtagatcacctgcaggaacaatatattattcatcaaaaacaagtagatgaagtgagggaatcggacaaaatgacaaattcaacacaaactttgggtattgcctcagtgctgattgttactgtcacgtttggcgtaatgtttgccataccaggaggttacaaagcagacgatcacaataatggtggcacaccaacacttgctggaagttatatatttgatgcattcatcatggctaacacaatagcattcatttgctcgagcttggctatcatcaacctcatgtactctggaatgcctatggttagtctaccacttcgccgtcggcactttaacatatctctactcctggccttcagttcagtgacaagtttgggtactgcctttgcactaggtatgtatttagtgctggccccagtgactcgatgcactgcaattgcaatctgtgcaatgatgatgattgcatcactgtgcttatatacggagcctttaaatggcgttcgttttgcaatagcactatatgttaggaggggcaatcgggtattgctagttattgcacagattctacttattcgaacgctaattacatattggccctgtgtgataatctttggctgggcagcgatttcaacaaaagatgggcacacaagacatggatgagtcgtcattagatgcacccgaccagagagacagagagatgaccaaaagtatgtagtaagtttgaaatttaatctatatttgtagttgccaatcattattcacgtgatatctctccagaattaatatttgattcgaaaaaatatgtagctacatgctgtgctcagctcagatattgtaatttctttttgttatttctatttttaacattcagaccctgttaatttccttttattaaaccatcatggtacgtactgtcaatgaatacttgaggcctgttcgtcacttttatgtgacacttcaatatctaacagacaacctaagctgcaaaccgaatgtttctggtatatgtttgcatcagcgattgtgaatttaactaacaaatcattctccaaggccacattaataaagcacggatttctcttttaggtgtacgatattcacactatgcttagagaggttgattagagcctctttgtccacgtgaataaaacattaaatcatcatcgaattggctgtagttgaccttaacaaagttattctagattagttggaatgtcccaaataattctacgggtctttgtatggatttgtacatatacctaagttgaacaaatatcctgaaaggggaacagcggaacagccacattcacaaccatcggcagtgaaacatgacttcatgggatctcatctgatctaaaagccaagcatcacattctaacaaacaacaaccgagaaaaaaatacagtaaatcgtagtacatctaacttctaagagactagtttaaccaaacaaactggaaaagaaaaaaaaactcacatcattgtgcgaagatgtagtagtagagtactagagttaccaatcgagctcacacgagaaatcttccaccaagatcgtcttctccacagcaaccaccaccacctccatcttcttcccctcttctccattgccttttgcgcgatccgaaccagcgattccttccctgatcccctcgacgtagccattgtgagaaccaagcttctcgtcccgctcctccccgaccaccagaaccctatcctcctcgtccccgcagcctccgactccgccgccgaccaccatgacctcgtcggcgccgctcccacggtcgcctcccaccccgacgagggcctccaggatggccccgcacgtggggcccgagtctatgtccgggagggcatcctatggcagtattgttgatgcgaaaaacacacactggcctggaagatctgcttaacttcagtgcaagtccaaaaatcttacctttaggttcgtgagcgtgctagttgatttgatcctgcaatcaacaagaaataaagatagaaaaatagcggttaaatccataaacgatagccgatcggccagtcgccgatgatgtattatttatctttgagccgatgtcatatttaagtcgatcggcaatcataaataggtaagaaaggactaaatgtattcgatcggctaaagatattaatgatatataatacttccatcaatatatacttaaatcatgtgattgggatagatcggtcgccatgccgagacagtataaatcacttagatcgaaatatatattaaaaaggagattatagcattcatagcatagccgatcagatagatttaacatgtatcggctaatactccgataccactctatattaagatattaaatcgggcaaaatatatcaaacatgaagcttaatatacctagatgcgacaagatcttagcataaagggtagatttaacatatcaatctagcacataagatataaggctaaatcaagtaagatcggctgaaaccacgatactacccaaatcggcaagcaaagacaggctagagattaagattctaatcacgacttataaggtcaaactcaactgatgcagctataagtatgaaaagaaagacaatatctagactatcaagccgttggatgtttcatagggtggtggatatcctatataatctgagtcaatattgatatttaacctaatcggttgcctttcaatgatagatgttcgccgattgagggttagatagcaatattgtcaaagattacataagatatatgataactcgacgaattacataaacaagattagagtatcataaagatagaagcactaatcctgagaacgcaagccgccataacatattttacctctagttgaagatcgaaaccgatgcagctcaacccgaaatcaagaactcgtcgaaagtaaacaaaagtaaaagggtggcgatgcaccgagattgtttgattacatgggttcgggtcatatttatacccgagatacaaactatgttcttgtcgtacacgactcttatctctaacaaactctaagataccataagtctttgcggcagacttttgcccaaacttatctctaaggaaattacataaaatatcctaactaatagatacaattgccttttcaggacttagtccgtgcgtggcaatccatatgaagcacattaacccaatctgacaacgtgtaccaaatcacattgtcggaatcgactcaatcgactacccttgtccgactcgaactctgccgatcctggtcgcggccgattcggactttagctgattcttgctctgtttccggaacgatctctaccttggattccgcttcggttttatctccatccctgtgatcgaaacgacaaccgcatacgtcgaaacacgtggtcactcaacagtagttgggaaagaagtaaagtgtattaaattgagaatttttcttaggatccccctattacatggtcctatggggctatttatagcatacaggttcttactactagggttttggttatacagaggaatttacatggttgcccttatgaaagggacatttacatgggtacatagtgtaattgtggtccatgggcccttagcgggccgtcaagcgattatcgacccaattagcccttaggcttgatgggctaggatggcttctttggtcctcccggggtcgaatttgctatggcgaagttgtcccccttccgcgtatactcttcgccctgcatccttcgcccaggaggcctctggcctggcaaggtacccgcgcgattccctgcctctcgcggtccttgcttcttagtctacgccatggggggcttcgccctgactaaacttgacgtttcgggcttgaatccttactggtttcagcagatttggtcgaaggcctcatgccatatcgccaacaatcccccatacttgaattaccaaatttggtcgttaacaagtatatatcaatatatgggtggtttcgctgatgtggcatcctagtcaataaaaaaaataaaaaaataggtggggtccacatgtcagctgcacatcttttttttttcttctctcttgccttcttcgggctagca

SEQ ID NO: 24171 - DNA, 1470 bp, Oryza sativa
cggaccggctcggtcacaatgtcgcaggtgtagtctctggcatccccgtctcactcccagaagcatatcggtagagtggtggaagcctggctgttcaccgccaccagcgtgcaccacagcatgtagaacggctcgtccgccgccctcatccgcgctcaaggattccgcccgctgccggcccgccctaatccgagatcaccgattccgcccaccgccggcccaaagaagggaagagagaaaggatataagagaggagaataaggagaaaagagaacgaaaaaggatgtgcatatgatatatccctgatggagggaccccttgtagtcacggttagtaaccccccattagtcccggttttcagtccgggagtacctatccgggactaaagatcgagctgaccatttttttttttgcatggccctgttgctgcatggtttatatatatatatagtttatatatatatatatatatataaaccatgcatatatatgtttcaatacatatatatgcatacatatatatatatgtatatatatatatatatattatattatattatatgtatatacatgcataatatatatgtatttatacacatatatatgttatgcaaattaatgcatatgtatatagatatatatatatgaccaaaatatatttacattatagaaaatgtgtacacatgcatatagaaacatatgtagtcatgtattaattacaatccattatatgtcctagctagctagctatcatttcgacgtagtagtactcgctgctagctcagaagctaaggaccggtgaattgtgtttccgtcgtagtagaattcacccttgggattaaggatttcttcgttgatgaatcccatgagttgttcttgaaccgccgtgataaattccttgtgtgtggtcaggttatccctcatgcgaataaactatatgaatgtatgaaattgattagtaattaaacaagaaatcgctacgtaatgaaattttgaatttatttgtacgtacatcgagctctcttgtggtgatgatttggtctgcaaggcagtggcaatactcgcacacataatagccgcacaagttagttccctgcttttgctttgcgcactacaaataaatgacaaacaacgagagatctaattaatatacacttgtatgtatttgaatcggagaaatataaatgtagagcatgtgtactcacaggaaatttgaacttccgcctaagtctttctctccatttgccgcggaccaaatgacggaaccgataccaagccctacatggagtttaaagctatgattcgtagtagcaattaacataacaagattttcttaattaacaaaggaacttatgacggtacctgtctataagttcgaaaaccttgtcaaacgtagactcttttttatccattgagtcatatacgttgacggtgcaggcctccaggtcgatgagtaaaagcacccagtgg

SEQ ID NO: 24172 - DNA, 4370 bp, Oryza sativa
tgaatctccattctacaacgataaaagggagtatattattttctatagtctacttatatacaaggacctaatttattaaaggagacgtatagtaagaaatctaaccgaacgatatacttacaaaatccagcaactataatagagacgtcgagggcgtccagctggtatagttcgtagattcccttgaaattgatccagagaatgtcatctccttgcaagaagtccgtgtccctgatcctcgctccgatcatctctctaccggcggcgctcatctccatgtacagctgatggaacttgtacatttgtgtgggtagggactgcagcagctcaggcttgacaagcggtttaccgagttcgtacatgtatttcacttccgccttttcgattggtgcgactcctagcaattgatccgtagttagaccggtgtcagtaataaattgttctatcgtcatttctttaccggtaaccaacggctcgatctcctgttttggttgctctccaagctgagggactggtttggactttccagaagatgctttcttcagcgttcgctcatagtccgatagcttgatggcctccttgacagatgcagacatacccctgaagaagttcctgacactggggtctataggaatcttcttttctggacttcgaggcttgaattgtctcttgacttctgatgcaacgtaagcgtccagctcctcttgcgtgcaatcgtaccccgggtccttgttcttggcggcgtcaactttcgcccttttcgttgcccttgtgtgggcaggcggtgcagctgggggggcccttgactttgaaggtgccggaagaggagcttgcgggggagtaggtgtaggagcacgaggaggagtcggtgcaggatcctgaggaggagtcgatgctggagcctgaggtggagacggtgctggcggagcatgaggaggagacggtgcaggatcatgaggaggagatggcggagccggaggagatggtgcacgagacgccgcttgtcgcccagggaggatgatgtaccgcctgcgccatagaataatggcatggcttgtgtctcgtagatgcgtctcaccgtctcctccagggtaatccagctcgaggtcctcgtacgcgccttcgaccaactcaacttcgaccttcgagtatcctgctggaatcggcctgcagtggtaagtacctgaagggtccgttgggatggccatgcccgacgccaccttcatgttgtgagagattatttattagtaatcaacatatataagcaggaactagcggaatggctaaatcttacctttattgataagttcttgaaaggaatatgcagctcacatggtgtccgctgagtgatgtcatcaacgggacaggtcgattcgtcctgtgtttgcatggcgtccatgctctgcgatcctacctgccccgttgaggcgcagctgctacggtttcctgacgggctcaccattgcaggaggaatggtcggctggggatcatgggaccgatgtgcggccatgcgttcatcaaccttccttgccacctcctcttgcatgttgagttcgtagctcgatacccggaactctaggtctgcaatcttcgcctcggtatctctcttgctcctcatccgactcctgtacgtgtggatgtcctccttgaaaccaatcttccaaggaatcacccctttccctcgtgttcgtcctggatgctctggagtctgcagggcgagtgtcagctcgtccctatctctgtcgggtcggaacgtgccctgagaggaggcttccactgcatctgttagtcgttgcgcagcctctcgtatctgaacgccgaataccagtgagccatcagctgggttgagcgttccaccgtgagcatagtaccagaacttcgatcgttccggccaattggctgttgccggttcgatacccctctcaatcaagctagcctccatctcctcccacttcggcatcgcgacgctatagcctcctgaccccaagtggtgatggtacttcttcttggcggcattttctttgtttctttccatcatcgcctgcccttgttcacctatcttatatgcaacgaactcgtcccagtgatcccttagctttgggaatgtgtcgaagttcggtgtctgccccttcagtatatacttcttgtacagatctcccttgaagctctgaaactgttctgccattttcttcagagtccaccttttcactttgtcctctgtacccgcaggaagggtgaatgtctcgagcattgtggtccacagcatctctttctccgaatctgggacaaagctctcatgatctcctcgtgcccttgttcttcgccagtacaccgtactgacaggcacgttatcccgcacaacccaaccgctgtgacgtacatagttcttggcggcttcggccggggcactaggacgtccatcttcttccacttccgttatgatgtgccgaccctcaagcttcttcgctgcacctcgttgcccgcgtgccctcttctgtccaacggagggttgactaccactagcctcctcctcctggttcccctccacatccctttccacgtgcccctgctggttcccctccgcatccctctccacgttcccttcctcgttcaagtactggtttggatcctcgttcccctcttcttcattccagtactggctgcttccctccgcgattgtatcgtacaatatctgttcctcatcgcggtcagccatctgttgatacaagaaacatctgctaagccacgagacatttatgttttaacaatctaagtcatgtatgctaagtgtaaatgtcgtacattagaaccctacacaaacttacgtgctaagtctaaatacaaatcgtgatataagctaagtctaggtgacgtatattatacaaccctagctagtaaataattatatactaagtctaattacaaataaagtaatcttatattaaaactcaaataatattacatgctaagactaaaatagtcatgtatgctaagtgtttcgtgcatatatgctaagtctaattaagacaacaatagtcaattgctacttgtcgcaccatttccgtagtaaataattatatactaagtctaatctcaaataaagtaatcttatattaaaactcaaataatattacatgctaagactaaaatagtcatgtctgctaagtgtttcgtgcgtatatgctaagtgtaattaagactgcaatagtcaattgctacttgtcgcaccacttccgtagtcaataattatatactaagtctaatctcaaataaagtaatcttatattaaaactcaaataatattacatgctaagactaaaatagtcatgtctgctaagtgtttcgtgcgtatatgctaagtctaattaagactacaatagtcaattgctacttgtcgcaccacttccgtagtcaataattacatactaagtctaattacaaataaagtaatcttatattaaaactcaaataatattagaacactacacaatcttatatgataagtctaattacaggtctaataatcttaattaattgcattacaaatataacaatcatttatattattacgtcacttgcctgctccaattccttctagggctagctcttccactcaggcttgacggacgactccgacaacacgtcttttctgcaagatacaaaaagatgtatatagtcaaatgcgaagtaacatatacatatatatatatatacatatatatatatatatacatatatatacatatacatatatatatatatatatattgcatttcacgttaacgttcgtcctcgttcgttcgctcgttcacgttccctagctcgttcacgttcgttccctcgttctcacttgtcttcgttcgatcgttctcgttatcgctctcgttcgttcgatcgttctcgttctcgttcacgttctcgcggcaacatacattgacgtgttcgttctcgctctcgttcgttcgatcgttctcgttctcgttcacgttctcacggcaacgtacgttgacgtgttcgttctcgcttctcgttcgttcgatcgttctcgttctcgttcgttaatggcggtgtggcggcatcggggcggcggttggcgccgtggcgacggcggcggcgtggcgacggcgtggcgacggcggcggcgtggcgacggcgtggcgacggcggcgtggcgacggcggcggcgtggtgacggcgtggcgacggtggcgtggcgacggcggcggcggcggcgtggcgttgcggggccgtggcggcatcggggcggcggttggcgccgtggcgacggcggcggcgtggcgacggcggcggcgtggcgacggcgtggcgacggcggcgtggcgaccgccgcggcgtggtgacggcgtggc

SEQ ID NO: 24173 - DNA, 2875 bp, Oryza sativa
ataaaatagaagttaatgcattaacattatttaaagtactaaagattaatgacaattacttcgaaaaattatttttgtctgtaataaattaagtggataaatcgtaataagcaaatatatgacttataattaataaaaattccaatatatatatatatacttagcatatatatgaatgatattattatattggtaaaaactctaattaagatatgtatgtacatactgcatgatttaaaattaataaaaattgtaatcatcatatatacttagcgtaggaattatattaaattaaatgctaaaaactctaattaacatatgtaaatgccacatgcatgatttaaaaccttttaaaaattcgaatagtcatatataagtagcatatgaaagatagtaaattaaattgtgaaaaactctaatatatgaatgatagttttaaaaatatattaaatttaatacttttaaaaattctccagtcaattataattagcatatgaatgatagtaaattaaatgttaaaaactctaattaacatataaaattgccacttgcgtgatttaaaacttttaaaaatcctctagtcaattataattagcatatgaatgctagtaaattaaatgttaaaaactctaattaacgtacatatgaaattgccacctgtgatttaaaacttttaaaaattgtaagtatcacatataactagcatatacatgatttgaacttgttgaaacctctaataatcgtgcgtaattaacatatgccatacatcaattgatttatatggataatcaatacatccaaaatagtttacatcgtgtacacaataattacagcattacatcggcggtgacggttgaccgcacgtactttctcctcactattgttccctccttgtgatcgctgcgtgagtaaggggtgtcttcatttgataggaggatgctagggtcaatcgtcaccgtgaaagggggttgcccatccaactgatcgtaatcctcgtcagtcttgtcctcaactccgacgatttttcttttgcctgggagaaccacttgacgcttaggctcatcaggccctctgcccttctttcctttgctagacatgtccttcacgaaaaagacttgcgttacatcattggcaaggacaaaaggttcgtccgagtatccaaccttgttaaggtcaacagttgtcatcccactgtcatcaatcattacgcctccaccagtcaacctaacccattggcaccggaacagaggaaccttgagaggaccatagtcaagttcccatatgtcctcgatggcaccgtaatacgtggcagttgttccatcgtgtcccatggcatcgacacgaacagcgctgttttggttcgtgctcttcatgtcttgggctctcgtgtagaatgtgtacccattgatctcatatccctggaatgtcgcgatcgacccagacggtcccctcgccaggaaggcaagttgttggttgatcgactcgttacccatgagatgttgtcgtagccacgcggggaaagtatcaatgtgatgccgtgtaatccatacatcggacttaccgatgttcctggcgcgaactagagccaagtgctcctcgatgtaaggagctaccaatgaagagtgttgcagaacagtgaaatgggctttacggaataaattgttgtctaccgtcataattgctttccttccgagagttccctttccccgtagtctcccttcatggcgtgattccggtaccccgattgggcgaaggtcttcgataaattctacgcaaaattcgatgacctcctctgttccataacccttggcgatgcttgcctctggacgagcacggttacgaacatacttcttcagaacgcccatgtacttctcgaaaggaaacatgttgtgtaggtacataggcccgagaatacggatctctttcacaaggtgacaaagcagatgtgtcattatattgaaaaatgaaggtggaaatatcaactcaaaactgacgagacattgcaccacttcattctgaagggcatctaatctatccggatcgatgaccttctgcgaaattgcgttcatgaatgcacatagctttgttattgttgcccggacattgtctggaaggataccccttattacaactggtagcagttgtgtcatcaacacgtgacagtcatgagactttaggtttgtgaacttcttctccttcgtgcttattattcgcttgatattcgtggagtatccagacggtacctttatgctctccaagcattcaaacatactttccttctctgccttgctaagagtgtagctggctggactcaagtaatggcttcctttctcctttggttccgggtgaaggtcgccgcgttgttccatatgcttcagatcattacgtgcttccagtgtatctttcgactttccgtatacacctaggaagccaagaaggtttacgcaaaggttcttagtgaggtgcatcacgtcgattgcgtggcgtacgtccaagaattcccaatatggtaactcccaaaatatagagttctttttccacatcgccgcgtgaccatcttcgctctctatatgctggcttccaggcccctttccgaacactactttaagatctttaaccatagcaaacactgttttcccgctgcgatgtttaggcttcgtacggtggtcggccttatgttcgaagtgcttgcctttcttccgtaccgggtggtttgctgcaaggaatcgacgatgacccatgtatacaaccttcctacagtgcttaagatacgtactttctgtttcatccatacagtgagtgcaagccttgtaccccttgttggactgtccggataggttgctaagtgcaggccaatcgttgatggttacgaaca

SEQ ID NO: 24174 - DNA, 662 bp, Oryza sativa
cattgcgggctccacacaaatttctcttctttcttcaacaactgtgtcatgggtcgagcgattttggagaagttctcgatgaatctccggtagtatcctgccaaacctaagaaactgcggacttgagtaactgtcttgggttgcttccaatcggtgacggcggtcactgtttcggggtccacagcaactcctttagcagatatcacgtgccctaagaatttgatttcggacaaccagaactcacatttgctaagcttggcatacaattgatgttcccgcaactttcccaacaccagacggagatggtgctgatggtcttcctctgattgtgagtatatcagaatgtcatcaatgaaaaccacaacaaacttatccaagtattccatgaacactttgttcattaagttcatgaagaaggcaggtgcattggttagaccgaatgacatcaccgtgaattcatacagcccgtatcgcgtggtgaatgcggtcttcggaatatcttcttcacgaatacgtaattggtgatatccggaacgaagatcaatcttggagaatacagtggcacctttaagctgatcgaacagatcatcgatccggggaagagggtacttgtttttgatggtgacttcattgagagctctgtagtcaacgcacatcctctt

SEQ ID NO: 24175 - DNA, 872 bp, Oryza sativa
cgtcgtggcgttcgtccctccgtcgagccgttctcgtccgtcgtcagcgttcgtcaagcgagccgcggcagccccgtcctcgtcttcgtcctcggctccgcgtcgtcaagcctcgtgccggccgcgtctcgccttcgtccaaggatcgccgccgaagccgtcccctcgccgttcgtctccgttgtgcccgtctgtctccgccgcgcccgttcgtcgttgtcgttcccgcgcctcgtcacgtggtggtaaggatccctctccctcgctgccctgtcctcgtcctttcggtgtcgcccgtgctcgttgtgcggtcatcaaccccggtacccgtgtaccggtgtcggtagtcgttcacgtgtgcggatggtgaccgtgtagtgtccgtgttagtgtgcccgctcggtagccgcgtggtttccacgtgtgcaacccgtgtggtgtctagtggagtccgtttgtcggccactcgcctcggttgacacacgggatccgcttccgtcgacccatggaccgactctgtgtactcggtctaccgcggtcctttaggttgacatgtggggtccgcatgtcaacggcgcagccttcctgtcttttccaggctagcgcttacacatgttttattgttgcaaagcttaattataataatccgcaaatctccatataacagcactaaacttcggatgatcatatcttggtcatacgaactccgaatcgacccgttcaagtctcttaatgtttgttataacctaaagaaccctgtgctttctttttatgtattgttattgcttctttataggcttgtagctttgcttgtgtgcttcgcgtagcttctgtcattccggaggttcccgaagcgtggtttgcggtcgtcg

SEQ ID NO: 24176 - DNA, 644 bp, Oryza sativa
aggttctcgtactcctcaccgcgatataggatacaatcgttcggacatgcgtgaatcttatgaacttccagtcctaacgggcagactatcttcttagcctcgtacgttgtctcgggcaatttgtttccccccggaagaatgttcttgacgagtttcaataaatcgccaaatgccttgtcactaaccccattttttgccttccattgcaacaactccagagtggtatccaactttttgtgcccctgctcgcaacctgggtacaacgaagttctgtggtcctccaacatcttgtccaatttatgggcctccttttcactttcgcagtcctccctggcgtcctgcaacatttgaccaagatcatccgcaacgtcgttaccatcagcagctatttcctcctcgcccgtttgatttccttcaaatccaacaaattgagcaaagtccggaatattgtcgtcttccacttcatcttcttccatttcaacaccttgctctccgtgggatgtccaacaattatagcttggcatgaaccccgactcaaacaagtggaaatgaatagtcctggatgcagaatactccttctgattcttacacttattgcatggacaacaaataaaaccccttttcctgttagcttcggccactct

SEQ ID NO: 24177 - DNA, 9026 bp, Oryza sativa
gaattcctgcagccctcactttttaccacttaacacgctccgtgctctctgcatttgtttgcacttcagctcttcgccacctctgtactctcactttctttcgcttctcaattcctccttcgccacggacctgatggctcctcgtaagcccaccaaggccgggtcgactggcgaagaccctagcagcctcggggaggggtggtcatgctttcttggcaaatcgcttgtcaaagaggccgacttggccgaattggtctcctccggcactctcgcggagggccaagggacatgtgggggcgaagccgttgtcccttcgccaggcgatgggcgaacggtcgtcttcgccaccttctttgccgccgggcttcgtctcccgtgtgacgatttcctggcgtccgtgctggcgacatacgaggttaggcttccctagctcagtccgtcagcaatcccgaagctggctgtcttcgctaggatgtgccgaacctgcaggttctctcccaccgccgagctgttcgccgtcctatttacagcatgtgccacgaccaaagacgtgcatacgccagccggaccaagaaaaaccgttttcggttgcgtgaacttcatgctgcggctggaatgttcggacgcctggccggtgcctgcatcgatgggcaaatgggaaaggaactagatgcaaaagtgactctacatcgccaacccctaccctactaaagacaacaaggcgaactagctccgcttccagtgctccgccgtctccattgtcgtgaagccaaacctagaggtcgatggaaccctcgagtcccggctcatactccttcgcaaggtcgcacggcggctaagtacccgtgacctttccgaggagttttgccttcttccgatctccccccttgctcgtgtctggggggtttccgtcaatgaggacaaagaggttctcgggcttccccgccttgttctccccaccggggccgaacgtgagtttttgcttttgctccgtgtcgtatacttctttttgcggaaatatacttcggcctaattcatcgttttccttttcctctctttttcagttcacaccttagaggacgccaaaacggaggcatcgaaaatggttggcgtcctaaccacagccaaattcgcccgcctgcttcagcgtcagaccgatggccgggtgaaccgagtttatgttggcgaactgccaggttgatcaatcccctctagggccggcgacgaggatgtcggtacgtcgaagaagtgcaaacgagcggttgcaaagggtggccaggtgcgaactcgtcgcgccgctaaggacgcggccgaaagcgatggtggggaggaggaagaagacgatagggaggccggatctgaggatgatggatcgcatggttatactcctagcccagctagggtgaaatctggggtgggctctcatgtttcgcccgtgcgcccgcaagacattgctggagcgaatgcccttctggcgatttctagctctgcggcgaagccgggagctgttgccaggaagaagaagaagaaggggaaggttgtgcaagttggctgtggcttttcggacagtgaggggtccgatgggatgcccacttcgccgattctgcggcgcattcctcctcgggggagactgtcacgtcctgataaattcatcccgaattaaaaatcattcgctaaaaggaataatagagttaattaaaattcgaaaagaatttggcaaacactaaaatacgtacaagaaaaattcgaatgtggcccggagaatttttgttaaattatccttggtctaaaaggagccctcaaattttacttgaattttcagagcaccggaaataattattaagcaacaaaaacaattatcaaagtttatttaaaaagaaaaacctaaaaataaccctccttcctcctttgggccaagtctggcccaaagtcctccctctctcccctcggcccgcggccgaagtctccctctcctccctctctttctctccctctccttctctccctcctcctcttgggcctcctcccctcccggcccagctccctcccctcccctctctctcccgggcctcctctccctcctctcctcctgggtcgcctcggcttcgcccggcccaagccgagccgcgcctcccgcccgtgccgcgcgcgtgcgcgcgctgacgccgccgcctgaccgcgtggggcccacgcgccaggccggtcgtccccttccaaccgcccggccccttcctctctctccctcccgtgcgaaccctagcgccattcctccctcaaatccgcgcgattcaagcatgggattcccaaattgattagggggaattaatcccctttccctcctctctctttcccccttaatttccccttgaatggtgcccccaatcgccggaaacggccgcgccattcccggccgccttccattgccgccggccggcttttccgccgccgttccccgctcctcccgtgcccggctccctcccccatcctataaaatagaaccccctctttgcgttctaccgttttagtctcctcccgggctctcccgtggtccctagccacctccccgccgtcgtcccctccctcccgtgccgccggccgcctccagccgcctctccctcctcgccggagcgccgtccggtcgcgccgtcgcctcctctagcatcgcagccgcctcctcttcgccggcctaccctctgtctcccgcggagacctccggaagtgcctccccgccggcaaccgtggtgttgccgccacgattccgcctccggtcgcctctgccgcgtccccggtgcgccggccgacgtcgccaccacctctcccggcaccggagtgccgtcctctttcccggcaaggccacggcgtcgcccgaatttcgccggaacgccgtcgcccgcgtcggcctctccttcctcctcgtcgacgtctcctccggcagcccccttccgccgggcccgtgcatcagccggcgctgccgtccctccctcggcatggtggcgtagccctccacctcgtccacccctcggtttcgcccggaagccgccgcacatcgccgcgaacctctccctccacgccgtgcaccggtcggccacacctccaccatcttcggcatcgcagccgcgacgtcgtcctcggcctcgcctcccctccgaccgaacaccgccggtgtccgtcgtcgtcttcaccgttcatcctcgccggctcgtcgtctcgcggtgccgcctccgtcgtcggattcgcagcggcgcgttccacgtcgtccccgtctccgtgcagctgccgccggctgccctcatcgtctcctcgccggccccagtcgtcgtcgtcgtcgtcctctcgtcgttctcggtcgtcgtggcgttcgtccctccgtcgagccgttctcgttcgtcgtcagcgttcgtcaagcgagccgcggcagccccgtcctcgtcttcgtcctcggctccgcgtcgtcaagcctcgtgccggccgcgtctcgccttcgtccaaggatcgccgccgaagccgtcccctcgccgttcgtctccgttgtgcccgtctgtctccgccgcgcccgttcgtcgttgtcgttcccgcgcctcgtcacgtggtggtaaggatccctctccctcgctgccctgtcctcgtcctttcggtgtcgcccgtgctcgttgtgcggtcatcaaccccggtacccgtgtaccggtgtcggtagtcgttcacgtgtgcggatggtgaccgtgtagtgtccgtgttagtgtgcccgctcggtagccgcgtggtttccacgtgtgcaacccgtgtggtgtctagtggagtccgtttgtcggctactcgcctcggttgacacacggagtccgcttccgtcgacccgtggaccgtctctgtgtacccggtctaccgcggtcctttaggttgacatgtggggtccgcatgtcaacggcgcagccttcctgtcttttccaggctagcgcttacacatgttttatggttgcaaagcctaattataataatccgcaaatctccatataacagcactaaacttcggatgatcatatcttggtcatacgaactccgaatcgacccgttcaagtctcttaatgtttgttataacctaaagaaccctgtgctttctttttatgtattgttattgcttctttataggcttgtagctttgcttgtgtgcttcgcgtagcttctgtcattccggaggttcccgaagcgtggtttgcggtcgtcgccgaaggttcggaaggccgttctctctgagcaaggcaagtcacatcatccttgaacatattgaatcccagtttataaaattattttgatttaaattattgcattaacgctttatttaaattcccgcgtgatcactgttttatttagccatgcctatttacctttgttatgaccttaatattattgttattgatattattaccttgttcaccctagattaaacaaaaccccaactagtggacactctattcatggttccacaagtatgaatttaggtagatgcttcgctgattaattaggcaatattaggtggttttataactttagactttgggaattctcatatcacctggacactatggaattgttggtttatggtggaattggacatacacctctcttcctctttcaaaacccctaaaacctgttttcggtggggtttgggtgcatgccagttgtgggaagtagcaccccggccactataaggattaagctcgggcctctgttgcaaagcactaccgtacttccacatgtctagtgggtaaggcttagtttgtggctcagtctggtcataaacaaaagtacacggatggagatggatgaagtcgggggtcgatggacattctctaggacaaatgaaggctacacgagctgcggcccggtagtcgagatgtcatggcacagggttggtgccctgctgctaggggctcagtcctgcctgcctgtcccggaggttccggccgtaggtgggattgggtcggtactcttgtctatggctaggatgggttggaaactatgtcacgtcttccgtctgtataccgtggtggtatgtggcacgtggttgcacgtgaggaagatgtgtcttgtgggtaaagatgtacacctctgatcagagtataatctattcgaatagccgcgccctcggttatgggcaagccgagcaatgtacccaagtcagtgttttaattcttaaaatttgctcaacaactaaaatgtggaatggttggcctgggttggcttgggacgagctgggacctagggtcgggttgccagttcggtctgaatcatcgtaggccttgggttaaggcaggttcgtgagggttcacggccttgattaataattttgtgtagctctaggatcgtctttataaaatggctttgggcaactaagtgacttttaaatgctgtttactgcaaaacttaacccctatattattatccccttgtacccccttgcattaattatgcatctccggtgtggcttgctgagtactgtggttgtactcattcttgctcaatctttcccctcttcagtaagagaagctttggagaagatgtcttaggtggagtcctggcttataccccagttgagcgcctgtgaaggtggagccgtaggctcgctagtccgctgctgtttatttttgattgtcaggcctgaagcgcctttgtaataatgtaaatattatcgatataataaagatgtgtcttttatatcatgtttgtgtggtgtaccccggcttttcctgggacggggattaatacacaagcgttcgggaaaaggcaattttcctggtcgcgacaagctggtatcagagccatctcgacggtaggataagccaagtggataaaacctaaggacatattttataaataaaactattggcgaaagttcctttttctccttcccctaatgctatttgcaaaatggtttacttttttcttccttcttcaaatttcaactagtactagatggtcagctttgcgaagaagaagatgtcgccaattgtttgccgaagctccggaagactgcaggatccgctagcgaagtgtaggaagcagtgaagccagctgtgaagaaggagtgaagatcttggagaaccagttgcagaacctaagccgccctctagggtagagtcgttagttgtgtgtttccttgcttgtgtgtgtagcgcgtggtttgcatcagtggggtgtgatgtaaccatgctaggttgtttgcttaatcaacctgcagaataagcaaaacaaacaacacatcaacaaaaagagttagttcctttaaggtcttgtccctagttctggtcgattctttccttgtatgcttcccctctcaacctctaccttgtgacagatggataacactggtaacaaaggctatgggaatgatggatccgatgactcaagaacccaagccaatgggaatgagaaaagcataaacgaaacctcaccagagctaatccaaattgtggttaaccaaaccaacatgttggcaacagcctttcaactattacagaattggaacaacccagcaggggcaaccaacgttcaagtacctacagtccagcaacagtgcaagttatcagaatttctcaaaactgagcctccaacctttgccattgccgtcgatcctatggaagccagtgattggttgcgcacagtcgagaagaagctagggttgattcagtgcaccgaccaggagcgggttggcttcgcaactcatcagttggttggaccggcttcagagtggtgggatagctacgaagcatcacggccagaaggacataccatcacctggaacgagttttcatctgtattcaagagatcacatgttcccgcaggaatgatcgcactaagaaaacgagagtttcgctacctgaagcaaggagatttgaccgtcacagagtacctgcacgagttctatcgtttggctcactatgcaccagaagatgtggaaacggatgaagacaaacaagagaagtttctccaggggttaaaagatgagcttgcagtgcaactactcctagaggattatgaagattttgagaaacttgtggacaaagccatgcaacttgaaagtgagcataatcggatgacgaactgcaagagaaggattgtcaacatcccagtatttccaggtggtaaccaaagacagcgcactgagccacttcagatcaccggatcttctgttgtgcatcaagaattcctgcccgaagaagatggacgcaatgcagacaacaacactagcaatactaatgatgatgataccaccaacaaccatggttcttgccccattagtgaccacccgaataaagcgtgcaatgtcagtagcattcaccaagatgtcaacgatagtatcaatgttggaacccagaatgacaaccttagcaattttgacactgagaaagactccaatggtgatagcaactatggtaccactgatgccaatgttagcaaggatttccaaccaccaattccaactccaagtcaaaatgatcgtccccagatggacagctcagtaaagaagacgttgatttgttacaactgcaaagaaccaggtcatttctctagagattgtccacagccgaagcgtaacctgcgccatcactccggccattatgcaagaagaagacaagtcactcgccttgtggtcactggagcaaacgccgtacctgtgaggcctcatgttaatcctaacccatagtagaaacaatgtaccgatgttaagcatcttcccttttttgtttaaggtagtgccttgtattcatgtaataagggagacatgtgtgataaaaacaagttctatgaggattattttggaagatgctgatatgggatcatgcgtataattgtttactgtcaaaggagacctagggtctcattccagaggaactatgttctaacctcgagttaataaccaacctgatgatggaaaagaaaatcaagcgattaaccaaagaaacatttgttggactaagagtttcagatgtgtctttttcggatcaaaggcaaagacagtcagtatagcttttggcgaaacacttcaaggtttcactggaaggcagcaagccaaaggacctcattgtcaccagaagcatccacaactctcggagtggagagtacttggttgacaaagtttaaaaggtgattgatagaagataccagcaaaggtgtttattaccgggcaaagaagtaggtcgaaaggtgattgataagagaaatcgggaaagaacacatcaaggttaaaggtgtaaaggaatacgttgaatgctaactgaggacaacctgaaggtaatagtgggaagtaaactgaatgtaacgaaagtaaatccgagctgcctgttcgtgggaactattcccagttatgaaccaagtgaaatgttcgaagatagtctatagaggtcagattaaaatcacacctaacaacgaagcttcagatttggcaggaaaatgatcagacaataacaagttcagcagtaaagtcatttgggaagacgtcaaagcatgtcaagtgggataatttggttaccttgggaaacataattcaaaggcaaaagttaccgaccctcacattgaatagaggaagtatctagcaccggagactaggaaagctaatatgaggcagttggtgcaagttagaagtaaatgacaagcatgatattcttatgatgacaaacatggtatcctagtaatgacaagctagtgttgacgcatgacatgaagtgggtaagttgtatgaggttgacgccaaagatatgaactatgcgaagttctggaactgaagcaccatcttcaagtgccgcaacccagtcgaagtcagctaaaggttcaaccagggacaagtcgggtgaagagaagattccatctgcaacaggagatcgagccaagcagtccagagtggagaagttttgttaggcaagtttgttatagaagacggagcggaaggagtcagacaagaagagaagaccgcccaacctatcctcttgctagcctcctcgaatctcggggacgagattcctgtaaggggggtg

SEQ ID NO: 24178 - DNA, 4984 bp, Oryza sativa
aatggttggcctgggttggcttgggacgagctgggacccagggtcgggttgccagttcggtctgaatcatcgtaggccttgggttaaggcaggttcgtgagggttcacggccttgattaataattttgtgtagctctaggatcgtctttataaaatggctttgggcaactaagtgacttttaaatgctgtttactgcaaaacttaacccctatattattatccccttgtacccccttgcattaattatgcatctccggtgtggcttgctgagtactgtggttgtactcattcttgctcaatctttcccctcttcagtaagagaagctttggagaagatgtcttaggtggagtcctggcttataccccagttgagcgcctgtgaaggtggagccgtaggctcgctagtccgctgctgtttatttttgattgtcaggcctgaagccctttgtaataatgtaaatattatcgatataataaagatgtgtcttttatatcatgtttgtgtggtgtaccccggcttttcctgggacggggattaatacacaagcgttcgggaaaaggcaattttcccggtcgcgacagagacgcatgtccccagcgcttgctagtgacgccgaagctgcaacgagtggaagtgcctcggctccggccgctggagcgaacgtctccggggacgaataggttgaggcgattccttcgcaagctcgtcagcgggaaggaaaagctccggcggtcgaaatgactttgtcggacgtgacgcttactgccccgcacttcgttcccgtggatttcgccacgtggccggagatcactcctttcatggacggggtgtgccaagttatcgcaccgtccgatggccttggcctcttcaccgagctgaacaaatttggcgaaagttgcacggccgtggagagcttgtttgtgcgggtatgaattttctgtctgcagaattttctcatttcacctatgtcacgccataatgtatttggttccccttgtccagggcctcgccgcgcacttgagtgcggaaaagtctgccttggagaggccggacgggtaccgtcttcgcctccgaaaaaccgaggaggatctttgccacaaggaagacgaaagacgtgttgtggcggagaccataaaaaaggcgaatgcggaaaacaaggctcttacaggagacaacaagtctctccgcgccgacctagaggcggcgaactagcgggacgcagaacgagatcgccaacttgctgcggccgaggagaagatcaagtcccttgaggcccgtcttatctcggccgaagctgctgctgtgactttggcgccggcaacagagtcccccaagcaagtctgttatactctcaagctggctctgtatgacctcgggacacgggcggagggcgctccgggcgacgacgggacgacgttcgacttctccgagaggacgcaggaagcggccggctcagtcgtcgaagtggcaggtgcttatggtgactgttgtgcgcgtgtttcggcgggcttcatccttagccagctacactcacacggttgtgaccacattgggatctttcccgacctcgtgaaagaagaatgtcctgacaattcacagtgttccggaacggccttaagggccttccgaaaaggtttctaggaggatggcggccgggattgcgcgaagacacgccttcgcgagaatctcgagaggattgcaaaggacgaagccactaccactaacaccggaggggaccttgggccgtcggaaccgggcgccggacacgagggcaaaggcaatggaggccaagaccaccctgaggtgtgaggccctcgtgtgactcccaccttttttttctttgtccttttaggctttttggtagtcctactatgtatataggcgctttgcatgttcggctttgagccgttttcatcttatagccattatgacttttttattttattaatggaaaagttaatgctttcgccaaccttatgattttgttggaaagtgggattgatttcgtccacatttttccttttgcacttgttcttttgtgctttgtcaggagattcgtggccgaaaaatgggcattcggcccccacctgaaagttggcgaaacaagaacgagaagttcgtggcggttaaaggattgctgaagaccaagtgtcgttttcggcctgtttaccatgaaatgttaataaaaggcaacagctacatggttatacgggttgccgaatggatgcgtgcacaccccggtcgaactttgaaagactatgacaggtatcgtgtaacgtatcgcgaagatagcgcaattttctagcgaaactttaagaggtcgtttctccaagaggctatcgctcgtcgccgttacagcttagtttgcttttggccaccgtcccctttaagggttgtgtataatattagtagcaacgatgaacctaattcgccgattagtaacttaattgagggcgaacatgtaactggtgatgtaattttttatgaggtttttctcacgtaaatagaaaagttttgtgattttgtccgctcgaaactttgtgaattattgatcatagctttatgccatcgttcgcatagtcactctcgtgcttttgttatgtcggaacatgccggcccccactacgtactatggcgaaaaggtatgcgtcacaccgaaaggcgtggttctctcaatagttgttggaaaagtaaggcaattgtattgcttagtaaaaaattatttggggatccccctattacatggcctagaagggctatttataaccttattacaggttctctccccctagggtttaggctttacaggagaatttacatggttacccttatgatagggacatgattaggggtacacaatgtcctttacacgtatggccccaattgggctaaatggctcagcccattgatcttggcgaatccccgcaggggcgcaacagcccgttgggcttcctcacggtggggtttggtaccttggcgaaatccataccttcgggccgaggctttttgcctcgccatcttcgcttgcgtggcctcctgacggggccctgtccgacgaagcacgcgtacttcccgagccatggctttcgcccttagggtatccctcttcgaccttcaccgcttgcttccggtttgaacctgtcgccaagttttcggtttcggtaggcccggccgaaggcccttcgcggtatacctccaacgcaaacatgacatcggccgaacttcctccatcgatgaggatgcgccgaacttcaaaactagccatttctaccgaaacgatcaacgggtcttggtgcgggaaaagaactcctttggcatcttctggtccgaaggatattggctgtgaaaagtatcttggaatgctgtcagctgtagagacaatgctgagacaatgcctttgtgcttgaacattgccttgctgccgaatgtttcgactctgctcggtcgtgtgcgaagagcgtccgtgaaaagcgcattataagttgtcacgcccggaatttctatccaaaattccaaacgcttacatgtgtgttaaaccctcgtccaggaatcaaccgaggcacacaatgacaatttgataatagagtacaaataaataactatttaatactcgcaaataaaaattattacagaggtagacagttcctctcaaacaaaaataacattctacgcagcggaaatataaaacgataacaaactacggaacagctatggcgactccactccacaggcatcttaaccaagaacaagcctaatcctccagatcatcaccttcactgagatactcctcttctgatgaatgaatattgcaagaatgagcgtatgacatactcaacaagccacacagcaaatatgcaagtgcacaggataacaaaggatggcataatatagctcatttgcagaaaacagcatttaataaatatataagagaataataaaaacagttgaataattgatcaatattaaataacaccatacaacacacccatgttgcataggcccaaccacatttgaacaactaaccccagttgaacaaattaaacctccaaaccaggaattaaccattccaaaccaggagtcaaattatttatcacattattaacattgatgagtagtgtgaaactaatcacgaaaaacattgctcaactcacccataaccgcgggtacggctattcgaatagtttaaactctaatcagaggtgtaccactgtacccacaagacacaaccccacatcatgtcaccatgtgcctcaataccaccaccgtacctcggaaaggagttgtgacaataccccttgcacaacataacccattacagcgcacctttcctggatcataatcacccccttataaacaaggcatggactccccagcgacccccgtggacttctcgccacttctcagtctggcgcactataatgaatcacgttatacaaaagataaagccgttgcccacgctggcttgtggttggcacgataaatgtttcacaacagtagctcgcgaaccggtccttaattgtcatgagcacaaccatcaaaaccatatgctcacaacccaccttagccaggttttaattaccaattaattatcatcacacgatttaccatcgtgagctaccattgaatcaccataattgaataataatataatataatttataattaacccctttagttagctaatgtttctaagcatggctaagcaaacttacatatagcatttagctgaaccaatccaatatataaggttcatgctaatcaaattataacccataggaaaataaagtcatcttcggccaataattaactgggaaaggttcaccacccgatgacattcgaaaacaatgcatagttgaaataaaataatagctttaaacgggttcaacatgctcaaagggttgtttgggatctgtgtgacttgccttgggcttccacaaacgcttcggaaccttcctcaacggaaacgctctcctccggaacgt

SEQ ID NO: 24179 - DNA, 6582 bp, Oryza sativa
tgattttccgaagttttaatctattagaaaattggaaaaaggaaaaagaaaaggggatgatgacgtcagccctgatgacgtcagcatgacgtcacccacggccgattagggtttgcgagctcgccggagctagggacttcggccgggcgattggaggacaccaacgcgaagaggacatcgagacgaacccgatggtacttaccacgacaacaaacgatgcacgatgacggccggcgacgagaagaggcggcgcggcggctcggcttgacggcgtcggcggagctccggtggtcggcggcgaaggggaaggggcggccgagattcctctcaccacggcgcacctaacggcggcggcggcaagcggcggcgacgacggacgcggcggcgcgacgtggccgaaagatggccggcggcggcggcgactaaaacgacgcggcgacggcgctacggtgcacgggaaagctcgggagagggggcaaacgaaagagaacgacgaggtggtcctttatataagcttggattgaagagatcgaactccaaacgagagcaatcgactcgggaaagattaaaactcggttttagggataaaatcaaaacgaactcgattcggatcaaatcctcaacgattctctttgattcttgggggaaaagaaagaggagaacgagaggaacaaaacccctcaaaaacccggaggaatcggggtcggattgaggcgaatttgagaggagaaggaggcggctcgtgctcggactcggctagggcagccggccggaggtaggggaaacacctgacaggtggggcccacctgtcagtgtcccacgagagagagagcggcggcggcagctgggccggcttgggccgcgcgggagagagagagagagagttgggccgaattcggcccaacggcttaggaggggatttttttaaactttttgaaataaaacaatttgtgaaatgttgtttcaattattaaaaatacttcccttgctcaaataattcccagaaaaatctagaaaataaaggagcaagcatagtatttaataaaattttatctagctcatttttatgttgaaaattttcctagaaaattagggtttagcttgtaggcttttaaattaatttctaaaaatgatttaaaatatgcatttttaatttagtcgatttttagggcgtgacataagtctttcttgaccttcttgtgaaaaggctgttgttgcccgcccgcttgctgggtgtcgaactccttgcggagggcttgtacctcttcgaccgccatcaccgttttgctagctcactcagtcctgaatttcttccatgtcatgggtgcttggttcggcctggggtgcagtacttggttcgccagagatgctgggtgaacttgaactggtgctgaacttacagcttgagcttggacctgagcttgggtgttggtttggacggcggctgctgcagctgttgctgccttgtcatactcggcttgaatttcttccctccgcttggtatcttcttcacctcgagcatatccatcaattatgcaaaagaggtgttcaagtgttctgggttctttacgcgcgagtttccttgtgagttctccctcgagcaagctggccaaagcggcatggataacatacgcttcggttatatcttgcacttggcaacgcgcttgcgaaaacaggcaaatgcactcccttgttgattccccttgcctttggcgaatgcccataaggtcttgttgtgttttcggctcctcgcataggtacctcgaaagttaagaacaaaaacatcgcgcaattactcccatgagtaaatgctattaacatgcaaattgaaataccaagacctggctatgccatcgagcgtgaggtgaattaccttctccttggtgttctcgtcaccatgagcggcttcaattgcagatgcgtagatggacaagaactctttcggatctgtttctcccgatataccgtgggaccggagggtacttgaactggggtgggatgggatgattattgattccccagctgaggggcaggcccttttcggtcctcggcttgatcatagccccttgctgagcaggccaattcaaatgtgggtacggcagcgcgaacggtgaagccatggaatccacaggctgttgtgctgtgggcatcgactgaagcgctatgttgaacatcattgcctggttctgctggtctggagaagtgacctgcgctgccgcggttgggttgaacgtggtttgattccatgtttgattcggtggtggggctgatccgtatcctggaggtatagcttgtgcaaaagttgtcagtgcttgggccattgtgcttgggtcaaattgtgaagatggaccttgaggcgaaggccctcgaacttgacttggctgggcgaactgtccaaccagaagccccgccaatgcaccttgtcttgggctcccctcggtctgaaccggaggtgaagctctttgtacgttgttgctgcagaaaaacttggaattgagcttgcaaggtcgaagctgcttccatcattgcttgcggtgtataagtaggcttcgggtactgggcttgaggcgccgccgggcgaaccggtgcttggatcacttgatgtgttgggtgaacggcagcggctagggctggcctggcgaagtacaccagtgcttgcgcgacataagaaggaatgacttgacgctgagcataaaactgctgggcattggccttggcttgtcttgctgcttcgtatgcttattgcagctcttgcatctggcgaagcgtgtcttgaagttttgccatgttttgacgcatggcccccatgtcagcttcggcttgtacttcgagagcggtgttggcttgtgaggtggtgatcgctgctgacgtcgaaatcggttgggcgaaggccgtggctgagggcgtccctagtacttgggaggacaagaccacgtctctaacctgaagggccttcgccgctgccaccgccttcgccgcttccgcatcagtcgaagttttgggcgccgaagaagggagaggtggcagccctgtcgaaggcagtgctgctccggcttcacccacggaggccgaaggatctgctccctattcaactaccatctctacttcacttccgccttccttccgcttggcaactttctccttagtgaccttcttcggtggcatcagtggttttgctcagtctcagtggtttcgctcggaggtccccacggtcggcgccagctgttgtcgaatagacaaccgcgtcacactgaaagacgtggttctctcaacagttgttggaaaagtaaggcaattgtattgcttagtaaaaatttttttgaggatccccccattacatggcctagaagggctatttataacgttattacaggttctctccccctagggtttaggttttacaggggaatttacatggttacccttatgatagggacatgattagggtacacagtgtccttcacacgtatgggccccaattaggctaaatggctcggcccattgatcttggcgaatccccccagggtcgcaacggcccgctgggcttcctcacggtggggtttggtaccttggcgaaacccatgccttcaggccgaggctttttgcctcgccatcttcgcctgcgtggcctcctgacggggtccctgtccgacgaagcacgcgtacttcctgagccattgctttcgcccttagggtatccctcttcgaccttcgccgcttgcttccagtttgaacctgtcgcccaagttttcggtttcggcaggcccgaccgaaggcccttcgcggtatacctccaacaatgtcttagctataacaatcgatacaaacattatcattgatatagttatatatgtgaagcgtatattgtcattgaactgccccccgcacagtgttaaaccgccctccctaagtgcggtaaggggccgcctgcaaaatggcaggtcccatatagccagccgtttggcatgagccaacggtcgtctgccacgtcacgaaaatcgccctttgggaggttgattttaaaaactgccctcccaaagggcggcgggcgactagttttgtcaatttttgaaacacaaaattagttttgtaaatactttaataaaaaaattaaaaataaaaaaaattcgagaaagttgggtagtatcacgagaatattaatggcctagaccatgggaagtaggctttcaaccggcccaggtaccgccgatcagttttaatgaattttatggaaattgaaaagaatttctatcgaaattcaaccgtttcaatgtaacccacgaagttttaaataagttgatctagatttctccgatccttcatctgtttattaattttagtagcacattaaccattgccacgtatacaaatgtgagaacaacgaccttggccatgggaagcagtggaggtacagctagttttttttggctgcgagcctgcgatgtctctgtaaaatgtagcaccacttgttatatataagtttcttgtgctagctattggttattataaattactccctcgtattttattttattttaatgtatgacgccgttgacttttttacaaacgtttgacctttcgtcttattaaaaaaatttatgtaattataatttattttattgtgatttgatttatcatcaaatgttctttaagcacgacataagtatttttatatttgtataaaatttttgaataagacgagtggtcaaacgttggttaaaaaggcaacggcgttatacattaaaatatggagggagtatattgtacgaattgtatagcaacaactggagtggagcgccctccaagcaaacgaattatactgaattagacaggctgtgccttgattactacaaggtcaacactctctggcttgttaacgaacgagagcatctcgactgccctataatatgcagagctaaattaatgggatatgaagtttgatagtttggatagcatgttcaaagctatcagtaaatagctagttagcgaactgatagattaacttggttggttagctaaacttttcctggcgaaacatgcctattggggttctaagtcttatactttagcaagggtgttcatttttttctatgattagggttaagaggtagtgcattacatatgtggggtatgctcagttaaacttaacataagtgctcgtatgttcgtaggaatttttcagcaagtagtacatacagtttagtgttaaactagctgcatgtcccgcacaattgcacggccagcacccatataaaattatctatttttctttatttgacattacttagaatttgttaatagccattatattgtcctataaccttaaaagatcgatccttatcatccttaaattttttaaatttttatttaaaagttacaccagtcattgcctcttactcttttatcacccttttatttgtttacccaatctatcatagcttttgtatatcttcctttaaacctttaaaaaatacaccttctaatttttagactcaattgtctcgttaggttcccttattataatttttaggagtgttgtcaaatgtcaatattgtatttatccatgatccgcctgttgtctcccatatttattgttgttgggatttaaaaattaaatataactattgttggggttcatcttttactttaaatccgcccaaccgccgccagcttcgccatactatactcatgtatttttattatcattgagattttaaaaaccgaacatgattgtcattgtgacttactttttactttctagaagttccaccaactgtcgtgactatgttgtttaacggcttgtctatcgtctctcctcttaatcatcattgagattctatttgtagttttgtttatagtttttagatgtcgcatcaactgccaacaatttacttctttacaggcctaatgtttctctcctatttattgttttctatcatcgttgagttctaggtggaccttattttgaaaattccatatttttcatttcgatattttcttatttgtaaagtgtcagggttacgggtaaggtataccctctacccttcgatatacgccacgtattgatatggtatgctcgcgcgtatatggaagttttcggcatacgttaaggtaattcatcatggagtacataaatggaaggagtcctactcggtcagaactgggtcgtcattatgtcgtgtccggtccggcgtctccgagtcctacttgaagacagttgacctgcgatataaaagggaccctcgggaggacctaaggcatcgaatcttagagctaacacatccaccacagcctacgaagccggagcttatcggagccaagtcaccgggagatctagtcggatcaactcgactacgatctcgtcggtatcgtcgagttccactattccctttgtatctgtggtttcgatcatataatctcatatcaactgaattagggctatcatctaccaaggggcctgaaccaatataatccttgtttcctgtttgcttgatgtcgtactacgtagatcctcgtaccagcgtaccctaataccctctatatccggtctacgggtatccccatcgacataaagtatattca

SEQ ID NO: 24180 - DNA, 4659 bp, Oryza sativa
tgtctcccctggttattggtattggaaatttaaaaataaaattgattgttattgcaatttacaagtcccgccaaccgtcgtgactatgctgcttaacatcctatctgtccttccaccacttaatcgtccttgggggttctacttgtgattttgtttacaatttttagatgccccaacaacgtgactatgctgcttgacgtcctgtctgtcgttccacccaacgtcctgtctagttccatctcttaatcatccttgggggttctacttgtgattttgtttacaacttttagatggcccaacaacggttgaccatcttattgttttacaggcttattacttctcccttctttatatataattttttatctataaagtgtattcctatttgaactcttataattatttttctattttaggaattaattttattttttattttgaatattacttatttttatttttctattttaggaattaattttattttttattttgaatattacttatttttaattttttttctcctaaaattttattttttattttgaatattacttattttaaattattttaaatttcgaattcagatatttctaaactgtattctacttgaacttttcttttctttttgtccgattaatgtgagaatttctcgcctccacagcgagaacgtggtgtcttatttcaaggttgttttaataatctatatctatacctattataaatattcatatttttcctgtcgtcacatcgctcccttcgtccggcgtccaatcaagtgtcccacttgtgcacgcgcccaaaaaaaaataaggaaagtccgattgaatttgactcggtgaaaaaattccgtaaaaaaggcaataaaaaacaaaaaaatccgtaaagaaaggcgaataaaaagtccgattcaatcaggtagataaggcattcaatatttattcaagatatagaactccaacaatattttgattttgattgaaaactttagggatggagaatgcaccggagtcactaccgcaacggacgagcgccgttgttgctcccccattctcatcgcgaagtgtagtccgctgtcatgccgatgggggttggggaagtgtagtcgccatcgagccaagggaggatgagcactgtcgccgtcgccatcacgccgaggggccgccgccatggagctcgccatccaacgagaggcagatgacgaggggagaggcgagcgctgacgctgaccccacggccccacgccgccgctgccgacggcttgcaccgcgcgtctgctcagggaccaatctggacaacaacgtttgaggagggacaggatgggagacaggattcgctaccggtctgcgtctccctccgactccgcttctccactctccggcgctagcgtggcgtggccgagggcgaggggcgcgggcgcgcggcagcaaggcggcggcccgtatggcgtgggggcgaccggccggacctcgcctccgccagatccggtggagtggaggcggctgctaaccggcaggggtaggaggggcggtggcccggacagcgtggaggcggccggccggacctcgccaccgccagatccggcagcgtggaggcggctgcgtcccggacggcagggaggcggccggccggacctcacctccgggcggccgccgctcctcccgccgcatgcgatcgccgccgctgggccgcactgtctccacccgtcgccaccacccatcgcctgccgcctcccctcttgcgccgccgcctgtcgccttggctccgagagagaggagagcgagagaaaagcgaacaagaggaccgagagagaggagagcgagagaaaagcaaaccaccagatctggcgaccccagcctcctcgctggctgatgcgacaatggtacacgacggtagcacggtgcgcctcagcggtgcgtcttggtggcggtggagggaggccggaggaaggagggtggagccggggcggcagaggagccggcgatggagatggccatggcagtggctcgatccaggcgaggaggggtgaggccaccccaatccgcttgacatagatcctcctcctcctcctcctcctcccctgctccctcccgagatctcacactccatccaacattttctctcgcgagcacaccaacgcaggagctcgccagccggccagatccagcgcctcatcaaagtcaagccagagacaccgagcagcggcatgaggatgcatggggaaggtggtggacagtggaatttttttgagaattaatattatttttatggaaaatcgcaaaagtagtggccaaccggggaaaatcgcgaaagtaggtccctgtcgaacgggtgcaattcgatagggcacctatcgaacgacgggcagtcgacaaagcccagtcgaacggctggcgttcgacacgctcacctgtcgaacggagggagttcgacagggcccaccacccggcgccacgaggcctgtcgaaccgggggcgttcgacagggccctccaccgaccctgtcgaacaatgggcgttcgacaggccggtttaaagccccgtccacccaggccgcgagttcgatttgttttgaggaccacatcgccagccaccaccgagagtcgccacatcgtcgccgtgagcgccggagggagcgaggggaggggatagcaggccggagaggaggccgaggaggcgccggccgggagcaaagggttggcaacgccctccagcagtgaagttaaggtatacattagtaatccctaagtacaatgcatatgaaagtttaataaaaaattggtttaagagttgttaattgtttcgcattgttcgatgttagtatgtatggttagcacatatttgttattgctaaatgttggtagaggtatttaagtaattgtacggttaaattagttcttagttagtacatattattgatatgttgtgtgttaaaataggtacaaaggtgttatattttatttggattattaaactagttgtttgttactaatagttgtaaattagtacacggcaatatagtataagttgtaatagggtaattatcgaatgattaaatgattaaacgtgagactatttgtcatgttttatcaggatgtcaggtgatatgcccattcgtctgtattatggcgattctcctatacaaatatgtgatagcggggtggatttgactgtatatgccttccatgatactagtctgaatgcaccggagcatatgggtttgaacgacgtgttagggtggttgtataatatgtttggggtagatccagtgcacgataaatttgtcataaatgccgtgtggccagtgaggggtcaacatggatggcagtggagagtagtggaggttgcgtcaactgggagttggaggaagtttgttagtaaagtaagggagaaaggctatagcctggtaatagtggtgcagaagacaacatgtgttgatcaatcgggggagtcaagtcatgccgtggtggaagaaactccgttggaaggtggacaagatgaaaatatttggcggactgaacaaggtcgaggggaagaagtagtagagggtaatacacaaggagaggtcattgttcgtggtactaatcgtgaggccaacgactcggacgatgaagaaccggattcgcctatgcgtgttgatgcagcggaggagaatgaggcggtagtggatcagatgaaagtggaaaacgaggaataccttgcgcttgtagtggaaggagaagatacaacactgtgggacaacgaaactaacatacccgatgattggacgaccatatcaatgagtcgtatgaaggtaaacgatggtttagatgcccactggtgttatgatagtaagcaggtgaaagttggacagatgtttcatgaaaaaggtcacttacaagatgcggtgaagaggtgggcatttgtccagaagcgtgagttcagggtgaaggtttcaaataggacgacgtatgatgtgaagtgcatacagggtggatgtccttggagagtgcatggttacaagccacaacatgacactttatgggtagcttcgagggttgagcaacatacgtgtttgttggagaatacccgtctggtgcacagaaacctgacagcggcatttgtggcacaaatggtatattcaaaggtggttagaaaaacatctttgtcccctttcaccataatgcatgacgttgagaaagaatacggatatgagatatcgtacgacaaggcttggagggcaaaacagaaagcattggagatgaggtttggaacttatgaggattcttatcacaatcttcacccactattggaggtgatgcaggcaagaaacccgggtacacacatggctattctcgatgaggtgaatgaatatggggagaatgttcttcgtcgggctttctggtcatttgggtccatgatagaggcctttagaaattgcattcctttgctctgtgttgatggcactttcatgacaggcaagtacagaggaacaattctaacagcgatcggagtcgacgcggatagccatgtcgttcctgttgcttttgcatttgttgaaagcgagaacacatcaagctggctatggtttttgcggcacattaaaatgtgtgttgttgaaaacagaccaaatgtgtgtgttctgtatgaccgacacgccggtttgctatcagcgatacag

SEQ ID NO: 24181 - DNA, 703 bp, Oryza sativa
agattcctgcacccttatcttctaaaatagagttatatagaattatatgccatgaatagaaagagtaagttcagtaatcacgtaccatatttcagatacaccatttctgatgcagggcaactgaagccaagagcaaccggagttcagttcaccgatgagaatggaggactccaccaggcattcctcaacagcaactgtgatagtgaaatcattgtctctgctggcgcaattggcagcccccagctgctattgctcagtgggattggacccaagaatgaccttaggagccataaaattcctgtagttctccataacaagtatgtgggtaaagggatggctgataaccccatgaactccatattcataccgacgaaaagcccccctcgccagtccctgattgagactgttggaataactgaagctggtgtgttcattgaggccagtagtggttttggccagtcaccagaaagcatccattgccaccatggaatcatgtccgctgaggtatgtcatcaatcttacttgcatcatgagaagctttttgtgcataaaataggtctaaagcagtatcacaaacatcaggaaaaagctgctgcttagatctgcagacttcaaaaaggaaaacagattctaaagtctaaactatcaaaactcacattttgcaacattgcaaacacaacttagaccaattcattaattacag

SEQ ID NO: 24182 - DNA, 8483 bp, Oryza sativa
gttagagtatcaccaacaatactccaatattatcctcaaaactgattttgagggccataaggaccgcatgatctatttcacacggatggaggaaaactgagaattttgttggtagtttgatagaaatgctcacttttatttttttaagataaaatttagtgtttctcttggagagttaagcttttttgtactttctatttttagtttagaaagcataaaacaaatttttagagagattatatataatctcttggtgatgctcttaaaaaaaatttcatcgtgataaggagcggagggaggggggaagaaaatatttttccaaacatctagtattacatctagtattacaattgacacttgcttagggtataatccataaattctggtttattttaattttttttctttctttctcacttaaatcccaggatggtatctctttcctggatgttggatgggccaagaattcagtcttcttaaataggagtttcaatatactccctccgtttcaaaatgtttgacaccgttgattttttagcacatgtttgaccgttcgtcttattcaaaataatttgtgaaatatgtaaaactatatgtgtacgtgaaagtatatgtaacaatgaatcaaatgatatgaaaagaataaataattatttaaattttttgaataagacgaatggtcaaacacgtactagaaagtcaacggtgtcaaatattttgaaacggagggagtatttgagaaaaaaggtcggtctatcatactatctttactggttctttatatggtgccgggatgaactgaacgtttcacttaatccagctctggccattaactgactttgtgattgtagcgatttggtatttttatatagtcgggtctgaatagccatcttttttcacctaaagcagcaattgtttatgaattttgcgatttcccgtaactatttgtgcgagatgttccctctagtatgaactagtcttcacttatctggccttcaactttgtttaggaacaatggttttgttataaaaccagctccgaaaacgacatcggaaaccaaacgcggaagaaaacgtcataggagatccaaaacgatgacgacaccgaggcacgatatttgataacggagttcagctgaagcctacatctccgaggcactgattactgacgctcctccccaatccagcatatacagcatatcagagttacaacgactcacgatcggtcgccgccggcagccgctccctctcgctatgctaagtcgtcatacggttataacaggcacgcccctctatttatgagagatcctaggatagagtccgactcatactctaatcctggtgacctggtgacctggtgactggagtctggagcaggcaaaaaaatcatgcttggagttggatcccatgcttgggtttacctgtaaggctgacgagggatttcacgatgccgagggcgcctttctcggagatcacaaatgatttctccttcacaaagctctgtatagcttcttggtgtcgtagtctagacgctcttgatgatctgcgacattagggaatggaagtcatcagtgttgtctcgaggaactaaatgaacacaaactgttctcaacagtgaagggaaaacatttcaagcgcctacataatcatagtatgcaagaacgtgctgaagttgaggcaagacctgaacttgtttaaccccttttgtgatcatgcgaggcgaggctgcatagagaatatgtggcatacatgcagggattcagctactaactttagagcaaggataatggtgagctataagcaagctatatgcttatgtggaagagagagataaagaaaagtggggagtgtggctctcatgcaagagctagctccacacaagctccaagaaatatacattaaattcatagtgagataaagagaagatgcaaaaataaagccaaccttacagctaacctattatacatgttagttttaacattgacttatagtaagtagtgggatgtactactaaacttgctcttaatgctatagttacgagatctcgtaatatacacgtcgttccgctggagatgtatttttgggctattggcaaatgtgagtaatttgagaagcacgacaaccaataatcctcctggttgataaacaacggcacgtgaataaatatgaaaacatgatcctcaatagacttaatggtagaggcctaactccaaaatagtaaattgaattgtacctatttgtttagttcagggaggtacctttatcaaaaacaatgtgtgctacatgaaatggaacacgagcaaagatatctgatcatggaaacattagccaggtatcctctttgggattgtgatttccgcgagtcgagcatatctccgtaaccagcagcttgccagaagttccttccatctccttcattataacctcgaagggagatggcacactagttttggttgtcctagctcttttccggagcgttgttagcgcttcctgttaggccattcacagtgctatgcgctgccattcggcctgaacgttccatgtacgtaaacagtgaaaatttgctgccacgttattggttgggcccagaaatctgaagcgtgcgtgaccaaagtttgctgcctgtgcttcgcttgaatcgagattggggaatgcgtcgcgggcgtcttttggaggctaaaacgcacttctgaccttgtgtcttttagagttcttaagtcctgtttggcagccgaggccgaacaaaatttacggcgcactgtgagtgcccttagaattccttatcttgtcattttccactaactgatcgtcgcagaataaacaaaaatcagaagtgatcagtatcaagactcatgtaatatttttacaagaattaggtcagtcagtagcacatataaacctgatgtcttgccagaagaagttgctctgcatcagtttcgatgtcaactagagctttttgaagttgcttcattttggggtccattataaactacaagataataccacttatttcaactacaaaataagaactacagaaatcagcatagcataaaaaatgcataaaaggcttcaaaatctttatagttccattttatataaatcccctttgagatagagccaagaaaagaatgcaaataagcgcaacggaaataatttgaaaaaaaattattgagttatgacttatgagccataaaaaagtacttttgggtttatgccaccccaaagtatgacagtttgaaaacgacaccccatagatgtaatggcattgatgccactccaaagatgtgtcactaaagttttggcccaagtgtggtattagatagtaccccagaatttttttgttattttttgaatttggccaaatccttgcactatcgatggaattctcgtccttaaaacatcccagcaaatgtccttaatgcaaaccatatcatgaccatagtattataagaatttcagtcaatttcaataattgactgaaatgatattgttccgtttctacatatattcttgactttggctagatgaataaaatgatatggttcaggatgacgggatacaaattttaagaatattcctaaaatagttatacaatcctgttcaaggaaaaaaaatgaatgacacagctcacggaagtgacgaatggacacagttccgaaatgcacaagataaaatgaaaaaatggacaaggaaactgaaaacacaagcctccttttttgccactaaaaaaaatctcatttaagacttttttttgtttcttgaatatattgaagtactgcatgcaaaatttctaaatttacaatgaaatcccaacaacattcctaaccaggtcataacaggtgtaggtcacaatggttgccagatcgtgctaggcttaaaaggcaagtcaagccctcaccaaagtcccaaaaggttgttttttccgtttcatctatcattagggccttcacagtgcaggtcacgtatttgctggatctgagataccacctaggttcaagccttttgaaagataaagctttgtgtgactcaaatagatccaaagccacgcatgacatacgaggaggagggtgcgcagagacgtacgaggccgaagctactcactccacaacgcgaccacctcgtgtgttccttcccccatgctcgaagaaccggtagccttctttggacgcgcacgcttcgttttggtgggcccggtcaaaagacgtggtgtgattttcccctccgcgtcgacgtgggacatggaggctgaatgccacgacaccgcattgtgaacacccttagtgccagacatattttatgttttctaaatcgttattcataatgaaattaatttttaatataagattagcttgtagattttataagactttgagccagacttatgaacctagtctcacccatatctcacccatttaatcaacctaatcctaccaactaaacaactccatagtccatacatacctcgcaaccaaacaagtaaatgaatgatttggttcataaaaccaaccaagcatggactttgtaaatcacatcccgaactattcatccttgttccccaaccaaaacaagcccaaaaatatacaccggaaggaaaatatatagagcatttcacatttgcagttcaaaatatattacctacctatattactagcaatcaaagtttcagccttttgggtattatgaccttcatctagtgtaatagagtagtaataataagctagtaatccagctcttccttccacaaacaagggcattgcaaccaagcaattctaagatatgttttgaacaagtgtcccacactgcaaaagagaggaggaatcgagaaggcaaacctaacaaaggggaactagagaagcgccgatactgtacgccgccgacaagaggagggtttcctggacgggagaaatgccggggccagcagatgcagccaagaagccgcccacggcgcacgcgtgattttctcgcctttgaccataatccgagcaacccctctgacatcagaggggaggacagctctagggagaacaagtagtagcgcggtggtcggcggcggcggcggcaaacgggatgtgagtggacacctcccgtcgtcgtggcgacgggtgaaatttcatgagactccctatgttctaaaacaatcacgtatttaaaatgtataccaaaatattctattaaccatataagcacttcaaacaatatttttgagactaccaaagtcttttctcctcgaccatcatcacttattttgaatttcttgatcaaatttctttgtagagtaaattgcatctctggtacacgaacttgttaggtgggtgcaatctagtgtacgaacttgtaaaatgcttgttttggtgcatgaatttatctggagcgtgcagagaaggcgaaaaggacactacacggctaattttattgatttaggggctcattaggatactatgtaaacatgtatctgagaaggttgctattagataaatacctcttcaataaaaataggatatagggatcatagaaaaagataaaaaaaaccgagtaatgatataagggttagaaatatatgaaattcattaattccatgatgaaggataaagtatagatcaaatttataaatattacatgtcttatatatactcactatacgtatgcacgtcacatcctaatcaacatccgcttcgtaaaattaacatttcgaagctattttggtcctcgttcgcatgaactaaacaagttcgtgtacctaaacaagcatgttacaagtttatatattaaattacacctacctaaaaagtttgtgtactaccaatgcaatttaatgagtaccatttctccataatattaatcattggtaaataaccagaacacttattttaaaacacagtgtacatatctaaaaccccatttgaatgtaacaaaaacactgagcatattagcggcacacgaaacaagactagtcattacctcatgattagttaagtattaaaagtagatttctttgatttttttaaaagcaatttctatataaaaaaatagagtagctaagacaactagttgagtcaaacagtgagagataaggtaaaatttgtattttttttataaatttaattctacatatgtagttttgtgaaataatatgtaaaaaaatatagttttgtgatattttttttaagtatatgcagtttaaaaattacttttacccaaaaaatcaattattcccatcaagcagctgatgcctgtttaggaattgaccctttgaactataatatataattactttatagtctattctagtatagtttattttggatcaaagattcaattgtcatttttctcatttcctttccctctgtagttgtatctcctctcgttaatttcttattaagtcaatatcactaaggctctgtttgcaaagaacaggttcccaacccaacggaaggcacgaaaaacggagtggtccattagcacgtgattaattaagtatttactatttttttcaaaaatagatcaatatgatttctttaagaaacttttatatagaaattttttaccaaaagtgcaccgtttaacagtttaaaaaacgtacgcgcgaaaaatgagaatagggacttaggaaccaactcttgcaaacagagcctaagacaataagtggttaagttggcaatgggcttatgggcctatttagcacagctccagctccaactaaacagtttcagctttggaaaagagctgggtggagcgctcccacaaaatgaactagagaggtgaagttgtgtttaggctactccacaactttactccagacacaactcctgaagctaaatttaggagttgaaaatctaccaaacagaccctatgtctatcattttggctatactcgctctctaaaattgatttgtcctggagtcgtggtcggtattttccctctcaagattgctcatccgttgctatcacttttcacgaaaacttttatagctttgacctcatttttcttttgctttgatttatattgcaacaggaaaacttggcaagattttcaattcttccaatctataccttcattccaaaatcctcttagaggaaagaaaaaccaaggtttttaatccttcttttaaaaaatcctctccatcccaaacaacttgccagcttggagccttggtctaggatattcggtatgtactggtcctgtagcgggaggctgaaggtgattggacttttcattttagcccttttgtaaaaattattttacaaatacatctaaaaactttattgtataaatggatccgaaactcgacgccaaagttgaggttaaatatctcgacatccgtaccaatgatcttataccatagtactcaatccgtttcacaatgtaagtcattctagcatttcccacattcatattgatgttaatgaatatctatctattagatatatatctatctagatccattaacatcaatatgaatgtgggaaatgctaaaatgacttacattgtgaaacggaggaagtatcaaagtgtccattgtgcgtggttggtgaggtggatggggacaacactagtctgtctgctgctgatagtctacacctatgtcattggtgtttgatctcccacacacttatcccaatagtaatcctaaaagtaaaagctaaattaggaatgatttaatttccatatgaagtccagtatcaaatcgacatgatttggagggaggaaggaatgaggagggaagaccgtaccattccccacaataaaatatatatcacgagagatgaatcgacatacgtcggtttatcgtttcccccttcttttcatgctgagatattaacatatcaatctccagcacacgccctttgtcaccgtgggtatccacgccaaaacacttcggttcgactgaaacacccaaggttatcgacgtggagctacgaatctattttttatcacaaattgcttaaaagggtctatctataaaaacaggttttcgaagaggatcaaactgtaaaaaaaagaagtcccctaccctacggtggtatagtacggtgcgacgcacactactcgtgtcttctcctgcgcgagagactcgaggactcccctcccccccctctccaaaccctcgcctcggctcccccgcagccgcgcacgccaccgccgtcgcctctcctctccaccgcctccccacccacccgctaggtttccgccgctgcccggggttctcgccgccgcgccgccctcccccacgctcgctctccgggtgggggtggtgccgcccctctcctcctccgtttccaggcgggtgccggccgggggggtctctcgccctcgtctcctctccccctggtcgtcggcaccggcggctgggaactcgccgacgcgtcgtttccccgcgaggccgccgcctagatctggaggagggggtttgggggtaagctcgtggcgattcttcaatgcccgttcgttccgtgctattttgtattattttttggggggggggt

SEQ ID NO: 24183 - DNA, 25435 bp, Oryza sativa
attcctgcagccctaatgttgcagtagcgaatgctaatgattttttcttctgtagttattagccagtgaaatttgtcagtatcttgtctatagctgttttgaaccatgctattgattttatttgagatttaataatatctgtttgtccttagaagaatgattttatttgttctgtttcgtttgccattgtacaccacctatacatgattagatacttgcctattctgttcatgtccagttcttttagtaatgcgaattgcatactctttttctgacatctgtagagtttagaatgcgtaacctactccccctgtttgagaatgtttgctgctaacaagtatgacgtgtcaatatggaataatcaaaagcttctaaattgtccacgacttttgaacagtttgagtatatgttattgccctcagacatttcgagaggaatatcctgtgccatcaccctgttgttttccggacgcccctcatagcttgttttcaggacatgtatttggagaacaacaggagatgcttccagaattttctttctaactgttcaagggcatgaaaaccaacctgaaccgcgtatcctcaaattggattaggtatctttgcctaactagaaatcaggatacttcaccattagccaatcttttggagttaatttactaatgttgagtgatgagtcttctgtgagcgtgtaaatggtcctaagtgatttggaactggtgattctatgaatgagccttcgttgcaagtatcaagtagcagaaggtcaattgtgtgggaacactttgaataggacttggtaatcattgatggtgtcccaaaggctatgtgtaaaactaacgtgcactcacccttctgactggaacagtggtttgtcatatagtctgaatattttgaagtgtgagcatgctgattttactgtatggtgtaagcattgtctaattcgaaaatatgacaagatatgcaagctataaagttttcccacttattttttctgatgcctgattgtgctcttgaatttttttcaggtaaaatactgtttgttagacaacaagattgagattctcaaacctgttggctggtgctatatcatttgcatttggttgaactcgaaaccaaaaggtactgtgaattgcaagaattgcaaacacttgttattctcttaatatgcaatgttagaagaatatggattggagttatattactgttgttttatttctgctgtttgccactgtatgacctaacacctatgcatgattagttacttgcctattctgttaatctacactctttttagtaatgtctaattgtgtactctctttcggacatatggagagtttagacctttgtctcctgtttgtgggtacttgttgttactaaatatgacatgacatcctggcatattagcaatgatatttggatagtttaagtatatgtggtttgggttggtttttatcctctcgtacagcctcaccctgttgttctccggatacacaaactcagagcttgttttcaggacatgtatttggagaataatagggtgatgctgccagaattttcttttgaactgtacagaggcataaaaccaacctgaaccacatatcctcgaattggatttggtatgtatctttgattaactgggatacttttccatgagccatgtcattttatggagttaatttgctagcgttgagtgatgcataagtatgcaagcatgtaaatttttcagaatgctttggaaccactgtcctgtgaatgagccttccttgcaagtatttagtagcaggaggtcaattgtgtgggaacactttgaacatgacttggtatcattgataatgtcccaaaggctgtggcaactactatgcactcagcttttttactagaagagtgatttgttgtataatctgtatattttgaactgtggtcatgctgattttactgtattgtaaccattgtctaatttgaaaatgtcacaagatatgcagtctataaagcttccccacttattctttctgattcttaattgtgctcttgatctctttcaggtgcaatactgttggccacataacactattcagattctcaaaccttttggctgatgctgtatcatttgcatttaattaaagttgaaaccaaaggtaatgcaaagtgcaaccaactgttagtcttgctgcatatattcctctttgtctgaaaagaagaaatttatctgtgttatatactagcaaatatacaatgcttttatctcctagatgtattattgatttcgctctttttttttggcccttggtcagcaattctctacagtactgaacactcaggggaaaaacacagaaattttaggggttttgtcaatccctattatacaaataataattttacgctcaccaagaaaatgctactcctttccataaggggggcatgatgcaggctaaaagattgtttaatcgtgttgaagttttatgttttgttcttgtaagtaggcctgctaatggtcttgaaaccgttctgaatccaaactacccaacaaggacagcttctcacccacaaatctattgatagaaaccaaaccaaaccattccagcccaagctcccaccctagccaaaccttcagtagtatgggtaacagcattacacccaattctcagcccgtttctaaccatggaatactttttatcaaaatgttgaagtaatcgaagcatctccagtcttcctataaggatatttttagtaatttgatctatgccaccactttaattacagttttggtttatgctgctacttttttggcaaattcagtctgccacacaaatgtgaaatttgtttgggccacactgaatttgttttggcaaacaatattgggacggatggagtattactaatggtgaagcgatattgctgtagatttagtttcttgagataggcaagaaggcctatttggcctttgttctactgtagtctgttatttatcaacaagtgtttttttggtccaaatggaaattcttaatcagagtcacttgttcaaattttgtgcaggctggcaacttgttaaaattggtgtaccatttgttatttgaagccatagcatatctcagctcctgaacaataaggtgctgtattcagcacagtttaagtgtgaaaaagaatggatagaaaaatcacactttgttgccactggtatgcttttgaaagaaattaggggtttggatctctatctattctagttacaatggattgcaacaaagatgaggctgttaaggcaaaagctttggctgaaaaaaaaatgcgggagaaggatttcgctggtgcaaaaaggatgattaacaaggcacaaaatctctccaaagatgttgacagcaacatttcacaaatgttaactgtttgtgatattcattgtgcttctgcaacgaaggttaatggagagattgattggtatggtatacttcaagtacctgtcacagctgatgacacactaataaagaaacaatatcgtaagcttgctcttttgctacatccagacaagaacaattttgcaggtgcagaggcagcatttaaattagtgggagaagcaaacatgacgcttacagaccgctcaaaacgttctgtctatgacatgaaaagaaatgcctcagtcagaattggttctgcaagagttccttatcagcaatcaaggagaactgcacctgttagacctaccactacacctgtgaatctccataatgtgcatcaatcacaacagcataagccctcaaatccttcagactcacaaacattttggaccatatgcccaacttgtggcatgcgatatcaatactacctttcaatattgaagaaagctctccgttgtcagaattgcttgaagccctttgttgcacttgatttaaacgagcaagctgttccttctggggcaaatcagaggtctgctggggtgtggaaaagttcaggagcaccacaaaactttccaggttcacaagcaaatgtaggacagcaagctcagaattctgccaatccagtccatgctaattttggttctcataatgcacatgtagaaacaaagaggggagctgatggaaacgaggctggtgggctaaagaacaaaagaaaatttgctaaggcaacagggaattcttcaaaagcttcttcagttgctggatcaaaaaagcgcagaaaagctatgtttgaatctagtgaatctagcgcttcagacaccagcactgatagcgaagaagagattattgaagatggtcctgctgcaagtaatgtagggccagatcaacatccccgcagatcaagcaggcagaagcaagaagttaagtataatgaagatagcgatggtgacgacactgactgtcacggcaatggtgatgatggttttgtgagttctcccagtttgaaaaggttaaggaaaggcggtctgtttcatggtggtgaaaacaatgaaactaagttgaatgctgacacaactgggcctgggcatgatggtccaactaatggtgttaataattacaataatacagaagacatagagagaggctctgcttgtgctgagcaaatcaagagggaaacaatgtctggtggaggaaatagtgctgagaaagaaaaattatcccattctgtcagcaacaatggtctagagtcaaactctgatgatgctccaaatgaggttatttgtgcggattcagaattttttgacttcaatcaacttcgacatataaatcagtttaaagccaaccagatatgggcttgctatgatagtcaaagctgtatgccaagatactatgctcgaattacaaaagtaaaacatgtcccgaagtttatgttaaatttcatttggctggagtttgatcccaaaaataaagcagaggctgcttggtcttctggggacctaccagtgtcttgtggacgttttaagcatggagtgtcagatacagcaaaagagagcagtatgttctctcatgccattttctatgaaaaaaacaagacaagaaactcttatgaaatatatcctaggaaaggcgaagtatgggctcttttcaagggttgggatattgattggagtgcagatgctgacaaacacaaaaactatgagtatgaagttgttcaagtcctctctgatctcactagtagcactagcatcattgtcatgccacttgtaaagataaaaggctttgttagcttgtttattcagtctaaagaggcatccccatatgtgatacctcaggatgacacactaaggttttcacattgtgtccctcgtcatacgatgattggaaccgaaaaagaagggattccagaaggggctattgaacttgatcctgcggcgcttcctctgaactttggagtggcttttgcttctgttgttccagaaagctgctgttcagtgaaagtgcagggttctggtgctgaacacataggttcatccagtggaaataactgtcacaagggatcggtggatgttggggagagccaacatgctacatgcgcaaatacagggttcgctacaaggacaacaaaggcagagatcaatgagcacaacgctcgatctgcagtagaaggtacagatgatgacgaggaacctgatgattttgcccaagcagaagtactatatcctgaatcagaattctttgaattttcagaaataagatcgatccacaaatttcaacctgggcagatctgggctctctatagtgatgtagataagttccccaattactatgcctgcataaaaactgttgatgtcaagaataatgaactgcaagtaagatggcttgatgcttgcccacagagtgaagaggagagaagattggtaagagaagatctaacagttgcgtgcggaacctttaagatttccagtttccatggtattcaaacttacaatggtacagagtacttgtctcatcctgtacaggccaaacctggtagaagaaatgaatatgaaatagttccttgccaaggtgatatttgggctgttttcaagaactggaggactggatggaccgcaaaagattataagaaatgtgactatgaattggtggagatatttggccacactgattcatccatacaagttcagcttttaagaaaggtggatggttatagggcagtatttatgccagacagaagagagggagctgtgaagacaataaggaaagatgagtacccaaagttctctcaccagattccttgcttccatctgacaaatgaaagaggaggcaagcttcgaggttttttggagctcgatcctttgtcagtgccagagatgtttcttttcaccgaatcaatctgagataagccttatcccaagttaatctgctagagcatttcttgtgatgctaccggaactaaaggttttccagaagttgggtagtccacaattcaatattttgcttagtgacagaagctgctggattttcagaatttgtatgtagcagtaatgttatgggccgcagcttttgcctattctccaatcctcactatgaaggcgttgtcaggcaatcgggaccgttttgcaagattagctgcagtctgaactgattaattttcctgcagctgctttacctagttaccgatagttgtatctagttctctagctggactatcaatcgtcctttctcttgtcgtactttgcattgttggaccatgtaaaattgaactgtgcgaggccagtctgattaattcggaaatctctgttggcctccctttcctggaacttaatgaattgagtccaacttctgtttaggttgccaattgatcatcataggggtaacgatgaactagattctgtgcaatgcttctgtgatgggaatggacagacaccctgctgcagctctcccaaggtatcattcgtccatttattgatttgtttctctgctgttttctttccagcaaggtacaggtttgttggcatccatttgatttgatcttttagttttggatgttggtatgctgtgtagctgttgctctatgaacagtttcaaatctttagaattgggatttggacctcgagcctgtgatttaggtcttgtttagaacaggtaggaatttgtgggaaatttagttcagttttagttgtatgaaccatacaaaaggttagacttcatctctgcttatccgaagtctttgatgtaatggtgcatctctgaacacaatggtctctaagatagattaaggtttaatctaagatctctgttgcttgatttcagctgatatactcggtcttaaaagactagcaagtagcaactggattgctttttctaatgatggtaacagagtagcaatttatgaaaagtttatggaccgatgccccttttaccggcagtgttctcatctctatttgaccaccatctctgttattagtatcatctcagggagccctggtttagagtgtgcacaaccacaatatcaataaaaaaatatttgttatccttcaaagtcaacagataattacttagtaggacaaaaccaatatcgtagctagatgctcatccaaacaaatctatgatgaaataagcattgaacctaatcgccatggaggcattatcttaatcatgaggattacaaagaaaatgtatataccattagcgaacctggcgcgtccacgaaagctacctgcatccaacctgccttagttgcagcttgcctctgctctctgctctagctgctatccgtttctgtctcggacaggacgagcttaaagctgcgtcgcccatgtcgccgttgctcagtgacaagtgtcgtcgcgcacgcgcagcgatgtcgtcgtcgccggcgccggtggagtccccgtggctgacgatgcgcgccatgcggcgcgttggcggcgcggacggcggcggcgggcagcggagcgcgctgatggtggcgtcgtacccggtgctgctgctgctcgtcgtcctcgccgcgttcgtcaagtacgtgtggatcgcgctggcgctctacagcgcgctcctgctgctgttctcgtgcgcgtcgcgccgcctggcgctggcggagcggctgccgtcgccgctgggaggaggcggaggaggaggaggagtcgccgcggtcaccgcggcggaggagctccagggcgcggcggcgcggggcggggtgtccggggagacgctggcgtccatcccggcgttcgcgtacgacgcgtccgcgcacggcggcggcggcgaggcggcggcgcagtgcgcggtgtgcctggaggcgctgcgcggcggcgagacggcgcgccggctgccgtcgtgcgcgcacacgttccacgtcgcgtgcatcgacatgtggctgggctcgcacgccacctgtcccgtctgccggcgccgcgtcgagcgcaagcacaagggcggcgtgctgccgccgatgccgccggagccggagacggagccgccggtgtagctcgtcgtacttcctgtgtcttcctcctagtgatgcagaagattgcagaatggcagacaaaatttgtcaaatttgtactacatgtttagattagaggtacaataggccagtttttcttgccactctgcttattctgctgtttgtagatgctaacgcgactcatctttgtgaaatctgaagcctgtcgcatacacaaattgtcaccctgttaattatgatcggacaattttcttaactacttttcgtctttcttcctctacagaaaaaccactccctcttaaaaaaaaaacgatccaaaaaacccgtgaaaaaacggcataaacaaaactcagtttacatttttatctcccaattcgacataaaagaaactgaactacatttttatctcccgatccagctgcaacgcacggtgcgttgcacgtaactagtcatggtctcatggacccatggggtgttagtaacagggttcgcaatctctgtgagtgaaaaaaaaaacatcttgggggcgaaacttttgatttttttttgaaacttaaacaaatttccactgaatttaaatattccttttactaaattaaagcacattgaaagtttttggccagaggcacatcgcaccatggtctatcagtagacccgaaatttctgaaatttcataccaaaaatgtgaaccatgttccggaattaccacaggtaaccactcctaagtcctaacctgtccatgatgtgaactgtggagtctgaattaaatttgggatgtcactaactgacatcagggttaagctaagaagcactggaattaaggcatgtgagaagactgagtatttctattttttcccctagaattttgcaaatctgcattcaacagcatcacctgcagcatgtttttgacattgttggtcagcacaaattatttcttaagagaagcaaatgctcatttgcactacaatcacttgaatacttgggccacattattaactccaagtggaataaaggtttggccgggtattgaagtccataaaaaaatatggtatacttttaaccgtcctctcactgattatttatttagggggtgtgtttgaatgcgttcgtaccttattcttctcgcacgaaaaacaagctaacttattagcgcatgattaattaaatactccctctgtactaaattataggtggtcctttttttggaaaatcaaactaggcacttttgattaataattacactaataatacgtaggtcaagtattattatgttatattattagatttgtattttaaaatattttcatgtgatagtaattttatagctgttgatgacataatatgaaattaattaatggttaaagtatgctattgaagaccgtctaaaaatatattggtcttataatttgagacggagagagtattagttaagaaaacgtgaaaaatggattaatgagatttttaaagcaacttttctatagatttttttttgctaaaaacgtatcatttagcgtgaaaaataagacaagtttcataaatgttgctttaaacgtatcatttagcatgaaaaataacaaagtagaagttggaaaagggtagtgttgaacatagccttaacagtctcaacataatcaagaattttgtaagaaattaaagaggctctaactttagggtgtatttaaccctacctaacttctatctctataatactacctccgtcccaacatatatgacgccattgatctttcgcataacatttgatcattcttttttattaaaaaagtaagtatgaatatgtaaaagttgtagtttctatgatgttaaaacaagtaaaaaaaagatatttatatgattattttgaataagataaatggttaatcattatgtcaaaagtgaatgacgtcctttattttggaacggagtgattacttcaaaagctgagcacctgatgaaggaataggttatgtccttcaagcaggacaatcatagcattttttaggaaaggtttgggacttcagaacacaagcattatcgacctatgaaaaaaataatgctaactaatttattcgccgccgataagtggataagttatttgcaacacagaccatttaccatactaactaattacaaaaagccacactcatttgggagaacaaaaactcatcactagtattcagcaaaagcttctcccaatttgtgacatcctcctacctctacctgtgttaaccagatgacaaccagaactagtgaaagtgtcaatgatcaggaacaaaaacagagactcaaccactagtaaaaatattagatgatctatcaaattccaaacacagggtcttcctctctagaatcttgcaaactgcctacgatcatcactgcctttccttccgtatgggtttgaagggccgataccatgcctcctgccagtgtttacattcctcttctttcgatgttttgacgcactgctctccaggtccagattcacctttggaggctcactaaaacagaacgaagccgctacgctctgcaagacagcgaggaataacacacaagctagttcaattttctgtggtgtcaaaccctctaattcggtatgcgaatgaacacacgccattttcattggcgttgaagaaagagtttaagaagcattagcatttatcttacaccaactgacaattagacttttcatcctcagctagcatgctaatctaacagtaaaattaagaaaataacaactgtgcttctacttgagaactaagattagatttcataagtgaaagaataatttaaaaatgaactaaaggaaagagaacagaaatatgccccaacaaacctgagtaacatttagtgtgaattcttacgtgcaatgaaaacaaaatgcagaggaaaagtaatgcgaacaaaccaaagacaaccctgagaaagaacactgtaaaattttaccgtcaaatcaagttgatggatagcaaaaatgtctttcatagagtgtgatttgtatgccaaaagataggatttgtaggcttctttcgccgatctgtttaggatgtaattcccaccaacaattttctcctgctcaaaacttgagtcataatgctacatattgaaataatgggattaagtcattgtagttatgtaaagagacactcacaaggtaaggttgcaattttggcacaagctcttgtctgaacacatattcagatacagaaatattagctgcctgcaggaaaacatgaaacatgttggggcgttttggtttgataccaaaatgttgccataccaattttttggtactttaaatagtaaatgtgatgatttggtttgaagccaaatgtttggtaatgcctatactcaatgtggcacaattctagaatattcttcaccacaatttaaaatttggctctcaattggcataaatccaaatacactcatttacaattctaccctaccgaaatattggtagtgccaaaacttgcctagagtttgacactaacaacatattggtaaggtactaaaccaaacaagcccgttattccctctgtccaaatatattatgggttggagaagtcaaatcataaaaatgtttatggtatgaaattatacaactagattcatattttaagtattttgtgagaaaacaattgtcagatgaattatttcatactttcaggtgaatgagcaactgtaattctttcggtagtaagaacagtattgcacttcctttgccattatcgccacgggcagtacgaccaactctgtgaatgtaatcctgcaaattaaattccaatgtcaagttagtaaaagtgaggaatagaaattttctttggcaccatttaaaatccctaacctttgtttcatctggaggatcatattgcacaatatagtcctaaacaaggcaacaaactcttaggttagtaagtggacaaaaataggagtggttaattaaatggtctaaaaaccacaagtcaaaaacctcaccacatcaggaatatcaagtcctcgtgctgccacattagtgcataataagatgccatgttctgccttgtgaaacttaaaaaatgtactagttcgttgatgctgctttagttgcccatggatatcataacactctatctggatgaaattcagaagttgtgcatggaatttgactgaattacatgatgaaaagaacaccatgaccttcgtcttctcagaaagtgccttttttaggaaagcatacagaaccagaaaccttctctcactaggaatgacacaatagccctgcttcaatccttcaacagtagcctgaaagagcatcgcaattatttctcacaccaaagaacaaaaaaaagttccactaatcttgtgttcatgatcatcatgtaattcagtcaaattccaacataaaaaaaacttaaaaggacagttaaacagttcaaaagttcaatacctttgattcatgatcatcaactccaacataaacaagtgttcgctgcctttcttctttgctcccaaatgttaacttcgcaaaatcttcaacctacggaatgccagcacataagcaaagacaccaatgaaggaaacagcttgaatgagctgaataacagatccactaaccttttcagtctgtgtagcagaaaaaagaacagtctgcctaccctgcaaatgatgcataataaattgcaggataaatacagtattatgtcagtaaaaagttaaaggctgcatgatgcatatgaaatgaaattgccagacgggcagatagatggtcatatacctgccgaggaaggagtttaaatatttgtttcatttgttcctcaaaattttgctcaagtatacgatcagcttcatcaattataaggcactacaacattaagatgagttatgtcaaagacagtgaagagggcgagggggtcagtcacgacattcattatattggacagcaatttcatggcattctgtagcttcagccaaaactacctgtccatatggcaacggcaaaagtatcaactagatttgactccatgtaacacccataaacttggtgcaactaataacaaaacaacaagaaatctgcaacagagctaacaaggacttgacagtagaaaattatcacccgaaattttgccaatttgacccttttgagaacgtgccaaaaactttattgcaaaaatatacaaccacctcagggccagacctgatggctctgagttataacgccttagcgccacaaatgatggtgttgacctcttatccgaggtgagtgtttgccagatcaacgaagctcaatatatgcgcattggcactgagatctgtactagctaaaaggggtgaatgtcttctttgactgcaaggtgtgcttggtatagtggtggtgtcttattctcttatccaagaggtcatgggttcaagtctccatccaaaaaattaagagaatgaggacttgaacccatgacctcgtgggtaaaagcaataagggtatagtggtggtgtcttattctcttacccaagaggtcatgggttcaagtctccatccaaaaaattaagagaatgaggatttgaacccatgacctcttgggtaaaagcaagaggctccaccactgcattagccgcaccattatatcaaataaggcatgtgcttccttttagttagtagagagctcagtgccaatgctattgatgttgagctccaatgacctggcaaacgccatctccaaggttaacaccaatggcgctgagttagtgatccattttcgcaataagtttttcaaatgggtaaaattgtcaaaatgttggaacctatagaaagttgttttagacatgcctctagtcaaacatcaaaaacctttaccatctgtatctttttaaatatttaaccgggcacatgaaaattatacgtatggacttgtaatgaaacaacttccgcaaaagtacaattctatctgtctttacaaacataatacaatagaaattattgttaaaagttgcaatttggagacagtacgaattaatgttaaaaaatacagctttgcatatactcagcaaaatctattttgaaatttgatttatatactctaattcagtactaacaaacacactggacagaataaagggtagatgcaggcacacaatttatatacgaaataatcaggtgattgattatgcaaattgcgagagaaacatgaaaatgcagctcgtactttttaagcaataaggaaattttaatctgcaaactatttcaacagacaggtttagttccacattgtaaaggaaagtgtttctttacctttaggcattcatatttgaaacttttggttttttgcatatggtccagaagccttcctggcgttgcaactaatacattgatccctttcgcgagctgctcagcctcgcccctcaagtcaataccaccaattacatatccaagagtttgtgaatgatacctcattaattccttggcaacattgtgtgtctagagcaattgaatcaatgagacgcatgattaattatactgaaatacaaagatgagccactaacaatacataatctgaaccaaaatttagatacactacaaaatgctgccttttaaagtttaagaatttgctaataattggcaacagcaatgtgaaaagcagctttctgtgcattcttaaaaataccttgacatgaacataaattgccttaacaaagctagtacaatcttatctcattttacatgtacatccaatgttgattttttattttcactcacaagtcacaacaagttcaattgttgaacaggcataaaacatgtagtataaaatggatccaaaagaaatactgctgcatcatgcatgaaaaattttgtctgtcaggtaccaacaaacgccaaacaaatactagcaatgcgtatgaaaatgcacctggatagcgagctcccttgttgggcaaagcacgataactccggtcccgttcctcggcgagaagcgcagcctgcagagcagctcgatcgccgggatgaggaacgcaagcgtcttccctgagccggtcttggctgacgccatcacatcgcttcccaacatcagaggcggtatcgatctagcctgaatctgcaatcaatcaatcaatcatgaaaaaaaaaatgacacctcgttacatatctgtcgagcactgaaatccaacaatttttcaacaaaaagaagatggataactgtggaatttttagacgatggatggtgacctcggtgaggtgggtgtagttcatgtctctgatggcattggcggtgaggtcggagatggggagatccgagaagagcttgtccgtcagaatccctgatcccttcttcccctccccctgcttcttcttcctcttgctcttctcctccttcatcttcttgttgttgtgctccctcctcttccccgtcgcgttgttctctccctccgaattgcaggcggcggtgttgtgtaccggctccggttcagattccggcggagtagcggcggcggcggcggggcgcttccgcttcttggacgacggccggggcgagcgggcacagagtttgatcgggtgcattgcgtcgggaggaaggggagggaagcgaagcaagccgatcgggtagagtttttggggcttggacgacggggtgaggaggcggcggggcggcccggcgccgtggaggaggatgcttgcaggcgacggcgatgtggcggtggcggcagtccggccgtcgaggaaggcagtcgggtcgtgggctgggcagcgtcgcttgagcgggccaagaggattttcgtgagggataagtccactatgactccctcaattataggcccagtctggtttgtacccctcaaccacgctaccatatatcttgcccccttaattattattattaaaaaatcggtgcaaaataacttttccaatggttctgaaggtggtttatattgaaatgacgtgtacgtgccacattgacttattattcatcatctaacatggcactacaataataaaaataatacgtgggacccatagttttagtgactgtttcctcattttctcctctctttctctccacctcttagcgctctttctctctctatggtcgagacgatggtgaggaccggtaggaccaggatgtcgcctaccggtcgacgtgagaggtggtggccatgcgcgccgagatcagccaggcgaggaggagggagaggaaggcagcgacgatgccgaggacaacaagttcaagtgggggagggcgttcggcggctttggtaggccaggagttgggcatcggcgtggctcaaagcagagacgtctcccaacgagaaggtcaagcggctacgatggctgaggaggccaccgtcgccacttgggtcgtgagtggcgtgggctgatgttgttgtgctgcacgatagtgtcgtcatcggggaaggtattcagctgaggagggagctaacgagggtacaacggtggtgctagcggtggtcacagggtactgcatcgaagaggagatggatgttgggtgcaaccgcacacactctccttgctgagcgtggcactgctgctccccccctcaattaacacgatatgagatagaaactaatatcgatggtggcactggttgcctaacttcgccaccctctcatcatcatcctcgtttcccccaaccaccaccgcttggtcctccctgttgtcgtcctctcccaccaaccactggttgcctaactttgccatcctctcatcgtcatcctcgttttttagtcccgccttggctagctaaggtaaaggagaccatcctataagataaggtgtccggttgaaaaaaaatccggttaattgttttgcactgagcgaggatgaaagcacaaacaaattaatttaggggtgtggttcgactagatgagttctggcatctacagcctctagaatctctagctgcaagaagctcctcaaatagtccagattttcactcggatttgaagaaactgtagttgtacaatccagaaaataaactagaaagaagctgtagttgtagaatccagaaaatgaactagaagacagaaactaggtttcctagcttctctagataagctcccccaaacagggccttaagtcccgcctcaactagctatgctgagggagacaaaagcgcaaacaaataattcagaggcgtggttcaatttagatgagttgggcctaaatccgtatcacaccccagatgtttcgccgggcgccggaaataggaaaagaagctgtcactagggctgtcaatgagccgagctcgagcgagcttgcctgcctaggctcgagctcgatacaagctcgagccgagcctataaaatgttcgagctttcaaacaggctcgctttgagctcgatcaagctcgagctcgactaacgagctcgatttttaattagaacaatgtatatttcaaaggataatttttaaaaactatttaatttatggtttatcatattagtgtaagaggaaaaagaataaaataaacatatgatgccaatacaaggcatacaaataacatatttgatctaccgatttgttaaatagcaacataaaatcatatattactaggctcgttagaagctcgagctcggctcgacaaagctcgcgagctttgggacaggctcgggctcggctcgtttggagctcgaaccgagctcgaatcgagcttaggacgagtcgagctcgagcagctcgcgagcctcgagctttttttgacagccctagctgtcactaaccaatggggtccacatattattttattgtttttattattgtaacgccatgttagatgataaaaactaagtcaacgtgacagggagacgccatgccggtgaaaaccaccttcaaaaccacagagagtcattttctatttaacggagcgtggggctcctcaccgggagaccgcgcgggcccccctttgccggttcggccgggggcgctaggtgaggttctaagcactcgatctgtggaatgttttgcgagagagcaaatgcgcaagacacgggcgatgtagacaggttcgggccgctgagaagcgtaataccctactcctgtgttctggtggatctgtgtacgaaggagttacaaagagctggagagcaagagagttcaaactctagaaaccctcttcctctttctctcctctacgagctcaggtcttctcccccttctttccccaactccccccttcttaagtgggcaaggtcctccttttatatctcaaggggatcccacatgcaccacttctacctactcttcttttgggtggggactcaccctatcttcccaaaaaagaaaaaactggcttgccccttcgcctggaagctaaatcacagcttgtctttgagtgaggcccagcgtcatcactcgcctgacaccggggatctccctgttactccctcattaatgggcggagatttgccatggctgttgtccgaatgaccctctgatgggatgggccatacctacctccactccgccggaagcaggcgcaacgtgggagcacggttgtctgccgatgacgtgaccggcgtcagaccagtcacaaaccggtcattcttgtctaccacgcgtcagtttagcatgccacacgtcagcccttcttcataaaatgacttccttgtaatggttgcgatgaagcctggtatgaatctagccgggactgacgtgctaactccaggagtcagcacgccggctccggctagggacgagtgcctagaggctctcatcattccgacgggacggggcgaggcgtgcgaaaggccgcctgttgccacctaacccgcgatctgaccggtcacacactgtgacctgtcacggaccgaacgagtgtgctgcgctgcattaaatgcggcgtggggcgctcgtccaacccgaataaacgcggttaggtgagcgccgctgtgctcacctaacccacacacgtggcgccaaacccacagggggtcggggcgccccagccctcggggccgaaacgggagcggcccgacccctcggggagacagagggaggggcggccacatcaccctcgggcccgacccccccgagggggtcaggccacgtgggtgactgcagctgccccaaacctctagtcaagatacccccggtcccatgtcaccgatactattggttttagtagttgagtgattaaactatctggtattatggttaagggatatgaattcgacctataattgaaggagtcaagatggactttttcctttttcgtgtagagaaaccgagaaaatcctaccggattgggcctccactatttattagcactagcccgtttacacattggagggacccatattcgttggacggggtttaaaccagcccaaatctaaagtattgataggagtaatctttcttgaaaagttattatgtaaaattatgtgagccatccgatttcccctctaaacaatatgaaaccgttagatccttgaactggtgaaatcttttcatggtactcgaagaaacttctttttacaagaaagtccttccacgtccctaagatagaaaaaaatcatgattccccggtaaaaaaatcgtgatggcgagacaacgtgcacttcccgtcctccccctcttcgccgcgtccctagtgttgtcggcctcttctctcacgccgccgcctccccatccctcctcccctcccttttctgcagcgccacctcttcctgatcccgtcgtcgccgtctcctagtccctggcaccggcaccgccaccatctactctccctccaccctcgtcctatccctcctagtttaaagtgaaaatgccaatatgacatcctgttataaaagaaatagtcattataacatttaaaatgtcaaacacattaaacatatttcaagccacgtcgccaatatactccctcattccctaaatgtttgatgccttgactttttttaaatatgtttgaccgttcgtcttattcaaattttttttgtaaaatatgtaaaactatatgtatacattaaaatatatttaacaataaattaaatgataggaaaaaaaataataattacttacatttttcgaataagatgaacggttaaatattttaaaaaaagtcaacagcgtcaaacattttagaatggagagagtatttcagtctatgcatcaacttgtccccataggtcttacacaaagtcacaaacaaccaacagggcctagatagcatcttcaagaggtgactaaaattagagtccaaaaatcttttattctctaatgattttacagttagtattaattaagtagatatcccactccactacacggggttacattgaatactgatagaacccacaaagatcttagcccaattacaatcattgtacctgcaaattaggagcgcagtttcacttaattttactgcgacgatacaacagaaacgactaccgaatcagacaggcggcagcacagcggccgacgccgccgccgcggccgccacggacttgcgcggcgggagcacgcggcggcagagcgggcaagtccggcggacgcgcagccacacgtcgacgcagtcctcgtggaacaggtgcccgcacgccggcagccgccgcaccatctcgccgccgcgcaagtcctccaggcacaccgcgcacagcacgccgccgccgccgccgccgggctcgtacgcgaacgccggcagcacgccgatcccccccgcgccgggcgccatcagcccgcacgcgcacgggcagctcagcagccgccgccgccgccccgacgccgccgccgcggcggagcctcctcccgtcgtctgcgccagcctgccggcgagcgccagcaggaggagcgcgaccgcgacggcgacggcgcccgccacggtggcgctcacggcgtaggcgatggagcagtacagccccatcaggacgttcaccgccatgaagccgtagcaccctagcctcgtcgagcagccatcaccgccttcctcctccgccgccgccgcctcgggcatcccgaccagcgatttctccgatgatttgaactgatttatttcgtgccaaattcctacgaaatgctacgaaattttcgaaatgcagcgacgacgccgaatacaagaaacactaggaaatgagtagctagcacacgatctgcatgaacatagctggcggattacaccagcagcgtcacgctctcgacgtgggcgacgagttccagacgtgtcaagcacgtccgttgctgttaccgtaccattttaagtacgtacacctgtccaaatcggttgcgtttgcatcaatcacaaagttagtagagtatattaatttgagagtttgtagagatttctgtattgtcctatgccggctaaattccaaatagccggtttggtcacaatcttatggaatcttggttgattattatgtcctgttgatcccgaaaataatgggttacagaacacggttacagggcacacttttctggtttggaaatgctaattagttagtataccaagtggtagaacattcggaattaatgtacagtgacgcagtaataacaacactaggtgatgttagtagtgaacaccaagcaaggtgaattagcgtttcacaccggcggcagcacgtcggtggaggagaccgtcgcggcggcggcggaggatttcgcggtgaccttctccggcgagaggtcgcggcggcagagcgggcaagtccggtgcgcgtgcagccacatgtcgatgcagtccacgtggaagaggtgcccgcacgacggcagccgccgcaccgtctcgccggccacgacgtcctccaggcacaccgcacacagcgcgccgccgccgcgcggcttgccctcgccgccgtcctcgacgtcggcggcggggggctcgtacgcgaacgcgggcagcgcgtcgatggcctgggcggcgagcccgcacgacgcgcaccggcgcacctgcagccgcaccgccggcgccgcgcgggcgctaccgccgccgccgccggcgttccccgcgtagagctcgggggccagcgcgacggcgaaggcgtccgtgggcgcgagccagccggcgaggccgagcagcaggacgagcaccccggtggcggcgaaggccctggcgacgccgacggcggagacgagcgcgcacagcagcagcagcgacacgcacgccaccacgatgccgtagcaggcgcgcgcctcgccgtcgcccggcggtgcggcgggccccgccgccgccgacggcgcaggccgcaccgccctcagcatggccgccaatcttgccgtcctcctcctcctcgcgatcgctagcactagccccaccaatccaccatgcgcgagcagcagcaaagcgttccaagaatccgcgggcgaggggtggaatggtgaatggaatggtggatgcggatggtggcggcggggcgcgcggcgtgtttatctcgttgggattgggaggcgtcgccatcgatgggactcggctgctggttggtggacctacttgcctttctcgctcgcttgtttcagttggatagacttggcaggcacgcacgcccacactcctcgtacgctcaaaatatcaggcgattcgcgatatttttgtcaccgtggccttttgtgttgtgggatcacgcagcacaggctgtttattactagaacacaggaattttatagtgtgtttatatagtttagttttgtttgttcgtaaccttgtaaattgtttcttggatccgaaaagcttttacatgattttcgtataaatcgtaataattcatacattcaataggtggttcaaaataaagtatttttttgggctgttctgctacaattaacggcacaaccacgtagccggttactacttattacttgctacataagtcaaatttgttagaggctgcgaaacaacaccgtaggcagctgaacaactccttcattcgcatagagatagtttttttttacttattatcctcttggatagcatactccaacaaattaaggggaaaatgactacctgattttttttaagttttatcacattttaaccgccaactcaataaattgaggggaaaatgacattgcggctcctttcgtcttttttttcttccccttcatctatatgtgaccatgtctccgtgatgtgtggcgatagcggtggcgaaaagaataggccagcgagcgtggcagagaagaggggtagtgggtgcttgtgtagttgtatgggcgcacagatggcggtgaggacgacaagagcgcagaggtgatcactactcatatgtaaggcaaggcaaccctacaccactcatattatatataaaccttataggttatagtcttatttcttttactatatttaatgaaactattcatggtctaaatgctggtttgtaaaaaaaaagaatggcaatagctaccaagtgtctaaatgtgtgtgtttgtttataatgatcatttctacgcgtgacgaaatagtttagactcagttcggctcagtatttggttgtggctattcacggctcaaaaaatggagcggattattagctcatggttaataagtattaactatcataaatttgaaaaatatttttttcatttttctgaaaaaaacttctatacagatttatttttaataaaacatgcagtttattgatttgagaagcatggtaaatccagccatatatttagaaaattttatttcccgcattttacttcacttgtaaattaatgaacatttaatataattctaacaataatttattaaataatttataaatcctgaaccaaaaatcaggattaagttgtacaaagagggtattttttataaaaccacagctattatagtttaagttgtacaaaaccaaaaaccacatagatttaggcatatggcacataagcctagatattttggtcataaaattttcacaaaactacactattgatcattttgatatggcaaattttgttataggatactcaaaatttgtgcaatttgcagatagacatcgaaaaaatgtgttacagctaaaagacactctaaacaactgataatttgctagaggatactctcgactcaattgaagaaataaattcttaagaaatacgagaatgaccttaggaccacatgcttcagacatggcattagagtaaaagtttagaaattatgcaactgtaaatttacaatcaacataagtaaatcactagcataaatcatatttcaccttcactctattctcagctcaaaagtttttgaccctaggggattcttgtctttttgaagaatttctctctctaattgaactgaaaaaaatcttccagcaaattaccagttttttaaagtgtctttcagtcatgacatattttaacgatgcctaccagcaaattacacaaattttaaatttcctgtagcaaattttatcttttgattaggagtatgtcaaaatggtcaatggtagggttttgagaaattttaaaaccataatcccttgagttatgttccacatgccaaaatctccgtggttttgtgctatttagatcataatagtagagttttatacaatttaataaaagaaaattatccctataggatggattagagagtactaattgtcttattaatcgcatccatttaaatttgttcaaatcttataacaaccaccgttactctttacattgataaagaagattataacttttttctctatcactaattttttctcctacaacatatattatttttatatatggggatggagggagtaaccaccttagtctttatttaattttccgcacaaaacttttgtagattccaatgttttatccacaggattttcttcacactggtggagaaaccatctttggtcggtcggcccaattccacaatagtcccggttccaataaaaaccgggactaaaaagcatctttagtcccggtttaaaaacttaggggtattttttgatctttagtctcggttggtaacaccaaccgggactaaagatcatttttactcccggttgaagaggttgtcaggtcgtgtcaggccccaattatttttagtctcggttggtataaacaaccgggactaaagatccatctttagtcccggttgtttagaacaaccgggactaaaaatcaccccaagccgagcgcgatgtttatctcttcgcgtgtccattgtctg

SEQ ID NO: 24184 - DNA, 26463 bp, Oryza sativa
gccgcgcggaggcggcagctgcggtgggcagccgatcagcggcgaccggcgcggcgccggccggcaggcgcggaggggaggcggcagtggccgccggccggattttttttcttttttttgagatgtgaatctgtgatgtatttttgtgtgagatgtgaatctgtgatgaattttttagaatcttgtgatgtaatttttttaagagtttgtgatatatttggagatgatttgtttgaggatttggagatgttctgtaatatgtaatgatttggatatgggatgggattgtgtgaaatcaatattcaatattaaaggcagaaaaaaaaaaaaaaatatctttcgtcccggttggtgttatcaaccgggactaaagatgctcccatctttagtccggttggtaacaccaaccgggactaaagattgatttttagtcccggttatttgaaccgggactaaagatagcgatctttagtcccggattcgtagtcccggttagaaaaccgggactacaggggggttatgaaccgggactagaaagcatttctccaccagtgtcaagatcagttcctgcaattgctcaattgtgcaatccataattaatagaccctgttgtatgaaaaatgtcagacagcaatgtaaagcggctctgttggacagctagcctagtattgtcgacttagcaaaacatgataccataagggccccatcagtaaccgaaccgtaaatcctcatttcgatttgaagcttacatcactaagggcctcatcgtacggcacatttgcaaacgaaaaataatttgtgaataaaatttttatacacgtgttcttaacgacctaaaaacaaaggctgaaaaataaacttcgatgaaaaaacctaaaatctttaaggctgaaaatttaaattttagctaataaatatagcgaaaagatgagtccgtaaaacaatatgaaatgcttagcatttagttataaggacagtgttttcatccatgagaccatgattggtacaaaggttgggagttcatcagttccgttatccaaaacatatcagcgagcacagatcgagcaaagatggccttggaattctttcggtcatctcactgctacagcgccaattttcccgtgcgggcgacaccctagcaccggttcttaatttttctgtgcgattccacttacaaaccgcacggaaataaaaaggggaggcgtccagaaaaatcaatcgtatagtagtgtcaccagcttgggtcttatgtacagttgaattctgtaagactgtaaccaaaagaacgaaccattgtgtgagctgttaaaatattagccggtctagttgcatgctggaaacctacctcactcatttgtttcacttaccgcactgtcatgatgcatgtatggcagcgcaagacctaactcaagacattatacaatgcacacatgtggataatgaaaaggacattacacagtgcacatttgtatgcacacttgccaaaatagactccactagaaaaaggtaaaatccaattttagcccttgtactttgctagaagctcattttctacggaactatgaagtcggttattttttaccctcaatgtaaaaccgaaagaaaaccttaagatatatttttattggtttgtccgaaatggaggtgattttgttagttgatactcttattcgcatattttgccgatgagtgactctgtgactgaacgtgcatctttactatgggatttgaaggtttatttatcttgacctcctcctattattttatcacatagcaaacgcacacgtattatatttgcgcaccactgtgctcgcacgctcgtgaatgcgtcccgcacacacaaaacttccaactcacgcattcacaaatgtgtctgctaatacacgttcaaagagatgaaaatcaaccgtgtatttctgatcttgctaattcctattaaaaagttatttgcatgtgtgtaataatctcgttgggtgaaattatgcagtggtgctgcttcccgacctctttctttttccgctcctaaagctccttcacctgacacggcccattgcaaactgtcagcagatatctatggacaatttcgttcttatccttgctttgatgtccaatattgattttgtcactgctttttagggttttcgtttttgtccctgtttttttaaatgaagtagatatctacccctgtttttgacagaagttagtggaccttgaattattgagctaaaaaaaataagaaaaagagggaatattgattatgtatttttttggttgacctttgtcctcctagggagagaagaaaggaagggagccaggctccgacgccattaccctcccaatcaattttctccaaccctaggggacctaggcggtgacggtgagtcggcgacggcggcggcgatcttgccggcggcaactagcagccacctccttccctggcgaggcagtggggagtaggcggtggcggcagcttcactagcaggcgaagcaagcggccactagcaggcgaagcaagcggccacgacgatgacccgatgtggggaggaggcggtggctactctgccaggtggtagggaggggtcttcgccgtggtaaggatggatcttggtggcggcgacaatgggaaagggtcttggcggcggcgacggggaggggtcttggcagcggcggggacgggaaggggtcttggaggcggcggtgggggagcaggaggccgcgacatcgtgccaacaagtagagcgcagagacggtgcaaggcgacgatgagttggcacaagggaggtgaacacgatggcgagcagtgtcgactaggcactaagacttgatttgcttgactttgagcacttggcatgggaggagcaagaggatgtaggattggatttacttcactttgtgattggaattttttgactttgtgatgctttgctatacttccgcttgttgtgttaagaatgtgtgaaacttgtgccattctatcttttttttttgtcaaaatgtgtccaattttttggcaaaattatgtgaaattttgaagcaaaattttgcccagtctggcaaaattgtcatacttgtgaaagtttatcagaattgcgagctgataaatagtaacaaatacacaattcatataaaaaatagtgtcaaatgtgtaatatatagcaagtaaggtaaggatgtctttttgtcaaagatttaacaccgttaagatacccatccaaaacaggggtaaattttggtttcgattcagaaaaacaaagggtaaaaagaaaaccgtaaaaaacaggggcaaaatcaatattgaacatcaaagcagggtaagaacgaaattgccccagagtacagcacaagttgcatgcattttctgcaatctattctctgtgttctctaactcaactttttatgtgcatctttttgcagatgcccatgttttagatgaagatatttcgagagtttcttcaagtgcttagttgtacgttcaccatatatgccaatctgaaacgaagacgctgattcattcttttttaatttccatgtctcttttcatagaattgaaagctcaaaattgaaaattttggattgatttttcacctgaaaattccaactgaaatggtcttggtatagtcgtacctataaatagcaaaacacgctgatttgttgagttacatatgcataattgtaaattggtcaattaatggacagttacaaacatctcgatcatttaatttgccataatacgtacgttctaatgattgtgtcaggttctggactgggcctcagaaaaaacgagctgaaaacgcaggcccaagctatgggcatcagcccggcctggtagactgtgagctggattgggctgggctgagtttgaacaggtagagaggtggacacaatgtagcaagggctgaaaatgattgcttagtgttttgggtagggtttatcttttccttttgcaaatgaaaaccgcatctcaccggcttaaaataagtgataaaaatgaacgatgttaatccaatgaaatttctccataaatcttttgatttaaaggggcccttaatgttgagaacccctgcttggcaggactttgtcatttccgttctatcaaaatacacacattcttcgtgtcaagacaatgtgatcaaggagcaaatctaagcccacaagctatacaagagacatacacaaaaaaaaaaaaggaagaaagaatcaaattgcctgtcaagctatagccttatcctggcgtctcttctgcagcctcgttattaatgtggcaccggcgacggcgacttggaccgcgaaccaccaccttcccttgacagcgccaccacctgcgttggcgccgacgccgacgccgacgtggttgcacctgcatccaccccttccaccacgccgacgcctctcgccgccgccgccgtcgtcgtctgcagactcagaccacctatcggtggcgacgacggcgacggcgacttcgaccgcacaaccacaaccggcgtcggcgagctcggccaccgctcgttcaggctgtggtacgccgtcggagacggcgaacgtgaggcctgcacgtagttgatgatcgccgcttgaaccggtgacgacggcgacttcgacgacgtcgacgtgatcggtccgccggtggtggtggtcgtcgtcgtcgaggtggtgttgcccctcaatggagaacgtgccaggatgtccgccagggcgcgcgacgccgccgtgggccgctccggcgacaggccgcaccggcgcagctgcggcagcggcggcgacacggccacgacgtcgctgagccgcacgccgtcgggctccgggtgcgcgcggcacaccgggcacgtggagtgggcgcgcagccagaggtcgatgcagccgccgtggaagaagtgcctgcacgccggcagcacgcgcaccacgtcgccgtcggcgagctcctgcaggcacaccacgcactccaccaccaccgtcgtcgcccccttccccttgccgctgccgccgcccctcctcccgccgccgccgaccagcggcgacgccgccgccccgcgcgcccggtacgtgaacgtggggagcgcgtcgatgtcgtccgagctcagcccgagcagcgcggcgcgcggctcgccgccgccgccgccggcctgcagctggcgccactccgacatcaccgaccggccgtaccggatcgccatgtacaggatcacgccgacgaggacggcgatgatgatgtacagcagcgtgaagttggagctcgccgtccccggcacggccgagccgccatcgccaccaccggagctcggatcagacggcggcgaggacatggcggcgaccaagaacaccacccggtttcaaggacatggcaatggtaaacaaaagcaatatcgatcaatcaaaaccaaaccgaaccaaccattcgatcgatcgaggagaagagggtggttgtgcgagatcgatcgaggcatgcatgcttcgcgcatgatagggttttttcagttgggtcgctagctaagctaagctaagctgggcttggatgatctatcgagacatgatgagacgccacgccatggagtattagtatttgattggttagaaggattattatatttttttaggacatcgttttgtgataatttcgtgttggattgggttgctgggtagtggtattgtttaaataaatttcatctattagattatctggtcatgcttgaattcaaatcattcggtggtgattttgtgcattttgttagtcatggttgattggtgactttatcattgtgaaattgcgagttgcttgacatatgctggtgaatgcctggatagggatcaaatataaggctgcggtcaacttcgcaaccaacagatgcacgtatcattttgtaaaatatattttgggacaattaagacagtgacatcatcgagaactggaaatactaaaaacatttgcaattagaacatcctaggcactagaggagtaacgttgaaaataatcaaatatggacaatattccatataaaattttccagaaaagcataaatattctggcccactaccccaaccatgtctaggagcctaggataggacttaagataggatggcagcaacgaagcagagacagcaagattacgagtgcattagggcatccacaatgtacactgaaagtaaccttagacattaaatactgctacagtacaacgcatttagcattgtggagtcagaccacaagtccgatgcaaccaaagtacaccttaagcttaaggtgtagcaacaaagctataaaatacaatacttttactgtttttctgtgcacaccaataaaatatacatgtcagttactaaacatagtaacgagtactactagccgttgctgctattccatttgagttgctcatttggtcccctagccgttgtcttcctccagcattcttctgctgcctacaaaaggaggaacaagtgagatgaacaacaatttttgatctattcagttttcccacatactaaatggagcctttcaaaggaaacttctcaaacctcctcaaccaaggttcctcaagccaagcaacaaatagtgaggcccaaaactccctttctacccaatttcccacaagttatccccaaaacttcagacctagttttctccaaaatttccatccttttggtcctccaagcaactaccagccatatcgacaccctccaatctttcaaggtgctcagcaacaagaatattatgggcaacctactccaggaagcttggaaggttttcaacttcaagaaaatctggtgcactcatctaaccaagcatttggatttgcagccaatagatcacagtttggtatgcaatatagtacttcaattagggctacagccaacacttcttctcatggatcagcttctccatgtcatacaagacataatgagaaagaagtagttgaggttgaagaggcaagtgatagcagtgaagaaggaagaagagggacacgcatcaattggactgaagatgacaatatacgactaatgagttcttggttgaacaattcagttgatcccatcaaaggcaatgacaagaaatcagaacaatattggaaggctgtagctagagagttcaacagcaatatgcctagcaatgggaacaaaaggaaccccaagcaatgcagaacacattgggacaatgtcaagagagatgtcactaagttctgtggattttattctaaagctagaactactttcacaagtgggtattctgatgatatgataatggagaaagcccgtgaatggtacaaaaagcacaacaaccaaaaacctttcaccttggagtatatgtggaaagatcttaaagatcaacctaaatggcgtagagtccttgaagagagtagccataataagaggagcaagatttctgaatcaggagcatatacttcatcgtcgaaccaagacacagaggaggaaacagagcgcaaagagaagcgccctgaggggcagaaggcagcaaaacagaggcaaaaaggaaaaggtgcaccatcacctttaggggataagccaagtcaaaatatggttctctttcacgaagctattacaactaaagcagcagcattgctaaaggcagcagaagcaacactgattggagcagaagcaaaaaaagagaaggcgattgcaaaaaaaagagaaggcaagggcagaaaaataccaaatgtatttaaaactgatggagaaggatacatcaacctccagtgaagcaaaactgaagagacatgaaaatgtattggaccaattagctagagaacttgctgaggaataaatgactagcaagcaatgttagcaattatgcttattttataatgtcagtattcttgtcatatattaaaattatgtactgtgttgatgcttgtactgtgaacctatttgtattgtactatgttatggtaatttgtataaatattgtgtattacagctatggaatgaaactacaatatccttagtacttgagaaatcaccttttcacatggatctagttggtgttgatggtttttcttccatccatgaccaatctgtttttttttctccacctgaatacatatgagcaataattaatagagaacaaaagcaagagggatgttgacaaaacctaggaaaatatagctgttgtaaaagactgacaaaagcaagagctagctgttaggatattgacaaaacccaggaaaatatagctgttgtaaaaatctgacaaatctagtcgttgtaaaatgtatcatctacaaataggtaatgtagttcagcagaacaacacccattctcattttgttcaacttcatctcaacagccttcccactttcaaaaaaaaaaatgtccagcaagtcaccacatcaatctagtgagtcagatgattctagctctagtgactaccttgaagagctgattttggaagaaatcaatgatcctatggaagctgagattgaagatgagattgaagctcaacttcaagctcaaatgcaagcacaacaaactggtcattctaatcgtcgtgggggctacaaacgaaggtacatcaatagagattaccaagacgaccacaacagattgtttgcaaaatactattccgacaatcctttatataccgatgatcagttccgtagaagatttcgcatgagaaagcatctatttttgcacattgttgaagctcttggcatttggtctccatattttcgtttgcgaagagatgcatttggcaaggttggtctatcaccgttgcaaaaatgcacagctgccatacgcatgttggcatatggtacaccagctgaccttatggatgaaacttttggggttgcagaaagcacagcaatggaatgcatgataaattttgttcaaggtgttagacatatatttggtcagcaataccttcgcaagcctaatgaacaagatatccagtgtttacttcaacaaggagaggctcatgggttccctggcatattgggtagtcttgactgcatgcattgggagtggcaaaattgcccggttgcatggaagggacaattcacacgtggtgattatggtgtacccactatcatgcttgaagcagttgcatctgctgacctatggttttggcatgcatttttcggtgctgctggttcaaacaatgatatcaatgtgttggatcagtcaccattgtttactgcagtgctacaaggaagagctcctagtgttcaatttactgtcaatgggacagaatataacatgggatactatttagctgataatatttatccagagtgggctgcatttgccaaatcaattactagacctcaaagtgacaaggctaaattgtatgcacaacgccaagaatcagcaaggaaagatgtggaacgagcatttggggttttgcaaaaacgttgggccataattcgccacccagcacggctttgggaaagggatgaactagctgatatcatgtatgcatgtattattttgcacaacatgatagttgaggataagagagacgattatgacatacctgatgacaacacatatgagcaatcacaatcttctgtacaactagcaggactcgaccatgggccaatccatggatttgcagaggtcctagacgcagacatgaatattcgcgatcgaacaacccatcgacgtctaaagtcagatttgatggagcacatttggcagaaatatggtggtcaacaacaacaaaactagagtttatttgtgttatgaaacttgtgttcttttttccatttttctttcagtcgtccaatttattcttattagtaactgagactctttactttttcatgcactaagagtaatgtaccagtaccattgccttaattagtcaagcacaagtcatattgaaaatatcatgtttttttggtcattttttttaatttcagatctgttggagcacaactaaacactctatgaaaattccatcgggatcgaaatcaacgattcacatgatgcatacgtacaaacagaaaaagaatctgtagtagcagcacttgcacatatttgatgacaaatttaatcgtagcagcagcagcacttgcacaaacagatataaatttaatcaccgggcaaaccaaaagcaagaagagattccacaacacggaaaaggagaggccacggaatcaatcaccttgtctctaacgcagaactcacggacgatgtaggcgaagttgagggcggtgaccgtctagtaggtgctgatggttgagagcagcttcaagtttgtggcgcagacgagacagagaagcacgcgtcggcagcgtcgcggccggagtagttcgcgcacgcagcgtcatcgatgggtgaggccgcgcacggcaacgtggcaccgaagccacggcacagcgaggtcacagccgaaggaggggaggccgggaggagcagcgacgttggcgcagccacgggaggagcaatcgtcggagaaattggggatccagtgcatgcgctgtgggagaatttggggatcgagcggagcgacgaagagaggaattggggatctgaggcggaggaaatggggatcgaacagagtaacagtggatgaggattttttttcactcgcgcgaacaagcagatggttaggagtgatctgtattctttttctcccgtggggcccagcgggacccaccttatttccatcaaacaaacagtatcattgtagagatttccttaataactattgctacctgtagatgggcccactcttgttatgcattttaccatatacattggccttgcccttagaatagcggacaaagtagtacacatacaggacaatcattattactctatcataggctaaagcagtcttatctaatgtttgcctaatcaggaagagggcccgaatatcattttacccatgtgcttagggctgtcaacgagccgagagcgagcgagctcgcctgcctaggtttttaaagtagaacaatgcatatttcaaggataatctttaaaacataattagtttcttgttcatcgtattaatagcagaggaaaaaagaataaaataaataataataccaatacaagatatacaaataacatatttgatatcctaattaattaaataataacaaaaatcatatattactagctaggctcgttagaagctcgatctcagctcgacaaagctcacgagctttgggagaggctcaggctcagctcgtttggagctcgagccgagctcgaatcgagcctaggacaagttgagctcgaacagcttgccagcctcgagctttttttgacagtctcctatgtatattagaagcaaatgccaatttactttaaaaaagcataaagtatttaaaggactcgttttctacaagatatggtgacgtggattttatcaaattgtagtttttagttttgcaatatatatatggtttgtatatttttagtgagcatattctcgaactgataaatgttacgattttttaaaataaaatatctttttaaaattaaataaatatattttctaagtttataataattaataattaattaattatatcctaatggttcatctggttttacgtgcaatggaaaagctcctcacatttgaacgcagcctggttcatgacatttaatttaggctttgtttagttcccaaaacaaaaattttcacgctgccacattgaatgtttggacacatgcatggaatattaaatgtaggaaaaaaatcaattacgcagattgcgtgtaaattgcgagacaaatcttttaagcctaattacgccataatttgccaatgtggtgctacagtaaacatttgctaatgacggattaattaggcttaataaattcatctcgcagtttcttggcgaaatctataatttgttttgttattagactacgtttaatacttcaaatatgtgtccgtatattcgatgtaacaataaaacctaaaaattttgcctaactaaacaaggccttagactatcttggtcctccaagctagtttgcccttggcgcaaagtggccctggggcacatctaaagtgccatctttgcaaggcaaccgtatgccaactttgatggtgaactctctttgagaaaacaactatgctccctgatcagctagtagtaaaaaagagtgaaaagccggtttgacttacctcatcatgctagcccacccaccatatatccactccatgcattcacttgtgctatgtggtttgactcaggtgaaggtaaatgggggcaaacattccatatatcgatggaaataaaagaacatataaatttagtttatttcataaattaatcataacattaaacttgtaaatactagtagaaccacatcatacgatctaagtatgtaaactagatagtaaaacatgaacatatcaaataggcgaaacatgatgaatacgtaccgaggaccgtggttgtgctgtgaatcaggttgacgaggagtagcacgcaccgcaggaacaacacacggtgttagatgttgtcattggtgcgcatctagagcatagaggaagacaagccgttatggaagactagtgagctgtcgtgcgaagcgcttgctaaaaacgccgccttctctcggtgtaggaggtcgaaggcgaaggttccgaaaactagctctaccgatagtcggtgcatgtcagcaagcaggacggaatagactacgagcgacaatgcaacatagaggaggaagaaaatcctagattgcttttcactgtcttgaaaggagacgatggcttggtttatatagagataacaggatacgtgatcaagatgcctgcacgatctccacaacgtgtaatcaaactggataagttgtgcataacctatacggactccactccactccacgcactggattatttggtgtgtttcaaaaaacaaacaccgaattttgcagcgaaacaaaactgcaaaagacatatcgaattttgctggaaaacaaaattgcaaaaggaaaccgtgtccgcccaaggattaggagccaattttgatgaatcattcacacacttatcatgtacatgcaccgccagacgaggtgaggtgaacaagcgcgtgtgtttctttagttctttccaccacacatgtctcaagtggttagaagagcactgttctttttaagaatgtctcctcttataatactgtcgaggagtaaccctctctagcaggaggacgtgagaccctcccctttgtgagtttggccaggggataaggcacgagtgatcaagagctgaccttagctgaggatttggttatggtggtcgaaagtgatcgggagtgaggccagagattatacaggctcgggccgctcggaagcgtaataccctactactgtgtgtgtggaactatgctcgagttcttacaagaaatcttgggctctaggaaaacctaactgtgcttcccctagagttcaagttctcgaaagtcgtcgtctttgctcggcgggtaaggtcctccttttataattcaaggggataccacatgcaccgcctctattcgtctcacccttcctggagaggggtctctcttccttgggttctggtcccgctcatgccttagaccaaaagcaacatggccgtttgctccgaggtgggtcccaacgccgtctcccatctgacatgggggacatcccctgtcattccctcattaagccttgaagacttttgtgggctcatgataccgggagcgcactggacgtgcgtgctgagccctaatggctgatgggacggggcatacttgcccccacgctgcctgacacagggcggggcgtgggtgcgctgccacccgtcccatccatctgtcaccggtcacagactggtccaagcgattgacgcacgtcaatcccttgggtggcgtcgcacgaccaaccatgccgcattgcgtgggtggttgggacgctgtccgtaaacgtgccagtggcgccccctcctccgcccgcccagccgccacatggcagctgagcgggggccttggggtggcgcaacccttcgggcccgaggggtgcgacgggataccccgaggcccctaggtggatgcggggcgcctctcggctacttacaggtggctaggggaaagggctcctccactccttccccctaacatgggtatcccgggtccatatcaccgacaaatactaaacatcctcatgcatatcttcttatgaagtgggattttgtgtttttcttataattaatctctgaatggaacttggcccatccattaattcaagatatataaggtgtttaatatcgttctaagttaaacttaattaagttttttgaagttgataaaaaaacataccaatatatataatattaaattaatttcgttaaatttactgttgaatacattgaatatgtgtttaattatttgctttgggttgaaaatggtatcattttctaatagaaatttgataaaatctaaataagtttgatttaaaacaaacctaaaacacttttacaatacgaaacacagcaattagaacataaaaaataatatggagcgaaaaaagactctaaaggagaagattctaagaagccaacttgtaagaatctaaaaacgctgaattttctaggttctgacatactccctctgttccaaaaataccccaatcctagatttaaaccttgacacacatattgatttttcttttgggacggattgggggaattctatcagctggaaattctgtgagaaactattgctgccaaaagctttctaaacatgctcaaaaccttgctgaacttgagggatcaaatttgttatttctttcgtttttatagacatgtaccatattgtcataattcctcctttttaatgatgatgcagcatgtgcttgagagaaaaaaaatattgctgaaatgaaaataagccttttttagcgcatcgtcgaaatgggttgataacctaaaatgtctgttctaaaaaaaacataaaatgtcttgtaaataaagtcaaagggtaggctacatgacaagtcagtctgttctgacaaatgtccacttgcgtaccaaataagcagtcaagtataggaaagaatcaagttgtcacgatcaccttcggcagcatgaacaccaaacaaacaagagtagaaaaaaaatgaatttttgtattatttctaacctcttatatcagcgtcaaattggtgaatgcacatttgagccaatcggctcatttgcttagatgaatttcgtggttataaacatcttaataactgaaaagtcaataatgtgacatcctcttgcgaaagcgtaaattagtacgcttccgtcattccgtgtactctacacttcgaccacgtgcaaatcggtcgtcgccgtcgtcgtcacgggagacggtgaccttgacacccgcgccacacgctccggagtccacgggcgagtcggcgacggcgacattgccggactacgggcggcggcgtcaatggcggcggccgcgaggtcgaaacgcgtgctcgatcttatcggggatggcgacctcgacgcggctgcggaggagtcatcgtcgttggctctcgacgtatcggcagcggcggcggcggcggcctccttgggcggcgacggcgcgcaccggcgcagctgcggcagcggcggtgagagggacgcgaggccgaggcggaccttctcctgccctgggctcccccggcacaccgggcacgtggcccgcgacagcagccaaacgtcgacgcaggtggcgtggaagtagtgcttgcacgacggcagcatgcgcacgacggcgccctcgccgagctcgtcgaggcagacggcgcagcagtccgccgccgccttcgcgtccccgcgtccgatcaggccgcatcggccgggcgaggcggtggcggcggcgtggtacgtgaacgtcgggagcacggagacgtcgtcggggccgaggccgaggccgcgctgctgctgctgcccctggagcgcggtgaccgcgtcgggcgccgcgccgggggcggcgtgacgggcggacgaacgggtgtagaagatgacggccaggacgacgatgccgacgatggcgacgaatgcgccgatgcccgtgtactgcagcgtcgacgacgccgagtcgccgggcatggcctgatcgatggccggcggcgtgcctcggagtcagagacgtcgcgtcggcgccggcggagagcggccgcgatgtggcacgcaggggacgtggcgggaaagtggtgggggggggggggggggtttggttgcgcgcgctatatggaggttgggcgcagcatgatttgtgtttgggattcgcgtgcggtggcgatcgagttccgaattgggaggatggcatggcaagcacgtagtgtatagagtggaagtgcgggaacgcggcattttgattctgttgaagtgttggctctagcatttcaaacagaccaaaaaaaaatataatcacttaaaaaactcttgcagaattctttctggcagaatcatttgattgaggttgttggaagttatagaaaagctagattcaagcgtactagtatggtaaaaagtttgtaataacaatttttgtgtacggtgtgtagcttttacattgtatttttagagaggtgtcagagcatcaccaagatattgacagtaattaattttcaaaactattttttttctcctaaactgaatataggaagtgagaaaactaatcttcctaaaattgatttcctacaatgaaaagtggaccctccctttaacaaattagttcttctactcatcctcccgatctcctccccaaaacgcacatcgcgcctggccagctcctcctttatcttgcgattttttctccatgtgcgcatgagagagcggttgggaaaaaaaatcgctcccttaaagtggagaatgagttggatatgatttttgaccaaaacttccttaatttgaggatatgaaatagaataaggaaataatgaaactgttggtcatgctcttacctcaaaaactgatgaaccgaaaatcttgtcttcgcaccagaaaatagtaattcctctccttcatattaaatgtcgtttgatttttttatcaatcaaaattttttagtttgatcaaatttatagaaaaaattagtaacatttatcacaccaaattaggttcattaaattcaacactaaatatattttgataatatatttgttttatattaaaaatagtaatatatttgtttataaacttggtcaaatttaaagaaatttgactaaaaaaatgttaaatgacttataatataaaaatcttcagatagtacgacgtataccacaaggtaaagaaatttgttggaaaaataccattcccgtaacttttgacggttacaaggacaagtggaccaaaaccgtacgtcacggttcgccgttgtcacccaaaggaaaagtggcagaacggaagagatggaaaatgggaaatgaagctgcctccagagtggctaggtgaagtggttacggaaaatcagaatatcacctgctgcagttcaaaccaaatgaaccatgacagccaaaggtggcgggagtgataattttcaaacaaatgtttcgacctatgctatgccaaaggcaaaagacatttcccttcggtacacaagacaatagcatggtagcagttgaatttttctgttccttgtagcctgagcttggccaaaatgggaaaaatgagtatctctagtagtggtggataaatagggggcacgacatggcgcaacccagaccggccttgccatgccgagccacgtgttaatgcctcggctcaggcacgacccagtgaggtaccaaggcgtgccgtgccatgttggcacgggcacataataggcacgtgggcggttcttagaaataagcaacaagatctccattcttggttgtgttgtgcatcctctttagcttagttcccagtctttgatactctctctcttccagtatataagcatttttagagttggacacagttattaagaaagtaggtagaagtgaatggtggagggttctaattagttgagtagtggaggtaggtgggaaaagtgtatggtagagagttatgattggttgggaagaaaatattggtggagaagttgttatattttgggacaaatcttgagagataaaagttgttatattttgggatcccataatataagcatttttagagttggacacagttattttgggacggagggagtagcattttcactacttcacaatgtagatatgttctggtgtcttcaatggttcatccacattgattgaagggcgacttagatgacggtagatatggtcatcatagtactatatatattttcttaaggtcacttttccatatcaatatgctgaagtcttgtgcttcgtggcagggtttaccttatcgcgtgcggttaccgcgcttatcaccggggcacggtaatggtttaccgctgtatggtttagatgaaatttgagcaaattgaaaattcccaaaaaaatcgaaaaactcatggatgtagttcttgatttgtagtggcatatgtttaagaaaatttttcaaagagggcaaaaccaaaaataattaagaaatttgaaaaaagaaaaaatgtattggaattagggcaaatacattgtgaacgattggtgtttgttgagatatgaatatttgtgaaataggtgaaatatggtttgctagtgatgtcgaaaatcagggacggagctagaacgaaatggaggaggttgcctcttgcttaatttaatctactttagatcaagtttaagctgatgcgtgtacctaagtttgtattgaggggtgcacacatagtgaaaatcggtgagttataactaaaaatttcttgaccaggttcctgggcacctcctcccatactctacctccgtccctgcggaaaatggttttgtagagttgatatgttatttgttaggtgagtacatatgctcatgtttagttatgaacatttattgttatgataatgggttattttgttgctcatgtaaaatattgtagtgatgtgcaagtaatgttaatttgtactccatccgtcccagaatataagaagtttagagttggacacggttattaagaaagtggtagaagtgagtggtggagggttgtgattggatgagttagtggaggtaggtgggaaaagtgaatggcggagcgttgtgattggttgggaagagaatgttggtggagaagttgttatattttgggacaaatcctaagcgctaaaagttgttatattttgggacggatggagtagttgttatgctatgaaatgttgaattggtcatgccgaatttttgtattttacacccaaaagttagttagtttgtaattgtcctatatattcttccaattatccccaatttctacacacatttaagggtttattagaattttttctactgactttttaattccatgtgttattgaaataaccttgatgtcgtctagagggggtgaataggtattcccaaaaatgatcacaacttcatagcatattagaatgataagaactttcggttcaaatcggaactttcggtatgggattggaagttctggtcttaaccgaaaagttcggcagataacagaataaaacactagctatgaacttgtagctcgaacaaataaaatatatatgaatcgaaaggtgacaaacaaggtatctaagcaagatataaggtcaccaactatattaattaagcatgcaagtagatcgagtaaaaataagctaagcacaatatgagagatggcaagaacgagcaaaccaagagatgagacatgttgatttgtttcccgaagtttggatccatggattctacgtctccgttgaggggccacaaaggccaggtatattttaaccctttcctcacgaggttgcacacatgtacttctcgatttcactcttgatttcttctcttatggaggcgaaatcgaagccttcacaaactttttgaggcacaccataatcttgggtgctcaccggcgacgcctagccttctaggaaaccttagtccccaagagtaacaattgaagatttgcttgctatgaactcgtgtgctcaaagtatggagtgaaactcactagctcaacttctcaatctctcaatccaactctctccccttctcaaatcccactacaaagaggcaccacaaaggtagggaaatggggaaggctatttagctttggatgtgtctaatattgcccaagaacagtagccactcgaagaagagttagaggagtttatatacccgagcctctcaaaactagctgttggaggccaagactgcaattttcggacaagttcataaatttatagtagccaatctcagtttcgcagccattttcggaatttccaaaatattttcagactttttgatattttttcataatttctgaaaagcatagagtaaaatgaccataaattttcgctcgggagtctgttttttatgatcttggactctatgtaaagctcactcagaggactatcaaactcaacaaaaaaggtctaaatccactcaaaggataggttaaaatttaggtttatctcaaggtagcactaggatagatcactttgagcaccgaaacatacacaaacacatcgacgttccatccctcttaataatacggcattcctatactcaaataaaaataggaagagaattataccaataggaatgccttctttccatcttccttcctttgtcttaagggatgccaacgccaaaaacatttcaccgtatattcttcaaatgattgatgcagttacttgttgcttcaaatggtctcgcacggtccatcatggcaaagctgtcacaggcccttcaccacctgatttggttcttcggcaccaagcccctcgcttgcccttcaccactgcatggtccatcgcgactgcgcatcgcttgcctttcaccgtcttaccatagtagccacttcatatcccacatctgcaatatatttgctttgttattcttgatattttaggtgtaatcatatcacttgagcgtcaacacctttttaatcattggaacctatttttctcattcaactcaatgaaattattagtctcaatgatccggttgtcaacctccacatgttgaccaacttattgcgtgtataaaagaatataaataaataatgagtattaatcaacaccataagtgtcatatactcaaatatatgatcaaatgtaaagatccaattaaatgaaagtgagtaacttggatcaagtacatgcataactaaggtataggatttgctccccctaaatgtatgcatacaaaatatttgtgtgaagcaagagtatgcataaaaagatatgaaacattgagagcttatcctatacaagaatagaagacatttattaaatataggcattaaaattaaagcataccttcatcgtctccatgttctcaatgtaaagaaactaaccaagagaaaatgctcaaacaaaacattagtctcacatgtatattatcattcacatggaaatattagataggaacatatgtgcatagagagaaagagtgatacatatagcttgatctcaatgcatttcatccttgtgatttaggtccactatcaatgctcgtttctatctgaactcatataaagtccgagagtcacctctcagaaattctacttccatatccacatgatactaggcaaagaaatgtttataaaaacattagtctcatattattgaatttatcattaatcaccaaaacaaaattaatggcacttgaacttttagttgcgttacacaaccggtgataaccgcgcagtaaccgctccaaaactgcgaaatcgtcaattttttaattcaaaattttggaggtgaattttacgtggtttttggcggttactgcagtaactgccctaccatgggtggcggtagggcaaccctactacgtggctgatggatgtcgctatccaagtaagccttcaacaccatgagaatctggagttgatgccgaagaattatcgtctcggctcgccaacctactacctcctcctgtttcatttatctatgtggacccgtgatgtgacaggcagtgtgccaatgataccgggctagtgcggtatgatggtggtggtggctgatgattgatgacgataaatccaaagacagataaaatagtacggaatgaaggaattcgtatctctagtgataaattttgataggcacacatattgtgtgtcaaatttaaaaggagtgcatatttggtggctaatagtgaattttgaattccattgtttatatgcttattatttgaatcgtttattagcaaataaaaaattatttgcgagtaaaacttttatataatggtccatatcaactcaaaaccaaaagttctaaaataagctacaatgaaaaaaaatgaaaataagttttaagaccaaaatgagtatcaaccaaacatcgaggcgctttgtggctcaacaaaaggacatcatatgtcctgcgtctcagtgacaacgtccaatgttcggcgcgcgcgcgcgaccacgagtcgccacggcgcgcaggcgtccgcctgcccaatttggcgcggagagaaccggcgcgctttcacactcctcgcgccacatcatcattcgcattcaaactgaaaaaaaaaaaagttcaaatctccctcctcgccgtgagcgcccgaaaaaatttgtcttctccctccctcctcgcctcggggccgcgccgctctgagctccaaatttccccaattttcccccaaaatttccaagattcgccggcgctccggaccaaatcggcgaaaccccaccgatccctccaaatttccttttcattcccccccgtccgggaagaactcgaaatctttcccctctccctcccaaatcccaccacatctcggttacaaatagccatggattcctcgctccctcccattccccaagatctcacacctcctcgcacgctcgctcgccgccgactagtgcctcgccgagcgctcagccacggcgcagcagcaggaggaggaggagtaggagctcccgtgtccgtccgccatggccgtcgtcgaccaccggggcgacaaggagaacgtgccgccgcagtcggccgctgctgccgccgcccgcctccacggcgccgtcgccgtcaagaagctcaagctgaagcggctcggcaaggagcgtaggcgggtaccgctccgggacatcaccaacctcttcctcgccgccaccgccgccgctgactctgcggaggctccgccgcggtggcagccgctggaggggtcgtcggagcgtccggaggcagaattcccgcccccaccggcgccggcgccggcgacggcgacggcgacggcgactgcgcagagctggtcgctggtggcgtggtgttgaagccggggagatgctctctccggaaggagtttagataggtggtggctgcttgtacagtctattctttcttctgattcttctcatttgatttatccaattactcattggattacagagaaaaaaaagttgctccttagattggattgatttgtttcgctactgctaattggtggcagtgaaagatttgttcaggggggaaaattttgtcataaacaaagttcagatttgttatgtttcagcatccgtttctcgcgccgcatttggatccttgataatttgtctatctgtcattcctgagggttgcagcagtgtttttcagccaaaagtctgagctgggaaaatctcctggtatccagttgcactacttgtgtacagcccattggttaagtttgatcatcaaaatggttagtttcttgtgcttgcctctgaacttatgatgaatggccagtttatctggaactgctagtctgatgatgtgcatacaccagtagggatagcctgataatgtagtccactactgtagataaactgtacctcatacacttatccagttactcgttggattactcagaacaaaaagaactagtccttagattggattgtttttgtttcactagggttaatcgatggtagtgaattcagggggaaaaaaatgtcatgaacaaagttcagatttggtatgtcaaagctacatttgaggtaggcttgcaaactgaattctaatgtttgagcacccgtttctcccgctgcatttggatccctgattctttgcttatctgccatttctgaaggttcgagcatggttttcagtctgaagtctgaactggtaaaagcatcttacatcccaatcgttctgtaatactacctgatgctgaagtttgataatcaaaatggctagttgtttgtgtttacctctggacttactgcaaatggctagtttgtctggcagtaattgtctgataatgtgcacatgccagtagatattctgcagaaaggttaagttgagttcagttcactactgtggataactgtacctcatttcatttgagctatccctggacttccttgaactggttgctacaatatctaaaccatttgttgtatcattagaaattatattatcggggaatggtgcttatttaggtcttttcagaacctttaccgatgactcccgctgctatttatgcagaaaattgttatgccaaggatcactgatccggtgaaactaggtgatgtttgtactttgtactatgcaataacgcaagtatctaagaattatgattaagttgacttgtgctccttatacttaactcttgtatttttcattatgaaacaaatctcataccgatgacatattagaagtttgttaatagacattcatttcaataatcttccttcatgaaaaaatgtaaaacagcagtcatgcgctgaattaccactgcataattcttggaatatctgggaaatgttcataagaagaattttcatttgataacctgtgggactaattttccagcttcacgtgtttataaattggtgttgctttgaatgctgtcccagtcccgaggaattcacctttcaatatagtcatctatgacaaagtacaatttgcacactaatgtatttagctgctaaaaatcatagtggctcggtggctggcttgctacacctggatcaactacatacacaggtagcctaagtccagttttagttgacattgatgacaaactgcattgtttctaaaatagttctatccatatactaaaaatccatatgttttacatgataatactatgatttgtatacagtagaaaatttcaagccatccctttgtcatagttgcaaaattcctcactactgttctggcttcctgtattgaattattgaatatcatctttcagaatgataggattgaagtgattgaaccaaggcgaaagcataaagtggggatattgtttgttgaggaggcatttttgtttgaagctgcatcaactgattttctttgaaaacagcctatgtgtacacttctggtctgaaccattcttcctcacagcaacaggtgttagtaataccggtgagtgtattgaaacatggttgatttcaagaattaatacctatctacaaaatcattatagctaagcaaggtgatcactactctttggtcttagatggtatatcatgatgttatttgacgtcttttaattcaaaatgggtgatttggaacatcttttcgtcaactgaatttcgctgtcaaaccatgtcttcttagggcactgatacttctaatctgtgaagcttatttgcatcaagatatgtctgaatgtgactactgttgtattcactgacctttgatgaaagctgttcatttgttcatccttgccccagagcttgtctttctagttggctaagtacgatatattgtcccttgtcataggtgcagaaatatgtgtactcatcaacagagcatatcacagttgatttttgagaaaatggaaacaaagttttccattgagatacaggattcatacaatatcttcattgttattctggatactaattaaaaccatcttatgtgtctttgggtgttaagataatgtttcttttagctttgacaaatacttgagatcttcaggattcaccttacagtgcccttgtttccagacttcccatagacgtagctcagtatcagtttatctgaaattgaaagtctctcacaaagtaaactgaacattttatttaacaaagtagactgaacataaaacataggtgtgctattaattaccatttgcatgtgcaagtttctgcatatgaatgtgttttcttactatatttctttctcttttttaggatagtgttcatgatgcacttctagtcttactaggaaaccaccgctagaacttcaatatgtaaacttcaaaagcagataccaccttacatgcttagtgggtttaggcttcaacttccacctgccaagattacaatttttgttttgcggcgaagcgattcactgactagcaatttggatgatgaactcatttataaattctttagtctttggcttttcagttatgtcccattcattcgtttcagttggaatccagatcagagtgtccatagcactgaatcagtatcaagcacaaagttatataaagaagttcatatctatcatttcatttctacttgtgatg

SEQ ID NO: 24185 - DNA, 11202 bp, Oryza sativa
tgatcatgttgcaattaaagtatttactagctaatgaaaaatgcagtgctgtgttgtttaataagtaacagcaagaactcaagaagactttgctatctgttaaattatattgagcaagacaactttctttgacaaaaaggaaaaacatatttgaaaccaattttttatgcaatgcacgtttgtgaaaaccaaacactgcaaggttcgtcggtgcactaattctcaacgaaatcgacgttctccgatggattatgacgatggcagcgcctgttgccatgtctctgtcacaaaacagaacaagaccactgttggcattcagatcttgctatttgagtcagctagtgcaaactcagtatctgttgcaatccagtgtacttaactgctgaagattccatgtctgaaagggatgttgggagggaaacaaacatcagtaaaaggtgatgttaggtaacaaggttcttttacttcaccgtttgctttcagaatgattcatttcctttaagaatcatgcaagtgtattaatgatccatcattgtctagatcgaaaggaatacgatcaaattgtttggccgagaacgttgaagaggaacagcaactttcaattagtttggtgcatgcaagaatccagaaatgagcaattagcatctcaaacttttttcagatgaatcggcatctcaataacagtaatgcaactgaaaaatacttgcaaaaatggcgcctcctgttccagttcatgaattcaaggccatcacaagcaaatcattccttgtgttttggaccagccagacaagtgtaaacttatcttctgttggagaaaagaagattgcacctaaaaaaatccagggatccgtacactgataacgtcagaaacttgtattttgtttgatcaaaaatgcatgattagctggaacacaactgatgtttacacatctatggtcatcaactggatgctatttatgtgctgggtgcttgtctggttctttcgtcaagggtcctcaagtggccttaaggtcctatgcaaagccagcaatcttttgccccttgggtgtcatggaaagagatgccctctgcactgcaggtcgtcttgctgctccaaatcagtctaatgtatggacagtttgatttgaggaatccaaaccatcttgggtgaattggtccatcatgggattatatcatgagattttgatggtgtgaatattcattattgttccactaagaatatgtgttaagaaataacatggtgtttttgtaagaagttaaaaacaaagatagatagatagatatatttatgcttttttttcgttgatggtagttgtgcaagatgccgcaggcaacatgtattgttcatgatgtctagttttttttcctttttttttgttttcttttttacggctgtatgcatccttagttgttgctaagccaaatatttccattacttaatgtaatgagatattccattataaaaaaaaggagatagtatgatgacgagtcaaaccatctattaacttattaaaggaatagaaaaaaaagcatccacgttctctctcatgccctagaaattctcatattaatcggagaaaaaaaatcagagttcatacgggaatacaatttaaaaatagctgaaattcagaattaaaaataaggaatatagggagagaatactagagcccatagcggtatacaatagaactaatggaaattcgaaattaaaaaaagaaaattaaaagtagagattagaatccatatagaaatacaatttagaaataacgaaaattcaaaataaaaaaaaggaatattggaagaataatatagagtccatatagaaatacaatttaaaaataattaaaattaggaattattaaaaaagaatattgaaacataagtttagagttcatatagaaatacaatttagaaataatagaaattaaaaattaaaataaggaatattggaagaagagtatagagttaattcagaataaaaaaaattaaaagtagagtttagagtacatatagaaatacaatttacagatatctaaattagaaattaaaaaaaggaatattggaacaatagtctagagtccatgtaggaatacaatttagaagtaactgaaattcgaaattgaaacataaataatattgaaagatgagtttagagtccatataaaaatacaattagaaatagtgaaaatccataattaaaaaaataagcaatattagaagaagagtctagagtctatatagaaatacaatttataaataacggaaattcggaattgaaaaataagaaatattggaaggggagtctagagttcatataggagtataatttagaaataactgaacttttgaatttaaaataagaaatataggaataaaatttgtaaataatagaaattcataattaaaaataaagaattttggaagaggaatctagagtccatatagaaatataatttggaaataactaaaattcggtattaaaaaataattaataactatcacgtttatacaacactatgaatattacacatgattgatagtttggtcaagttagtataaaaattaaattatgttattattttaatatattttaataactagaaaaaaattctcgtgtgttacaatgagtgaaggctattttattgttatattgcttagtgaaggtgaaattcacagtggcaattcgtttggatgcatttttttttaaaaaaatcatgagttgcggttagaagtctgatcatttcaaattagcatgcgagttttttaaagagatttctcatacgacttcttttgtatttccataaacgaacgaacttaaaaactgactcaaatacggacatgtatttccaaaagcgaacgaacttaaaaaccgactcataaacggatgacgtaacaaaataccgacaaaaaaatcttcaatttttataataatagagataaaataagaaaaaatgtgctattatatgagacaaaacataaatatgctagccgcgcaatttgcgcaggccaccatgctagttctacttatagcaataaggatcatttcctacttgtgagaatattaattccttgtattcttaccttttatgttgataatttaggatttatgcataaacaacaaattaaatttgtatagaaaccactgtaaacatggcgaattattttgtgaacatatatttgttcatatataatatgatcataaatttatcctagcttcagaactaggacgaacaatgtcaaaacactaattctctgattcaaacattaatttatcatagattcctctagctacttaaattactttacaggttgtaaattcttgaacatcaagtagtcatcatggtgccatctaaacaaccaagcaccacaaacatagaatctattgtggcataaaatagatgaaagcacaaacttgagctatctagaagaagtgcgtggttgcatgaagactacagtctatattacaaaaccaactgcgtcattccaattaaatgtcccctttttgaagtataaaaaaaaaggtactacgaagaaacttgatgtcgaattaacagaaaacttaaaatatataggatctaagctgggcctaaaaggacatgaacttggatagtggtctccagtttatagggtccaatttttaaagcatggcgggaaacgaccttgcaagcatcattgtaagtatgcactgtcccttcttacttttttggagaggggaccagccctacaaaccgtatatatatagggggtgtttacatcacaccccaaaattttacaccttgtcacatcgaatgtttaaacatctgtatgaagtattaaatataggctaacaaaataactaattgcacagtttgcgactaatatgtaagatgaattttttaagcctaattgctacatgacttgacaatatggtgttacagtaaacatttgttaatgacggattaattaggcttaataaattcgtctcgcagtttgctgacggattctgtaattagtttttttattagtgcccacatgcgacaccctatataatatccgatgtgacacgccaaaacttaatttgcacccttgaatctaaacaccccatatatttatgtgatgtaaactatagaacagaagcttaggcagacgacataataacatataatatgtctgcacgttgatccaattggactcaagttaattaattaatttgtgcatgacggacgatgccctttctcacaataaattaattaaacgtataaggcagaaccgcagcagcttaacaaaactattacttcctccatatatagtcgcaaccaccactaacaaaccaaaaaatatttattatcacattctcgtttgcatcactccaataacatccaatgaaagtagtgatcttgatggaggattaaaaaataaattaaatgagaggggagaagctataattgtatgcatgtatgtgcgtattatattatgaaactataaaaaaaatggttgtgccttatgctgggatggagagagtaactcacacccgtgctaattttttttaagaaaactagctagaatatgcttattgagagacaccaaagtcttttctcctcaatcatataatatcaaacaacctagaaatacttgtattttgcaacaaaaatatgtgaaaatatgttttgaccgtttgcaatgatcatttctgtagtagaggttgattctatgcttactggaacatgtagatttctaatctacttaacatgatatgcttagcctaaacatgatcaccctaagaagttaaggaatttagggttactagccagtcttatgaaaccatggatgcgcaatttgtgtgatctcctctgtgatgtcgagatctagagtggaagtggaggactgtccttcgaaccactctggagcttggtgtaggcaaagtagtcgtagtagtggtggagttgtggtcaccggcttgatcgtcgtggatcagctgcaaggtggtggtgttctggtcgtcatctacattgctctgggacagttgtgtgttctcctttcaacgtctaagtgatgggatcagaggttttagggttttagggtttcagagagaagataattatgaaatgatagggtcagtggttttaggttttagggtttcaccggtctcccctattttatggcgctgaggaagactaggggcaataaaaaattaaatttttttatgctatcgatcacatgtagcctaatggttacaagagcctgagtagcaggtcctgggtttgattccacgtgggagcgaattttccaggatctttcaatggaaggcgacgtacatccgtcaatagcgaggcgcatgtggtgacttcgtcaatctacaggatgaattctaaaaaaaatacgcataatgtgtaattacagaaattaacactaggtgaattaatcacgttgatagtgcatgcaacggatgggaataaccgtgcgcgatccatgccgagaggtcaaaatttcccaacagaacgacccctagtaatatgttcacttgccaacaatgtgtttgttgaccaacattcagcatgacaaggcccttggtgggggcaagcttggcttcaactaaccaaactaacacgtagcttatattagttgtaattggaatcttggtcgttaagccagctcaagctatcgactaaagtcgagtaacttttgttaaatattccgatcgcgattgggacgtacacacagatcagctgagatcaagacgatgattagtcagcgggctcggctgcagcttgctgttggtaactccattactgggattcagtgcgactttggtcaagtgataaatatatatatacacatctccattctgctatatctatgttcagaaaattcaggcacttgatttctgcgtccaatgccgttcgagcacgatagaaatcgaaatcaatcaaatcaaatgcacgatctgggagagacctagctatctactaagtactaactaactagagattgatgaaggtttgagtactacatgcaatttgaattcagttagtgcattcgtggtaccagcaacctgttatctgaatatattgtagtacgggccggcaatagaacgcaaacctaactatacttttcggatcaggcatggcccaggattattggtccttctggttgttaggtttcgatcgctagctaactgttgtattgtccgcagtatgtgtcaaccgccatgcatcttgctttgtttacattagcgcccaaagtgctgcatctttgattatgtgtgcacgtacaaaagtcacaaaaagtgtttagtttcaaagaaaaggctagcatttcttttgttgtatataaacgctgtgggctatagactagctagttcgtatactgtgagtaacactacgctggaacaggtcaccagtgatgagcccaaaccatcatctccaacaggcaagaccctcgtcagagattagtaattagcagtgactttatgatcttatctgacggatgaaggtcaatggtgaccaacacctgatgggtaaaagaaaactatcactgctgactaatacctgtgacagaaaaaaaaaacccatcagaggcgagcctgaccatattgaattgatgatgttgtcacccatcacaaatactcatctacgaggggttaggttttttgacatcttagctcaattacgataagacctgtgtggttcatgagagttgtgtatgcatgtttagtaccaggcggaaccgatttttaagggcttgtccttccaatcataccactctcgggttaaccctttataaagtgatgatgaaagtataagtagggtagtatgtgtaagtgggcccgtccatcagatgagttgggctatgtggttctagaggaagagttgttatagttttgaccctcgccaccacccgtcattgtttgtaaatctctggcaaaagaaaaaaaatcacgtgcattgctagttaacaactcattcaccattcacaagaaaatctaaagccaaaaatattacagggaatcaagtgttggatctgcattcacactgcatttcacagagttgaaaaaaaatcatgtgttgataaaaatcatcgatgagctgaatactggtggcagtgatcgtggtcttcgctgttgccgtagtcttcaccaagttgaacggcgagcttggtcctgcgacgaccatagtgagcgagagcccgagcttaggtggaggagacaaggggccagtggagaggcggccgcctacactctggtgtgaaggagacgaggagatagcggccagagctcgaggggaagagatgacgacagggatggcaagcgatgaccttgggggaggaggcagagagcataagggcgttcagaacccgttgtcccctacaccaggaggttggatcttgtgtcctagagctcgggccgatcgagaggtgggcgctagcgctcagggtgaggaaggcagaggaggtgctatggggcagaatagagaactaccaacattggattgcgccaccacgaggtagggggtgatcagatccaatgtcccttgatcttggggaggctggatctagcgccctagggttcggcgacgatgacaacgaggatggtgatgacagactcttggggatggaagcgatggcagtggttgctccatggtacgcaaacgacaacgaaaatgacgccgagtgctcgggggcatagggggtgttgggtgcttgaggatggagtcggagaatatggcggtgaatgctctaggttcggtggtcgatgcgcctgatgagagagagagagaagaggacaagaaatttgcagtgtgtcatgctggctataggtagaggacagaaaaggagatggtcctgtggtcatctatgggatagaaaagatggaggcattaaagatgagtcatagtcatctttgactattgcacattttgtacctatcacaggtgagaggtcacctccgacggacctatgtgtgggcccgtcagaggtgagttgtgctgggtgcatataagtagcctgtcgcagatgatatcttatttgtgataggctacgccctacaaccttatctacaatgggctctattatggcttgttgtagatgaggtcctttgtgacaagacacttcagcccatagagatgggatgtcagagatgtgatggtctggagtagtgaaatgtgtagagttcatgtagggagagtgctgaacaacgagaaagacaaattagacaacaatgacaaagaagctgtctcttcaataaaaccacactaacccgatcgagatggccgaaaaacactagacatcataatttatttatggggatgcgcgtgcgcgcgcgcacacacatacacacacctaaggagcctaatatataacaggtggttctatttgtcagtttcttagttctctcttatcaatcgattaaccactttgatagtttgatgtttcatttataggagtggaaatggaaaaggatcatctctatgtcaacatcaaaaagaactcttgctgaatagtatggcttgctctgaaatcggtgtatccaacttcatgaaccaaccctaatgatgttcacctctctcatgctccttttctcctagtggcgtagctaggaatttttccttaggtagtcctagttcacaagttcacatcacatactaaaatttatgaacaccacataaatcctagatacaactacaaatttgattagaatgcgataaaaatgtagcaatagtcttaaatgcaactaacttattaacaaataacaagttcaaatgtgcaaatattacaagatagatagttcaattgttcacataaaaaaaatcttacatagaaatacaaaatgacagtgctgttaccatactctatgcttgctcttagccatgaaaattttaattatgtcttcttcactaactttggagaagatatctcgctcagtatatatgactaagcagtggttcaataaatcatcacatatattgtttctcaactttgtcttcactagactcagtatagaaaataccccgtcaatacttatagatgccaccagtaagatcaattccaatttaagaagcaaatacaaaaactcataaagaatatggttgtttgtctaaaaaaaaaagcctaatagagagctcaccaagtgtttgtataccttcaaatctgtaatctttcctcacatcatcaatagaagtgtcaatttggaattcaagtcttctcaagtccgagcttgaaaagtcattgggataaaacttcacaagcctaagtatcttttgtgcttcataggaggcaaatcttttcttgatttggaagaaaactgatggttttatctccttcctaattagtatcggcgatataccgataaaatcaaccaacaatatacaaactttaaacgttacgtgcactgttcaccatcgtatttgccatttcatagagtggtgaatgtcgacaaactttgtagtgtcaaattcttttcagattctctatgactattttcattagataaatatcataggaaccgagaaaacaagttatttttatataagacatggtacctcctaccacctactacctagaggctggaaagctctgtgcaccaaaaaagcacatgaacatagtatgcatagtgttagattgacataattaagaatattgtatatttttcaggacaataaaatcacttaatgccttgcattgtgttagatagacatatttgaggcataaaatggtgggcttgctacctggtgcagacactccagctccgttgctggcacacatgcccgtcagagctggcgcgtcttgccaagtcgacgcgtcttttatttcatgatttttcctttgcaatttttttaggtttttttgcacactctttttatttttttcttttttttcgtgattttttaatgcagtttagaatttaaatctttcatctcaaatttcataacattatattaaaaactttcaactcaaatttaaaaaattcatataaaaagtcaaaactcccaacttaaaatttaaaatgctttcaagtcaaaattcaaggaataaatcttgagttgaaaattttcaatataagttaaagattttctaatctgagttgaaagttttgaattttgacttaaaagttttcaaatcattttcaatcctgagttgaaactttttaaatttcaagttaaaagttttcaaatctcgcgttgaaagttttaattttttactagaaagtttactcgaattttcaaaatttaaattaatctaatatacttatatactctctctctgtcccataatataagtgattttgacattttgcttgtaccgtttgaccattcatcttattaaaaaaattagaattattatttattttatttgtgacttacttttttatccaaagtactttaaacacaatttttcgttttttatatttgcacaattttttttaaataagacgagtggtcaaacagtacaagaaaaatgtcaaaatctcttatattaggggacggaggaagtatataaaaggataagttggaaaaaaatatccagtgtggaggcccactaaagctagaaaaaaaaatatcatgtggaaaaaagacacgtgtgagagaaaaagaaaaggaaagagagtgggagagaaaaaaatgtgaaggaaaaaccggaaaacgaaagaaaaggaagtgcgtgaagccgtgaagccctggagaccatgcacgatttgagttcctcgcgcgtacacgctatctcgtaatatggctggtggtaatcaaactcctgtcattgatcagctagatgaagattaagctagctaggtaacactgctaagtgctaatccatgacagacagatgggtggcctgtagtcaaagagatcatcttcacattagacgcgcataattacacatttgagttgagatggaaacgaaagatgaaaggatttgacgtgggaaattaaaacgcctatatttttaaacatgaaaccgcgatggaaaaataaaaaacatatatatgcattcgtcatgcctaaagcaaatattaatatgtataataaacatcaaaatttcgcttttctttaatgttttgtaatgcgcgatgagttgcaaaagcgtgcagatgactgtgtggattacgttgaaacgtgagagatatacatgaattgggagtggattacgttgaatcatacgtatcatccgatcctgcatgcgttgactagggttccaacgaatcatctaccaacacatgcacaattcgtg

SEQ ID NO: 24186 - DNA, 6608 bp, Oryza sativa
ttcctgcagcccgaccgggcagcgtgtgccggtcagaccggcggtgattgagcggtcaaaccggccagcccgcggtctgaccggtcgacgctgtgtcggtttcggttttgggttgtttatttagatatccgtgattatttcatgattatgacttctagatggatactatacgtatgtaatactgttatttgctactaatgagtcaagttggagatagtttggtctcggaatatggtttatttatttatttcatgtgtaggtgacttgatgcctcgggagagtatttgcggtgatggaccgggagtcaacttagggataagacgacgtccgtggtggtcagagatcatgcgggatacttaggctagagttgatgcacgtggttgatggagattccatatggtatacgatggaggtattgtgtgcatatgggatgcggagtcgaatttggaaggagtccaaatttggtacgattggttatgtaaagtttgtttcttgtactagagggtttcataaggtatttaggactcctagtatgagtttggttcgtggctttaggctgcctacctcatgtataaatagagggggagcgtgaggcttctcgatatcgctttagagagcaattgagttgagttttgagttagggtttcgagtttagtcgaaatttttataaggagtgttgttggtgcactctgtaaacacagagagaagtaataaagtcgtcatccactttaagagttcttcgatttgtgtttcaccgggtttcagcggtctaactggcgatataccggcggtcagactggcggcaagcggcggttagaccggcggcatacgggcggtcagaccggcggcggcagcaggcgcggtaggcatctcgacggttcgaccgattgatctacatcagtcagaccgatgttcattaggcggtcagaccggtgcatacacttcggtcagaccgcgatccgtcgaattcgagggtaacttttatttccgctaaaagttttcggtttttgggtataccaaccattcaccccctatggttagcttagttcttgtgatttgatcgtacaaactgggggtattacgcaagtaatcatgactacctaaactatagttgtcgcactatcttgtcagaccgtctatttatttatagtagtagagtcaaatattatccatctcttctaaagccaatttttggaaagatgatacatctaaatccaaaaaattaacttaatcgattacacttgcactataatccttttgacactaggctgacatggcactatacattattttactgtcgacattagacaacccagaagtgtgctcatatttttggtacttcctatgtttcacaatgtaagattttctagcattgcccacattcatttagatgttaatgaatctagatatatgtatgtgtttagattcattaacatccatatgtatgtgtgcaatactagaaagtcttacattgtgaaacggagggaataattggagaatgatttagaatctaaactcaaaagaccaactttggaaggtgtagaggcaatttgttaggctttgtggcttagtaggaataacatagtttttaacagctacaatcatatttctttcttaaaggtgatattcaagacaactcattggacaaggttttggtctttgcttcttaaaaatgttgaaggagaggaagtacacatcaagtgcaggattctgaagaagcgagttatggatttttttcgaagaattgaatcttagcctttattcctctttcatcggttgttaaacttttatttgtatgttcctatgtaatgggagaagtcttgtgtactcgtgactagggttttggctgtatgcaccgcacaatgtgtagaggacgggtttaatataatccattatctaaaaaaaattagacatgtatgcatgcctagccgtatctcagaagaatacacgctgaacccacgttggccagcagctgcgtctcacgcacgatggccatttctctgtaacgcaaatcgtgcgttacgtacgaccaatcgatatgagtgcgagcttacacgaccatgcacacacaatttgatcaatatttccttttaaaaactcgtatgccgggattaattctaaatgcacgtactagctctgcagttcgaggcacccccctatatatacctaagctatccagctctagctacttcgcgattagctatagccatccatcgatcgatcaggacaccactgattaagccatggcaaagcttgccctgtgcttctgcgtcgtcctcgtcctcgtcctcgtcctcgcttcctcgccggcgccgctctccgatgatcgccgcgccgccggcctgctcggccgccgcggcctgcagcaggacgccattgtcgtcgacggcagcccgacggcggcggccaccgccaccacgacgacgacgacggcgtggccccggccggacacgccgccggataactggtacgacgggacgaagaggctcagccctggtggccctaatccacagcaccactgatgaacacatccatccacgcatgaattttgttgacagtgatcatatatatcaccactgtcagttaattacttctaccacaccattctctccacatgattttgcatcgctaattttaattttatagcaccggcgaagtaccagatcggagtttaatttctcgatcgatgtgcgtgtgtgtgtgtttccgagttaataaacctactatataggcagaccgatatttctgcagacagggactaaagatgggcgtcccaagagtgacagatgttgatttagcacttgatagaagtgtgatcactgaaaggaataaacgagagctatgtatgatcagttcgaactgatcagtaatttttcctcaatgttcgtgaattatgttctctttcttttttatatggaaataattaaatcctatacacaacaagatgcagtcagcctcaatatgtgatgacatgcactgaaacttttagttattcatgtttgtgatgacatgcaataaattttatgccaatcagcctaattaatgagtcttcttgcaattgaattttgagatgtgccgtgttgaacgtactcttaatttggagatctgagctgagtggtaattataatagtcaaatatagttttttgtttctagtcgctatagcttacatgttcttggagttcctttttaagcgagaaagtggaatgtttgtttgatccataggaccaccaaggatatgaaattatgcatgctttttaacttttaatcgtcttatgatccgggaaagaaacagcacctctgtcctcttgttctttccattcaaaagaaaatataaaacaatagagtttgaacactctgtgtcatatgcctcaaatcggattaagaaaggcatgagcaatggagaccacaaataaatactccctctatttcaaaatataagacacaactacttttcttagatgtttcataatataaaaagtgcatacatgcatgtaattaactagcatcttttctccaccaattattatcttgaactctttcactctcaaaatctctaattctattggatgcatgcattatatttcttaagatgatttcaaacgaagaggtgataataattgtttcttagtctttggtttaatgatggttatgccttattttggagtgagtagtgatctcattatgtcatgtggactaagaccacacataagttatgggcttcccaatgctgagtggtttgaagtgggcctattcaatccaaagcaaaccatggtccactgagcccatgaaaccactggcacctggcgggattatccactcaatttgatggactctcgtgaagtcgcgagtctccactcggtcgtagccatcacctcctcccccattgttggtattacttaactttatagataaaatttgcaagtgaacggaaaataccgatgtagcacttcacccgggagtattctcaggtatcgatttccacaggaaacgtgtgtgtcagctcttctccaggttcatccaaggacacaaagctaagataggcaaagggtagagaggattcactggtcgctttactacgtactcagatagggaggacttagtggtcttacctctacacctacctcacacctactgtgggatgcggagcaaagaccaatcaactatctactacgtacccagatagggaggacttagtgatcttacctcttcacccacctcacaccttctgtgggatacggagcaaacaccagaaatcaactatctactacgtatttggacagggaggacttagtgatcttacttctacacccacctcacacctactatgggatacagagcaaacaccgcctactgtgggatacggagcaaacaccggaaatcaactatctactacgtatccggacagggaggacttagtgatcctacctctacacccaaatcaacccttctgtgggatacggagcaaacaccagaaattaactatctactacgtatccggacatggaggatcttaatgatcttacatctacacccaaatcaactatctactacgtacccagacaaggaggacttagtcaaatcaactatctactacgtacctggacaaggaggacttagtgatcttgagagctgtcaccaggtctacacccacctcacgcctactgtgggatacgaagcaaacaccggaaacctctacacccaaatcaactatctactacgtacccggacaagaaggacttagccaaatcaagtatacacctactgtgggatacgaagcaaacaccggaaacctctacacccaaatcaactatctactacgtacctggacaaggaggacttagtcacctcacaccggaaacctctacacccaaatcaactatctactagtacccggacaaggaggacttagtcacctcacacctactgtgggatacgaagcaaacaccggaaacctctacacccaaatcaactatctactacatacccggacaaggaggacttagtcaaacctctacacccaaatcaactatctactacgtacccggacaaggagaacttagtcaaatcaactatacacctactgtgtgggataccaagcaaacaccggaaactgggataccaagcaaacaccggaaacctctacacccaaatcaacggacaaggaggacttagtcaaatcaactatacacctactgtgtgggataccaagcaaacaccggaaactgggataccaagcaaacaccggaaacctctacacccaaatcaactatctactatgtacccggacaacctctacacccaaatcaacggacaaggaggacttagtcaaatcaactatacacctactgtgtaggataccaagcaaacaccggaaactgggataccaagcaaacaccggaaatctctacacccaaatcaactatctactatgtacccggacaaggaggacttagtcaaatcaactatacacctactgtgggatacgaagcaaacatccaactatctactacgtacccggacaaggaaacctctacacccaaatcaactatacacctactgtgggatacgaagcaaacatcggaaacctgtacacccaaatcaactatctactacatacctggacaaggaggacttagtcaaatcaactggacttagtcaaatcaactatctacctggacaaggaggacttagtcaaatcaactatctctacacccaaatcaactggacacctactgtgggatacgaagcaaacatccaactatctactacgtacccggacaaggaaacctctacacccaaatcaactatacacctactgtgggatacgaagcaaacatcggaaacctgtacacccaaatcaactatctactacatacctggacaaggaggacttagtcaaatcaactggacttagtcaaatcaactatctacctggacaaggaggacttagtcaaatcaactatctctacacccaaatcaactggacttagtcaaatcaactaccagacaaggatacgtacccggacaaggaggacttagtcaaatcaaatcaactatctactacgtacccggacaaggaggacttagtcaaatcatctatctactacgtacccggacaaggaggacttactcacacaagccccagccatgcgcgataccattctgtaacgtcccgcctaggaggacttactcacacaagccccagccatgcgcgataccattctgtaacgtcccgcctctcctaggtcgggcccacttacgcctctcccagatcaggcccacttacatctgtaacgtcccgcctaggaggacttactcacacaagccccagccatgcgcgataccattctgtaacgtcccgacctggacaaggaggacttagtcaaatcaactatctctacacccaaatcaactggacttagtcaaatcaactatctaccagacaaggatacgtacccggacaaggaggacttagtcaaatcaaatcaactatctactacgtacccggacaaggaggacttagtcaaatcatctatctactacgtacccggacaaggaggacttactcacacaagccccaaccatgcgcgataccattctgtaacgt

SEQ ID NO: 24187 - DNA, 19935 bp, Oryza sativa
gtacccggacaaggaggacttagtcaaatcatctatctactacgtacccggacaaggaggacttactcacacaagccccagccatgcaggataccattctgtaacgtcccgcctaggaggacttactcacacaagcccagccatgcgcgataccattctgtaacgtcccgcctctcctaggtcgggcccacttacgcctctcccagatcaggcccacttacatgtgtaacgtcccgcctaggaggacttactcacacaagccccagccatgcacgataccatctgtaacgtcccgcctctcttaggtcgggcccacttacgcctctcccagatcaggcccacttacatctgtcgtgcttttataggtcttttctgcacactttgtcctcacccatgcgcacccgggaagaatttcccgatcagtcacccatccctaaattgctctaggccaagcacgcttaacctccgagttctttggaatttggctttcggaaaataagttgcaacttgttgagacgggtattctattaatcctattaagtcctgggacgggatgtcacatatattcaattaaagcagagtaattaacaagatacaaaaagtaagaggagattaccgacaactccggaattcctccgatttcttctaccttactctctcccaattctaatatacaataaagtacactagagcctcttgtaattcatgtcatgcttcaagtgtgtgtttacaagtgagaatgagaggggtatttataggtagagaagtgccttgggagtgtagagatgctccaagcatccaaagagcatcttctcttatgtcatgccaagtgtcccttctgatgacggttggagcactggaaacggtcataaccgtcatggggaggttgatctctaccgaactcaacttgggcctgggccagcggcctctgtcagggttcggccaaaccctggccagctctgttggccccggttttcggcctggacactcattttgggcccctcattctattggtcaagatggaaggcccatttggaggtgtttaattgggtttctgggtccaaaatttcataagtttggatacgcgtttgattctcctgctccttcgtgtatatttcttgtcaacttaggtagtttgtcacctgcataagaatatgtactaacactcgtggaaattattagaagtaaaccttaccactatgttggatgttctacatttatggctttatgcaggtattgacggtgttaatttggtacttaacagtcgtcaacacccatccctccactgaagtcatctttgtcccaatcgtctcctcccatttcctgacactgaagcctgatcaatctccgtcaccatcgtttcctgcctaatcaccactagagccgatattggagccaccgcctttctcattcttgccgtccgattggtgtcagaaacgtcttcttcctcatctttgctattggattggagctggagctggaggccaccaagcggctcttcttgtagatcggtgaggtcaccgagtagatttgcttgtagatcagtaaggccgataactaggtctgctcggaagctactcgtcttcacggtgatagcaacaatcttctcgttgtcaatagtggcaccaccgcacaacagaggggagcaaaagaaggagaagggaatagattgcgttgtgtgtgtgtgtgtgtgggtgggggggaggggtgggggggggttggggggatgacctaacccaacacgcggatccgtgccttggttctaggcttcgcgagctagcgtggcgagggaaggttaccatgaccttagcaggttacacagtcgactcttagccccacctaccgaggcaaacttaatgtatgcttttttattttggcctgtgaaattaaggttggggcctaaaataaaaatggcatgcattaatataagctaaggggcctgaacctatataaaaatccttgtctagtatatcttttacctcaatcttgggtgtaccatgtgtctgggttacgggtaaggtatactctctaccctttgatatacgtcagatatcagtatggtatacttgcgcgtatacagacattttcggcatacgataaggaaattcatcatggagttcacagatggaaggagtcctactcggtcagaactgggtcgtcattgtatcgtgccaggtccgatgtctccgagtcctacttggagaccagttgacctgcgatataaaagggaccccccggaggacataaggcatcgaatctcatagccgacacatccaccacagcctacgaagccggaacatacatgagccaagtcgccgggtgatctagtcgtaccaactcgactacgatctcgttggtatcatcgagttccactattccttttgtaatctgtgatttccatcatataatcccatatcaactggattagggctattacctaccaaggggcctgaaccaatataatccctgtttcctgtttgcttgatgtcgtactacatagatcgtcgtaccagcgtaccccaataccctctatatccggtctacgggtatcccccgtcgacagtggcatgccaggtaggcgcacctggtgctcaaggttctactactatgacatccagcttcgtcgacaacaatgtcaacaccaacctcaactaaggagttcctacttcaacaacgctggtgtggactcaagtcggcgaaatcgtcttcccggtttacaccacgatgccgatctcagctagtccatcaatggccggaaacgagaacgtagtgggtacaacccagaacaactccctgtcgaaggaccctcccgccggagcggagattggaacgtcgacgacatccgagcccgagaaggatcctagtgcggccaaaccttgtctttttgacaagaatcacgagccgacgaggatgacttccgaggtgacaaggtcctggtgtcctatccacaaaaccagaaaacacaccttgcaagccagctgggtttttctcaacgtccacgctgaaattcgtgcctgcaaagagcgtggaattcagcgtacttctccaactcgtgatgtccattgtcctattcacaaggcaaagaatcacgacatctcaagctgcaaggtctttctcagcgccatgaagacgccacctcctaaggtccagcagtcacgcatccccctcagggataaggacaaggaacaaggagcgacgctgatttcagatcgatttgttggggtaatcgatatcgatccccacgaaccatcagtcttgcacctgctcgaagactatggcttatcatcaacgagtacgccgcgcgaggttctggctatcgacgagtccggcacgtcagcgcgcgctaatgcggaagcggaaaatcaagtgactacaccagcccagcatattagggtcgtcaacgcaatactgagggaaaccccctacgatcccgttctgaacgacgatctcgcacgttggacagaatgactacgggaatcagtgaccaacctcagcaacgcgttcgaagaggtcgctgccgcagcacacccggaacagccaccaactggtgatgctaacggtgaaaaccctgaacagcgggaatcgcctcatcgagccacccctccacctcgcggcaccggcgatctccgcgatcacctgaatggccgccgagaggcgcgacgcacacgagacaacgagaaccgttcccgacgtcacgtctcttcacggcgtcacggtaatgaagaacgaggaggccgttcgagtgaagaccgaggccgtgataaccgccacaaccgccacgatcatgacgatcacgaacggcgggtgctgggcgatactggtcaaggacgtcgccataatgacggcgatggtggagatcggcgctgagacaacaacgggagacaacgacaggattctcgagaacccagccgacgtcctcgtaatcgtacgccggaaccaagcgacccatcgtcatcatcgtcatcctcctcatcctcatcatcagatagacatccacgaaggacgtatgatcgccgacaacccaccgcccccagcgctgggtgtagagctttcggtcgttcacttcgagatgtccgatggcctaaaagattccgaccaggaacaatagagaaatacgatgggagtaccgacctagaagaattccttcaggtttcttcaaggtacactacgatgccggagcggacgacaacgcgctggcaaattacttgccaactgcattgaaaggctctgcacgttcatggctgatgcatctcccccctactcgatctcttcgtgggcagacctgtggcagcagttcgtcgccaacttccaaggaacttacaagcgccacgtgatcgaggacgacctacatgcgttaacgcagaactcggatgaatccttgagggattatgttcggcgctttaatgagtgcaggaatacaatccccgagatcaccgatgcttctgtaatccgcgccttcaagtccggtgtcaaagatcgctatactacccaggagctggcaacgaggcatatcacgactactcggagattattcgaaattgtcgatcgatgcgctcacgcggacgacgcactgagacgcaagaacgacaaaccgaagaccggaggagagaagaaatcaaccaaggatgcacctgagtcaagcaagaagaaaaatcgcaagagtgggaaaaggaaagctcaaacggaagttctcgcaacagaatacgcggaccctcccaagcgcgcagacccacaaagcagcggcacgaagaaaacatggtgccctatacacaagtcggacagacactctctagaagattgcctcgtcttcaaaaagtcgctcgcaaaacacatggcatcggaaaaaggcaagcgagtacgcgtggtcaagaaggacgctgaggcggctactcaggaatcggactcagcatacccagattccgatctccatgtctcacacatcttcggaagttccgcggcatactcctcaaagcgagaatataagaaagtggaacgtgaagtctgttcgatgtggcagggagctgcgcccaagatgaagtggtctgaacagaagatagaattctctgaagaagaccaccctaagactgctgtcatcccagggcgatatccaattgtggtcgaacccactattcggaatatcaaggttgcacgagttctgatcgacggtggcagctcaatcaaccttctcttcgccagcaccttggacacgatggggatcccacgaagcgagttgacacccaccgatcaacccttccatggaatcactcctcagtcatcatccaaaccattgggcaaaattacgctgcctgtgactttcggccaagcaaataacttccgaacggagaagatcacctttgatgtcactgaattcgatacagcatacaatgccatcattgggagaaccacactcgcgaagttcatggccgcatctcacaacgcatatcaagtgctcaagatgccgggaccgaagggaacaatcactattcaagagaatgctaagctggtagtgcaatgcgacaaacggagcctcgacatggttgagcacatgcccagcccacctgccacagcagaaccacccaagaaagtgggcaagatgaacaagacgctgaaaccagacggcgcaatcaagatcgttccactctctagtgccaaccccgacaagaccgtcaagatcggggtatcactaggagagaaataggaactcgcgctcatcaccttcctccgcgacaatgctgacgtgttcgcttggcagccgtccgacatgccgggggtacccagggaggtgattgagcacaaactcatggtgcgacccgatgccaagccagtaaagcaaaaactgcggagatttgcaccagatcgaaaacaagccatacgagaagagctcgacaagcttctcaaagctggtttcatcagagaggtactccatccagagtggctagccaacccagtcatggtgcggaaggccaacgggaaatggagaatgtgtgtcgatttcaccgacctcaacaaggagtgtcccaaggatcacttccctcttcctcgaatagaccaactggtggactcaacagccggttgtgagttgttgagctttctcgacgcttactccggctaccaccaaatcagcatggcgaaagaggacgaggaaaagacagcattcatcacgccgttcggggtattctactatgttaagatgccgttcggactaataactgcaggaaacactttccagagcacggtccagggcacgtttagcaaccaactcggaaacaatgtcgaggcctacgttaatgacattgttgtcaagaccaagacaagcgactcattgattgatgatctgcgggaaacgttcgacaacctccgacgatatcgcctcatgctcaatcaggagaagtgcacgttcagagtaccatcgggcaagctgctcggtttcctcgtttctggcagaggaatagaagcaaattctgagaagatcaaggcaatcgagaacatgaagtcgcctacaagactcaaggaagtacataagctaaccggatgcatggcggcactaagcaggtacgtcgctaggatgggagaacgaggacaacctttcttcgccctgctgaagaagtaagacaaatttgtatggacacaggaagcctacctatacttgttgcccccaacctaatgaagaggcattctttgcactcaagcgctacctatcaaatccccctgtacttgttgccccccaacctaatgaagaactattcatctatattgccgccacgccatattccgttagcactgtcattgttgtcgagagagagaaggtgcaacgaccagtttactatgtcagcgaagctctccacgacgcaaagacaagatatccacagatccaaaaactgctctacgcggtaatcatgacatcaagaaagctacgccactacttccaagcccatagggtcacagttgtctcctccttccctctcggtgaagtcgtgagaaacaaagacgttgtcggccgcattgcgaaatgggtagtcgagctaagctaatttgatgcccacttcgtgccacgaacagccatcaagtcccaggtactcgccgatttcgtagccgattggaccatgcctgataacaggtcaaacaaccaaatcgacaacgaaacatggacaatggcgttcgacggtgcactcaacagccagagagcaggggcaggattcatcttgacatcaccttcgggagatcaattcaagcatgcaattcacctcaactttagggcgaccaataacatagccgaatacgaaggactactcgccgggataagagctgcaactgctcggagtcaggcgactgatcgtgaaaggggattccgaactagtcgcaaaccgggtgcataaagattacaagtgctctagccccgagttatccaagtatctcacataagtcaggaagttggaaaaaaggtttgatgggatcgaggtccgacatgtataccgcaaagacaacatcgaaccggatgatctagcacgacgtgcgtccagatgagagccacttgaaactagcacctttttggacgtcctgatgaggccatcagtgaaagaggcaagcggcgaagatagcccggtcgcccccaacatcagctcgggggctacaaaggcagagcgcgccattgccgatatcgagaccacagacgactggcgcaccccactcattaaattcataagcagcgaagagttgcccgaggacgacgcagaagccgagaaaatatcccgtaatgcaaaagtgtaatgtatgatcggcaacgatctatacaagaaggcaccaaacggggtactcctaaaatgcgtctcgtccgacgacggcagacacctcctcctcgacatacatgaaggggtctgtgggtcacatgctgccggtcggacattaattgaaaaagcttttcgacaagggttcttctggccaaccgccctcaaagacgcctgtgacatggttcagcggtgtgaagcctgtcaattccacagtaaacacacaaggctaccagcgcaagcactccagactacccctctcacttggccgttctcgtgctgggggctagatatactcgggccattcacatgaggacagggcggctacaggttcctattcgtggcgaccgacaaattcactaagtggattgaagcgacacccacgggggaaatcaaggccgacaacgccatcaaattcatcaaagggatattctgcagattcggattgccccaccgtatcataacggacaacggctcccagttcatcagtgccgatttccaggattactgcatcaggttgggagtcaagatctgcttcgcctcggtttctcaccctcagagcaatggacaagtcgagagggcaaacggcatagtactacaaggaatctagactcgcgtctacgacaggctcatgtcacatgacaagaagtgggtcgaagaacttccatcagtactatgggccgtgcgtaccacaccgacaacgtccaacaaggagacacccttcttcctcgtgtacggctcagaggccatgctccccaccgagctacggcatcaaagtacacgagtacagaagtattccgatgaggatcaggaggagcatcgaaacaccgatgtgaatctactcgaggaacatcgcgaatgagttgccgttcgagcagccagctaccaacaggcccttcgccattaccacgagaagcgcatccgtgcacgcacgctttcgatcggcgactacgtcctccgacgggttcaaagccaagcagggcgaaaggcgaaacaagctctcacccaaatgggaaggaccgtacacgatcacacaagttctgcggccaggcgcattcaaaattgcagacggcgatggtcgcaagttggcaaattcctggaacattgatcaattacgtaaattctttgcataagtcaatagtatccatacttgttagacatcttacagcttcaataaagcctattttcaggtcaagaccacaatcaaagtgttccttcccgatgatcccttacccaaatgacacctagcattgaaacctatcctcatgtccctttacgccgtcttgacaaggcctccgaggaacctaagggaaagaccatgtaagatctagtcgtataaaagttctcaccgtgcgtatcaaccaagacgtgtaatcggaaagaaactttccaacttcacggttgggggctaggatcagtgcttgttcaaccgaggcaggtcaaaggtccaagagccttatcttccgagaagaattctccgatgacaaggctgggggctagggagagtgtataactcaaacgactgatcaaagtcgcgaagtgagaagacactcatacacactacatccagagtaagaaagcttagttagatagatttcttttctatttcacaagtacttcttacaattccatcaaaatccaaagttatattacactttttcccctaagacatctgtcacaggacacggagattaccaggaaggccaatgctagtccatcgactggaagaccttctctgccagcggcgccatcgacttcgccaggccatttatctccgtaggagttctccgagaacgagaaaacccttcgcggaggaactcgaggtgcagctgcggacgatgatctcgtatgcaagccaacacatgcccctcggcatatcggcttgatcgaccacactcctgcttgaaggcctcgtcaatgcgttgaccgatgctgtcgagctgggcgcaggccccattcagccacgagatgtatccggccgccgattcctcgggatccccacggggtactcggagctctctacagactcttgacatggacgtgcagcaactcttcagatacgagttgaaccacacctcacgacccccgagtgtctctacggcctggtccttttttacttccagcataattctctcgagttccgcgacctcaaacttcgtccttcaatactggatgcgacgatcctggtcagcaagcgcactctcgaggtttgctcagcatggaaacgattaagtcaagctgctcttctctcccgagaacacaacaaatcaagtcgatccagacggaagggcaaaggatatgataacaaagacaaccaacctaaaggagtcgtcgccattctcgtttccacaggcaaactttgatctacatcgcacctcggcacatgtggctcggacgcaagtgccggaacgatcactggcaactcaggctgcccgctttgctggacatccttgacatcaacgtctctacaaactacaacaaagtactcaagatcataatgctaaagaaagctaaggtgacgaccgcacacataaaggtagttggaaccaataagagttttacaaagcatgactaaggaatacaagagagctaagatcctactcttcaaaaagcgggaggatggactcccctagatcgccgacctcctccatcacatccatgcgcgcatcgctagccgccccctgatccaatatctttcacagatcgagttcaggttgcgtcaacctcacacacgcaagcacatggcacgcccaggtatatatcccgttggacgtctcttttctgatcctggccgcgtgctgggaggggatcacctccatcgctgttgccagttccgcgagcaaagatgtcagcgagaactcgtcgggattcgccgggatggtggccttgacgccgcactccccggcgagctggtgcagaccggtgtaggtgacccacagtgagccacagatctccgacaagtggttctcaagcttcgacatacggtgctcgagcccttgccgttgtcgctcattgccagccactagctcccgcatcttctggagatcctcgcgaacctccgccaaatcgcgcgctagccggtcggcgcgctcattggccgacaacgtcgccgccgccctcgccccttacccaaatatgcggatacataccaattcacttgttggcgaaggtcgcgtcatttaaagttcgacgtgcaagaccgtacctccttgcgttttagttcatggattttcctcccgtctccggaggtgatggagcgggcgtcttcggcttttccttccacaccttctttgatttcggtgcggaagatggcttcttctaagccggctgctctaacttcttggccggttcaggtgattttactagcgtcctccaataacggttcctgggcattgttgtttccttctccaggaagttttgcatgaatttcacaaggttgtccgtcttgggtggctccacttcgaccacttgaatattctacgggtttggcccgtacttgattctaaccatggagcattgttccgtcctcggttgaaactcaaacttttcctccttcccgttgaactgttgtgccccgatcgaacaggtgatcgtaggacaccccggatctttcttcttctccgggaacttgtggagtatctggttgctgcattgttctgtcagcttgaccacctccgttgttgggagcagtctcttgttgttgagtatgtccttgagataacgggcgtatgttggcacttgcatggcgtccaacaacggcacgttgatgtggatcttctggattacttcaacaaaacgggcgaattgctcgtccactgacggtttcctactccgttgagggaacggcagcaaccgtatgtcgtattactcctgcggcactgtcttttttggctgaacttccttgtcagccgagtcattagatggcgcttcttttgatatccctttagttcctgcagggttaggatatggcggatcacgagtggacttacctcctctccttgtgatcgccttgacattttcaatggaggagtcgggttgccccggaatcctcccagattcatttgcagggactaaagatgccaactgagctaactgggtctctatcattttattgaagctcagctggttttgaaatgtggaagcaaagccatctaatttgacatttatgttatctaggatcttatcattggcagcaagctttttgcttagcgaatcagtggttttagcttgcgcaaaaacaagatccttcaaggagggctggttagagaagttaccgttaatgttacctccttgataatatgggcatggttggttccacccttgacctccttgtggacggtacccgttgttgttgttgcccatgtacatcgcctcctcacgggtttccgggcaatcattcccagaatgacccgtgccaccgcagacttcacacgtaacgtgtgagtccaaggccttgacggtgcctcgtggccttttctcgtggtcgtccaagcgtttcatgaggaggttcagcttggtagcaagtaacttcgtctccttgacggtgtgcatgtctcgctgacgggtctggagtcgttcctcgctccaacccatattgaagaccattttctctattaattcaacggctccttgaaccgtttttgagaagaaatctcctccaggtgatcgcgggacattggggtgagtccattataaaaaaattctgcaggatcagccagccatccatcccatgatgaggacaggcggccatgtactcctgcagtcgttcccatgcttccggaatagactcatcccttgtctgctggaaactggaaattcgtccacgaacggcattggttttgcccatcgggaagaacttcaagaggaatgccgtagagcatttatcccaggtattgatagtagcacggttggcataaaaccactgcttcgctctcccgaggagggagaacggaaacagtcgcagcctgacggcgtcgggactgacgcccttgatggtgtacgtgctacatatctccaggaattgttgcagatgagcattggcatcctcattaggcttgccacagaacgggctagcctacgccatcgtgatgaggctggacttcaagtcgaaatccacgtcccctatgttgacctgcggcccaatggccacattatcagtagagggagcagcgaactcgtgaagagtcttgctggccatcgtcttgaaggtcggtggcgcaggtacggctggtttatctgtcagtagagttttctgcggagcaacgactcgcggcctgacgctccggaagaaagcttctggattttctttgaagttttccggcaggttgaaaccagtcatgcactaccctgttttcacaacaacaagtgaaaacaaccaaggttagtctacaaaggaaatgattatacagaagtaaatataaagtattagttcaagcaatcgctattatgaatcttccccggcaacggtgccagaaatgcttgttggtatttcttaacgacattactagaaatataatccccgtcaacggcgctagaaatgcttgttggtatttcttaatgacattactagaaatataattcccagcaatggcgcagaaatacttctggtatattatggttacagagttcatccgcaagcgcacagatataccattgtagcatttcacccgagagtattccaagggtatcgtatttattttctcccatgggaagatcatgtagagaaagattgactaatagtttatatattacttgtgataatcatattctaagtaggggttaagataatctaagggtagagtgacacacaagcattaacaactcatcctcattataaatgatctaaactaggtgtaaagaaaagagaaagagaatctattcctatacttctaatatacatagtatacatacattctagttaactgatatactagctaataccctctatccgatgccctcctggtacttcgagaagccacccctgactgccgagttccttacgacagcccgtcatgaccatacaaccggggctaaatacggaggaataccctcctcaggaaattaacttaggattatatataggcgcgaaggaatacccgtactgagttgtcaccatcagcggcccacctctcatccgcaatatataaccccaaataatgatatctcgtaatttagacaccacgcctaaattaccagatagtactctaatatcatcgtcatgacatagagtaattgcaaaagcaaacattatacccgcaccaaaacatctcccagataagctagccgtatattcattataacatgaacataatgtaaagtaggtactcatatacttagaaagtattccaataccataaatgtatttagaagagtattctaataaaagtacaaagcttataaaagaggaaaggaaagttactagagccatacccgaactcttccgaaggcttctggagttttgactcctattctatttctattccaccagctaaatactactaaactaaacttgagagaaatgatagagctattgcttgaggtgtgtgtgtgaagtgagaagagtagctctttttataggcaggtaatgacggttgtgacggttggaatgatcagtaataccctccaaccgccattggggatcaatcccagccgtccatccaaaccctgcatccatcggcgccacgggaggttcagccgaaccaccaggttcggccgaacttggggctggcccaatctagcccaatttcggctggtggcctcgtctattgctccactccacagacttgtgaattttggcccaattcatcgtgtcaattctgagttcttggcctattcacacacaagtctggttatcgacatcgtccgattgatttatcatccgagtagatatcgattctccttcactttattatcattctctgcaaaaaggttagtagacctaatactagtggaatattattgttctaacatatttatgcattgcaagcatcactagttctcctttatttttgtagtattgacggttgaaactgatcgataatgaccgtcaacaatagccctagtccagtttatatgagattgatgatgatgagaatagattacaaagagagtaaagaaacaggcgataccgacgagatcgtggtcgaggggttcgacaagatctcccggcgagttggctccgtgtactccggcttcgtaaactttggtgggtgtgtggacaatgagatgcgatgtctttagcgtgtccttaggggtcccttttatatcgtggaataccttaacctccaagtaagacttagagatatgtaaaccgacacgatataccagagattctaccctttccgagtaggacttcggcaattcctttactcatagagatattttccataatctgaggcaagtttccaatggcgtatacgggaaccaaccgtatatatacgtgaaggtataccttatcagtatatttcataagtcgtaggatagaggggtatgccttatccgtaaccctaacaatctgatccgtaatttcttttcttttctctttttttgtggactatgtgaatcttgttcttctctcatttgtatagtgacatttgatacgtgaatcttgttcttctcatttgtggaaatgtgaatattgttcttctcatttgtgtgttgatttgatttgtattgtgattaatacgtgcaaatggtagctggatgggatttttttcaaatacttttttcgcccaatattattttcacaggcggactacttaacggagccacctgcaaaaatcttattttcgcaggcgaacaaggtaaaaaatgattgattttcataggcgtttaggtgcaagcggaagtgatggtcgtctgcaaaaatgtgttttgaacgcctacaaaaacgtttttttctagtagtggggggtggggagatgcatagcctaatagtgaacctagggatgttaatgagtcaagacctagggttctttaactactctcatttatttttaagatcaaaacgaagtttaaacccaaccctcaatttgtttttaagaaaaaaaaaggtaggcacttcaattaccacccctagggggccccgtgagtcgtgagtaccatgtaacaacgggggatttaaggttattagttcataaactggctgaacaaatcatgcgtggggcaatttgattgaagtaatagattaacaaatgtggaaatttttaaaaacaaaaagacagatagaacctccctaactagttagtctcccccaggtatattcttagtcgatgaacctcccctctcccttgtttgctggatcagttttgttcgttaattttttgtatgagttgggttcgttatttttttttatcagaaaagtcagttagaagtcatagttttctatttgtcttcctctcattgtgcggcactccggcagtattcaaacattatcatgtgttgtggtcttcacattacggaccaactggtactagatgaaattatggattattacggagtatgaaattaagcaccttcgtgccaactgccattgaggtactttcacacataatcaaagacaggcagtgtgtagaacctttgtggcaaatcggagaaggtaggatgcatcccgacgtgaatgtggtctaggttcgtgatagcagagtgcacacatatcctgaagcagatagaaatttgactagctcgctcgcactagtctcgactaaagtcgaactaactgaatcacatgaattatattaggtggtgttcttttccgattaggatacagattttatctcgatttttattagcacgtttttaaactgttaaatggtttgtttcgtagcaaaactttctatatagatgtgttggcttgaaatatcaaatttgtaacaattaaaactcaactaatcatgtgataatagttttcttatttaccctaactttatctttatctttatgttctctaaaaaataccaccataatggtacggtgttattgcctgcagctaactacgcgctgtgagtaagcataagctgatcaagtcaaatccgtgtaaatcacaaaggttaattaatcgatctatgtgcatagatcgagctggttttacttctatgagggtatgtccggccggcccgggagagaggagatggggcaaataggccggcggggaaaaggagaaaaaacttgggccgaaagtggcctgaggacacagaagggatttttatttgtttttcaattcaattaattgatggaatggactttgcattattaaaattacttcttaaactgaaaattcacggcaatttctatagagtaatttagggtaaggagaacattaaaaaatatgttcagccatgattttttaagtaaattttattctcatttaattcacttgataaattgctttaacttttaatataaatactataaattatttattaaataatttttaaccccaaaagaaaatcaggacgtaacaactgccaccacggcttcaccgtgctgaagtccaccactgaccactgctacccctctgccccgccccccaacacacacacacaaacacatacccctactggatctaaccacttccaagctcatggcgaacagagctagaaggctatgagatccgagggagggaattaagtaagaacactgcctggagatctgaccgacaccggcacatttgcccacgtcggtatgggcctcattatcacccgctagcctaagagaagaagaggcagtggcggtctagaagggaacacagggatctagtggagaagctcctcggcagcgttggcaggatgcaattgagaggggatagatagtgctgttagacatagaggaacaactctcttcagtctcagatagtagtgaagaggagaggcgaagacggcgagataggtgagcgagaaggagagaggtgagagccagggagggagaatgaggggtggacaaagcctattgaattgaataatagaggttggtagatatttttgtcggtggttcatccataggtacaagtttttgaagaaaaccggtaatgatgactcacctatgcatgccaatttttaaagaattataccaatgactcactcttaggtgccatttttgcttaagaaaatcagaaataatgacccacctataagtgtcattttttttaacaaaccaatactaatattattactgcaggttttattgtataacatactaatgaggtgttatagatgctggttttaaatttgaggggccgctcaggagaaagggagaggacggagaatacctcacaagtatcggttttaagttaaccggcacctacaatacctgtccctgtattaggattacattacattattgccaaaaactcatcacagtatgaaaacaaattgacagaaattgctgagaccacgttacgaaaacacacattaacggaaattgctgagatcatatatagatctgcattattttcttgaccggcttcgatcaagtgcaaaccaacatcgaaatgattcacacatgcacgcggagattcgctgaattcaaacacatacacagtcacacacacagacacacacacgagaaagggaaaattaaattccggaccggccggttcgtggttcgccggtgttgttagagcttaatttattattagggctgtgaaatcgggtggataaaacgctgtagctggtgatgatcactgaaaagaaacacgttgattatcagtggtgctgtggattaggcccacctgggctaagcctcttcgtcccgttgtacgccgcggtgatcgccggcgtcagcctgccgccgctgacaacgacagcggagtcctgtagccagcgccggccgagcgggacgctgccggcgaggcgcggcaggcccggcgtggtaacgactaggaggaagacggcgcagatgaagaagcacattgcaagcttcgccattgctgcctagctagctaatacgttcgtgcgacgctagcttcctggctaataatgctgtcttttggtcgatcgatggcttgctaggtacttagaagctagctagagaggtgcgtcgatttgcagagctccaccgtgtatttataaccccaatgctgaggtgcatgaatttttaagttagacatgttcaagttcatggttttgcttacgctgatgcgtttcagcacaagagctgggtgatgcttgtcagcataagcaattccatcgttttgcttctaaggaataatggccgattagtggatctagggtggcatggtggatcaatgaagggagtaaatttatttgagagattatatatgtattggtgcttccctaaacgggtagttattggaaaatttgtaaattgagaactaaattattgagcatatgataaattagtaactcactagccagtcctagtactgattagtgagggcacacaattaaatccattgatcaacactaaataggtgtaatgtcctgcctatgtggccgtagatgggtgttggcatggctggggcacactaccgatggctgatcagcattcggcctaataagcaagccgataggcatatgctgaaaatcagcagttgcaacagcgaatcgatgaagccgggtgttgtgtgtggcccaacccgtctcaagtaagtacctggtttgataccgtctctaggtactgatttgtaaccgatgggctactatcctactaccacctcgagctccatgaccacaccaataacgacatcaagaacttccagagaacttccagaacacctatctcaagaagaagttccctaccaagaagcagtactcactgtcgtcgagctcttctctttctcctccacatccatgcatgacaatactgttgtctcccacattcgttgcaaaggaccagtggggagtgcaagccgcacactagtactaaaaggcatatacagatcggcactataggtgctagaacagctaaaaccaacacttatagtgtttttcccaccaccgcaagctgaaaatacaaaaaaagacacatttacacgattataagtgtctgttttaaagaaaaaccaacacctatacaatattataggtgtcggttcttacaaaacactgacacaaaaaaccgacctgagatgagcgtgacacctcccccagtcccctgtccttatccagtccccagtacctagtcggcccctccc

SEQ ID NO: 24188 - DNA, 13826 bp, Oryza sativa
tgctgtggatacgacggcggtggcaggttggcggtggcctcaggcggatccggcggtggtggcggcagcagcgggcggctccctccaccccccctctcgcctccctcccgtggcagatccggtggtggtggcagcatcagcggaagccgtgggtggatctggtggcggtggcggcgcccgagagcggatccggcagcaacactccctccgccccctcttgcctccctctcacagcaaatctggcggtagtggtggcatcgatggcagccgcgggtggatccggcgatgctggtgtctgctgagggtggatccggcagcggcggctccctctgccgcctctcttctcccttcggcggcggggaagtgaagtttcgtgatgtatgttgttgttgttgtagttcttggatgattattatgtgattttgtgataattgtggttgattttggtggcaaagagtggttgattatttggagaagcagggtggatgtgctcgttgcatcggctcgaatatagccgatgcatcaagctgtttttttttggatcgtggaacctcgaatgtgtcggttccaaaactgacacctttgagaacaccacaaatgtgtcgactaataggtgccagttgcgaaaatcggcagctatagctatttctgtagtagtggcatatcaacatcgacctccctcggcacactcagcgtgatgccctctccatcgagcatatgaacggcttgtatgtcactgttgtctggctccacccaacccaaaggattatgagtgggcggacacccctgaggagaggggccaccgccaccaccaacaaccacaactatagaatatatttttgcatttggccaaaattgattttcgtaggaaaaaatcgcccttcaactctaccatcgctgccagctatcgtcgtcacccctcccggggctagggtggcggatccgctaccttcaagctcagtcgtcattgcccaccattgtggtcgcccctaccgtggtggagagcggtgccgtcggatccctcgttctggtcgctccagccggatcctacagccaagggcactgccaccacttcctgagcccgccactgcctctcccggcggcctctacactagatcccccgtcaccgagcttcccgccaatcctacccaatgctggtcgctcctaccaaccgccggttgccgaccaaccagctgctctagccacacgcatgagagggagagggagagtgagagtgagagataagaagggggagaagacgataagaaaggagaggtggaggagtggagaggattttgcttttatatttagtttgcagtgatttgtccaaacagacctcttaatgaggcgtatgcgaagatcttatttttgcatgcaaccgctcaagaggcccgtctgaaaaaatgcattttcgcatgcgaccttttaaactgaccttggaggaataatttttgcacgtaggagcagctatgatctgcctgcaatcaaaagagtagtgaagatagcgacacccgatgctgtggcagagaactcatctacaaggacgttgtcggaaccctctgcctgcctctagtgtaatcgatccaatgcatcgcgcgcgaactccaacccagtgcccgggccaccgtcgtcgttgttcatgctcacgtacaagagcggaggcctgggtgccgctattgttaacgatcagagttgtggaggcgaagagctctaatggaaaaatcgtttttcttgaggcagacgagcgtggtccagtcatcgtctatagggcataccatgggggatatccggaacataatacctgtgtataggcaccaatgatttttgggtatgtacatgcatttatttcgtcttattcaatcgtcatgtgcacatctgaataaaacataagcatgcttaaagtccctctaatgatacaacagaccacaataaaataaataataattaagtattttaaataaggtgtatctctaaaattttaaatgtgtcgtacattacaaaccgctgtagaggttgatagataaaacaatagaccaacttctaagtggtgaaaaatgagaatattaatattatattttggattatattgtttcagtgggacaacgctacagtcccctataggtttcccaccttctctccctccgtctgtctcacatgaaggtgggtggtgcagcagctaccggtttacatagaagacacaccaattatactgacaatatcttataaaattaaaaattaaatgggtaccgcgcacgttactacggaagaatcatgtgataaaatagtatatatgagttacagattcttctttctaactattctactgtattttcttttatgcgcttacacatctctcccgtcctaaaatataaggaattttaggtggatctgacgtatcttactactatgaatgcgtcccaaaatccccatacgttgcatgtgatttaaaatactctatacaataattactagtgggtgatgacgtggcatacttacatctaatttaaaatactctatatattaattgttagcgggtgatgattcgacatcttgcatattgagctttacgaggtctgcgagcacacgattagttcataaagtggctgaacaaatcatgcgtgggggcaattcgatcaaagtgaagaatttttttaaagaaaacgtcagatagaacctccctaactagtttgtctcccccaggtatattcttacacgatgaacctcccctcgccctagtttgctggatttcttttatcaggaatgtcagttttgttcgttcttttttttttcagagttcggttcgttattttctttatcagaaaagtcagctaaaagtcatagttttctatttgtcttcctctcgttgtgcggcactccggtagtattcaaacattatcatgtggtattgtggtcttcacattacggaaccaactggtactatatgaaaatatgaactatattacggagtatgaaattaagcaccttcgtgccattgaagtacttgcatacataatcaaagacaggaagcttttagcaaatcagagatggttgcatgtatcccgacgtcaatgtggtctaggttcgtgatagcagagtgcacgcatatctgaagcagatagaaatttcaatagctcgctcgcactagtctcgaataaagtcgaactaactgaatcacatgaattaggtggtgttcttttccgactaggataccgattttatcttgactttttttgctagcacgtatttaaactgttaaatggtttattccgtgaaaagctttctatatattagtgttgctttgaatattaagtaaatctattttttaaatttataataattatgcgctaatagttttttttacacaccctacctttatcttttatgttcagtaaaaaactaccaccttaatggtgttatcgcctataactaactacgcgcgcgctgagtaagctagcataagctgatcaagtcatatccgtagaggttaattaatctatgtgtagggattgagcaggttttacttccacgagggaatgtccggccagtcctcggactcccctcaatcgtgtttataaatctgaaatatcaattaaatagtaatatactccctccatcttaaaatgtttgatgttgttaactcttttaaaaatgtttgaccgttcgtcttattcaaaaaatttaagtaattattagttcttttcctatcatttgatttattattaaatatatttttatgtatatatatatatagttttacacatttcacaaaagtttttgaataagacgaacagtctaacatgtttaaaaaagtcaacggcgtcacacgagacggcatgtgctccattccatacgtgccgcgttgcacgctgttgtatcttcttttgtacaacagcaagtatgggtcctgatgagcacatgattccattgcatacaaacgttactccgcaagttgttttgcaacatccaatcactagaaactagttcaaaaaatatatttaccagaccggccaaaagtggtttttgtgtgcgtaactacagtccgtctgcccggaaggctgtgcgaaaattgctcattttccatataggtagcgcacccatacgcgaaaatccaattttcgcgaatgggtgtttatgtcgtccgcgtgcaaaaataaaaatccgaaaaaaataaaaatcgcaaaaaagaaaccctagctaccgccagagggctcctaccgccgccaccagatccgggcggcgccgccacccaccgcctaccggattcacgagacagagctgttgtcgccttcttcgatgcgcaggggagcctgccaccatgcttcgtcgctgccacacgccatcgtcacgaggcaagcgtggcagatccagccgtcaaggatccgtcaagggcccggtggatgcagatccgcctgccatcgagccaccggccaagccctccacctgtcgctaaccgtgcctgcggcccactgctcgtcctgtccagtgaggtgagagaggggaaagtgagagaggagaggagaagaggaggtgaacgagtggcgaggaaataatgaggagaggaggtaagagagataagtggataaggaggaaaaattttaaagtgttaagagggaaatgaggagctaactcagactttagacagatcctcaagaggccctaatgcgaaaatatattttctcttgtggcccctcaagagttccgcctgcaaaaatagacttatttttgcgtgcggccccttaagaggttcacctgcaaaaatcattttgcaagcagtcctcttaaggaggcgtatgtgaaaatggaggatgattttacagatgcgataagttacggtctgtctgcaacctaaagagttatcgtctagaaaaaatcatttctgtagtagtgagagctcaagcccgacaattaaatttataggtgagcttgttcctaagtacttctttatgtacttttgaggatagattgttacctaatgattaggaactatggagtggaccatggagcacttggagagagacgttcaagtcgagatggagatctaaatcatatcaagttcaagtctactttgggccccaagagaaatccacactaaattcgttgtgtaggatgcattcggactttgatttcgacattctacatatgtatggaaagctaacgagaccacctttcctatggatctagtcccatgtcaaaattccacccaagtcaatggggattgttgaaacaagaaggtgttaagaatcagtccgagtgttgcgtcactgtctttgggcccgttgggccatgtaccgtattggagtccaatagggatgcatccagaggactaaggtcgaccccagaacctatatattccatagccgcctttgagttagggttaggttttgcttagattaattcttgtatcgcagtttcatctctagattggtttgtggaacccaagtttgagttcttgattaatcattcatctgcaattgagtttggtctcttttcctttacatatgcaaatacctctgcaaatgagaacacatgaaactcatagtgcaaaaatgtttgttcaaatatataacacgtgaatctctcatagaaagcatgcagctttggtttatgaatatgtaatgtagacatggtcatatacgaattagtgatctcattatgtctttgattaatcattcatctagaattgagttcctgtttttcttgttcttgcttgtgttcttcgattcacatgtaaggattaccgttctcgtgaggtcaatcaggtttcggcatggttgataaccaaaggagacattgtgttgcgattgtagggtttgcatcgtcttgatcagaagccagatcttgtgtgtcaagtttccaccaaatcgatagttatcttcacctgacaaaagatcgggcatccagttgccatcaagtggtataagagctttaggtactgtactgttaggttcgtcttcgccctagtattatttttgcttttatccaatagtccacgagaaagtaaaaaaaaaagtagtttgcataattctgtttttccctgtcccagaaccacgtttagccatttgcataattatgtttcagagtccgtagtgttgagtttctgtccaaggtcaagttagtttagaatcgcgttcgtagttctagatctacatgttgctttgtgcgagagcctgccatgagagatcgagttctacttggtttcggattgctagccaccttgtgttaataacccgcttttgcaagccctcttagataggttgcaaaccaccttctgtgaatcaccttgctttgccagccccaatgttagcccgcataacctattctgcaatttgcactctagccagagcttcaacagggtgtgcgtgaaaccctaacttgtgcacatatttgaaaacaacaactcaattgcagttaaatgatcaatctagaactcgaagttggggttccacgaaccgctctagttgcgaaactacaatggcagaattaatctaagcaaaacccaaccctaactaaataatggctactgaatatatagattctagggttgaccttagactcctggacaagtcccttttggactccaatatgatacacggcccaacgggtccaaagacggcgatgcaatactcgaacagattccaaacgccttcttgtttcgatgattcctgttgacttggtaggaatttggacatgtgactagattcattggaaaggtgctctcgttagctttccatacatatgcagaatgtcgaaataggactccgaatgcaacctgggcaacgaatttagtgtggactgctcctggaacctaaggtggactcgaacttgatatgagttgtacctccatcttgatttgaacgtctctttccaagtgctccatgttcctctccatagttcctaatcataattaaatcattaggcagcaattattctcaaaagaagtatttatttcaaccttgcaaaacaacttgtggagtagcgtgtgttccaaaggagtgatgtcctcattaggtcccacaggccaccgcatctctagtacagtgtgcataggttgatgcttgtattagcctggcattaggcatatatgtatatatgtatcggacatcataccccacggcccatgggtatcagccctgataccatattgttgtcgaaatgacaaccgcatacgtcgaaagacgtggttactcaacagtggttggaaaagaagtaaagtgtattaatttgagaatttttacttgggatccccctattacatggccctatggggctatttatagcccccattacaggtcttactactagggctttggttatgcaagggaatttacatggttggccttatgaaagggacatttacatgggtacatagcgtaattgcggtccatgggcccttagcgggccgacaggttattgtcgacccaattaacccctgggcttgatgggccaggatagcttcttcggctctccaagagtcaaacctactacggcgaagtcgttccccttcggcgtacgctcttccccttgcgcccttcgcccagggggcctctagcttggctgcgattccctgcctctcgccgtcctcgctccatagtcttcgacatgggaagggttcgcctggcccaaatcctcatcggtcgcatgctttcggcaggtttggtcgaagggcctcatgcgatatcgccaacaagcccctcacgggcaagagtgagataggagcttcggccgagaccgtgcaaaccatgtgatatggtatgtggcgccccctttcgaccggtgctcctgccgaaacctacatcattcctgcaagtaaaatttgtttgtttctacgcttagagaaaatttctttgagaagaaactcctcttcgcattcgctacaaagcatcgaagggggggttatttagtctcttttattactatgaatagtaatgggccctgtgggcttttccttttccgtttttgggcttttactgttcggcatcgtcccgatggaaatttaccgtttcgtctgccctttgacacgtgtcagaactcgattggttggtaggcgaatggtctcgctacggggttatatatacccccaaaccggcctgccattttttactctccccgtgctctccccttttttaccgcttgacacactccgtgctctcttcgctcttctgtttcttcaacttttttgccatcgccgtgctcctagcctttcggctttttgcctctcttttatgtgctacgagcctaatggctcaccgcaagcctaccaaggccgggtcaactggcgaagatcctggaagccttggcgaaggatggtcatgcttccttggcaaatcacttgtcaaagaggccgacttgggcgtactggtatcatccggttctctcacagagggccaaggatcgtgcgggggtgaggccgttgttccctcgcctggggatgggcgaacggttgtcttcgccgcatacttcgctgctggtcttcgcctcccgtgcgataacttcttgccttcggtgctttcgatgtatgaggttaggcttccccagcttagcccgtcggcgttcccgaagctggcggttttcgcttggatgtgccggacctgtgggttcgcccctatcaccgagcttttcgccgctatgtttattgcatgcgcctcgaccaaagacgtgcagatgccggcgggcccgaggaaaaccgttttcggctgcgtgaacttcatgctgcggccggagcgttcagatgcttggccagtgcccgcatcgatggcgaaataggacaggaactggatgcagaaatggttctacattagcaacccttactccgccgaagatgctcaggcgagctggctgctttttgagcgttctgccgtctccatcaacgcgaagccgaacgtggagatcgacgggactctcgagtcccggcttattctccttcgcaaggttgcctggcggctgagcacctgggatctttgcgaggagttttgtctccttcggatttcccctctcgcccgtgtgtgggatgtttccgtgaacgagggcgaagaagttcttgggcttccccgcctagttgtccccgccggggccgatagtaaggttttttgtttttgacttaggccgtgtacttccttcatgaaagcgctttttaggctaagcggttgtgttcctctctttttcgcaatgcggactttggacgacgctgaaattgaggcatcgaagatgatcggggctctaaccacagccgagttcgcccgcttgctctagcgccaagccgacggccgggtgaatcgtgtctatactggcgaattgccgagccaatcgaacccctctcgtgctggtgatgacgaggctgggacttcaaaaaagcgcaagcgtgcggtcgcgaaaggtggccaagtccgaactcgccatagcgcgaaggccgccgtcgaaagtgatggggaggaggaagatgaggaggatgctgatgctggttcggaggaggatggctctcgtggttatacccccagccctacccctgcgaaatccggggcaggctcccatgtttcgcctacgcgaccacaagaaaccgtcgtggcgaacacccttctggtgatctccagcacagccgcgaaaccggtgatggatgtcagaaggaagaagaagaaggggaaggttgtgcaggtcggccatggcttttcggacagcgaagggtccgacgggacccctacttcgccggtgttgcggcgcgcaacttcccgtggcaggcgcatgtctccgccacccactagcgatgccgaagcggcgacgggcggtagtgcctcggccccggccgctagggcgaacgtcgctgaagacgaacgggtcgaagtggtcccttcacctattcgtcaacgagaggggaaggccccggcggttgaagcgagtgtttcggacgtgacgattaccgccccacatttcgtccccgccgactttgccacgcgaccggagatcattccgttcgtggacggggtgtgccaggtcatagcgtcgaccgatggccttgggcttttcaccgaactgaacgagttcggcgaaagctatgtggctgtggagagcctatttgtgcgggtatgacttatttttgcttgctaaattttgctctttcgctagctctctaacgtaatgtgtatatatatatatatatatatatattaccagggcctcgccgcgcatctaagtgccaagaagtccgcgttagagcgaggagagcctatttgtgcgggtatgacttattttttcttgctaaattttgctctttcgctagctctctaacgtaatgtgtatatatatatatgtatatatatatatatatatatatatatatatatattaccagggcgtcgccgcgcatctaagtgccaagaagtccgcgttagagcgactagatgggtaccgccttcgccttcgcaagtcctaagaagatcttcgccacaaggaagacgaaaggcgtgtggtggtggtgactttgaagaaggcgaatgctgagaacagatagcatttcctctggccatttgcccttcgctgcctcctcaagccttttttttagtgcttctaggattttgccatttgtacgttcggcgccccatttgactcgggtgcgcgaccgacgcgaacctaatttccaggttaagcctttcgcacatttctctgaacttgtcagagtcgaactgcttgccgttgtcagtgatgaactcttttggtgctccgaaacggcaaacagtgtttttccgtacaaatttttgcactactgccgaaatgatcgctccgaggggttcggcctcaatccatcgagagaaatattcaacagccacaattgcgaacttgtacccgtttcgtgccatcgggaacggcccaatgatgtctagtccccatctggcgaagggccagattggcgcaatgggctgcagctcatactggggcacggtttggcttcggccataacgctggcaactttcgcacttcttaatttgctcgacacaggctttcaacatagtgggccagtaaactccttgtctaaacactttggaggcaactgttcttgcggcttggtgcgcgccacatagcccctggtgtatctccttcgccatttcctcgccttcggcgaatgagatgcagcaaagcaagggttgaagtaccccaaagcgatagagctggcctgagaccatcttgtactttgtggctctgagttgcaagcgttttgcttctgcttcgtcttccggaagccatccagtttcaaggtgtttcacaaacggggttcgccaatcgtatgggtcttcacccagttccacttggtcaattgtcatgacttccaagctgtccatgggcacacatggtgtgtataagacttcaaaaaagatgccaggcgaatgtgagccaccacaagcagcagacttcgccaaggcgttagcttcctcgttctggcctctaggtaaatgttcgactgttatgccggtgaagcatttttccatggaccgaacagcctccaaatacttcttcattccatcttcctttgcctcgaaggatttgtcaacatggcctgctaccaacttggagtcggttcggattagcaagcgtcgaacccccaatgctttcacctttcttaggcctagaagaatggcttcgtattctgttgcgttgttggttgtgtcaaactgcagccttgcagcatatcgaattggcacgccattcggcgaagtgagtactgccgcaatgcctgtgccccaatgcgaccaagaaccgtcagagtacatcacccagggctgttcgataggctcgggctcgggggcgaatgctggtgtccatttggctacgaagtcagctagcacttgagacttgacggcagtgcgggcaacaaaatgcaagtcgaaaggggatagctctgccgctcacttgctaagccggccagtaacttctttaccccggagtatttcgcccaaagggtactgtgatggcactatgactttgtgggcctgaaagtaatgcttaatcttgcgtgaagccatcaccagggcgtaagcgagcttttccatttcaatgtatcttgtcttcgctccttgcaatgcttcggagatgaaatagaccggtttttggcctgaatccgtttcttggacaagagcagcactgactgccactagcgaagctgccaggtatagtagcagttcgcttcttgatgctgggctgatcagagctggcgggctttgcaggtattgttttagctcgtcgaacgctgcttggcattcgggagtccagttgaactttcccgcgccccggagggttttaaagaagggaaaacctctttcggctacctttgagaggaatcgactgagtgccgcaattcggccctgagcttttgtacttcacgtacgctcgacggaggcttcatttgctgaatggcatcgattttctcgggattcgcctcgatgcctctttcagaaacaaggaaacccaacagcttgcctgcgcgaacgccgaaaacacacttctcaggattcagtttcatacccgctgcacgcaagttgtcgaaggtctcctgtaggtcggatgcgtgatcgaaagccttgcggctttttatgacaatgtcgtcgacataagcttccacgtttcgccccaactgcttgtaaaggatcttgtacaccaacctggtgaaagttgctctggcattccttagaccgaaaggcatcctgagttgacaaaaggtgctgaacggtgtgatggaggctgtcttggggatgtcggctgggttcatgcgaatctgatgatagccggaatatgcatctaggaagctcatgggttcgcagccggctgtcgaatccatgagctggtcgatccgtggcaagggaaaatcatccttcggacatgctttgtttaagtctgtgaaatcgacacacatgcgccatttgccatttgacttccgcaccagcactggatttgccagccactcaggatgatcgatctcttgaatgacccttgccttgagcaatttttggacttcggcttttgcggcctcctggcgatcaatagacatcttgcgtagcttctgtttccttggcttggcatccggcttgactgccaagcgatgcattattagatctgccgaaactcctccgacttcatcagggccccaggcgaagatatgaatgttctttttgagtacctctaggatgttcttagcttcttcttcgcccatgtcgctccccagtgatacgagcttcgtggggtcggcatcatcaatctgcatcttgactatcttgccgtgaggggcgagctttggcgcgtgcttcgcccggtcatgcggttcggcctcaacattgtgcactgctctattgattatggccaaatcaccttttgaagcaaccgaaggctgaagccccttgaccacgatcactcctgccgggccgggcatcttgagcttgagataattgtgatgggaaatgacttcgaacttgttcaaggttgcacggtcgaagatggcgttgtagttgtatgggatgtcgacaacgtaaaacaatacttgctcttcgcgtctgttttcccctgtgccgaaggctactatcaactgtgcttggccaagaacttgaactgcttctccgccgaatcctcggagcgatgtcggtgctggggtaagggcttgggtagtcaaccccatcttggcatatgcttcggcaaagatgtgttaacagtgaaatttggcaagcccggagtagtcatcggcttagagtcagcatcggcttcgaagtcctgagattagccgatgagagttgtcaagtcgtcagttgtcggattcttgctatattcggttaaggaaattgatctactaaagg

SEQ ID NO: 24189 - DNA, 569 bp, Oryza sativa
ttccaattcctgatggcccagtatgctctatgctcaagttctacgggtagtcaacatgacttcccgtagactatctgatatggggacattccaatgggtgtcttgtatgctgtccggtaagcccacagtgcgtccggcaatctatccttccatcctgttcccattttgttgactgtcttttgcagaatattcttgatttgtttgttcgatgtttctgcttgaccactggtctgtggatggtaaggagtggccacgttgtgtttggctcccatttctcgtagaaggtctctgaaggttttgtcaatgaagtgagaacctccgtcacttatgaccattccggggtaccaaatcttgggaagataatttctgtgaacatcttcttggcatgcttcgcatccgtggcggtgcacggtatagcctcaacccacttggagacatagtcgactgccaccagaatgtactcgcagttgcgagacttagggaaaggtcccatgaagtctatacctcacacatcaaatatctcgatttgcaaattgtatgtgaggggcattgcatcgcgagcagtgatt

SEQ ID NO: 24190 - DNA, 19801 bp, Oryza sativa
  unsure (1)..(19801): unsure at all n locations
cgcgagagagagagagggaaaaatggggggaaagggagaggggatcacggggagttattccccccactttattgcacgcggggacggcaggaggcggcaggatttgcagcggcggcggcgctagggcgcgggggaggcggcgggagcggcgggaggaaggggatgacgggtgggccccacccgtcagcgagggtggcgggcgggcccgcccgtcagcggcgcgcgcgcggggagaggccgagtgggcagcggggagaggagagagaggaggagggagatgggccgggccggcccaagggagggaagggggacttttagggtttttctttttataaaatcattttaactttgtttatttcttaataattattatttgtgctctgaaaattccactaaaatttatttacgcattttaggcttttaggaaatttacaaaaatcctctaagccttatttgacttttaactttgcacattttaattgttggaggctttcacatggattttaattattctaggcatcatttaagggatatattttagagtcgttttgggacgtgacaggggttttgttggcggttgttaaatgccattctcatacctccaacatctgcataaagtcgagacaataaaacatccaacatagtaataggtgcttaatctcacatattccacaagtgttggtgtatatttgtatgcagatgataaaccttgaagttgggaggaaaatcagactaaagtgaggagaattatgtatccatacaaggaggggttgtgaacttcattgaaacatcagtaaatgaacccaaaactccgagaaatggaaacaggaaggcccaggaagtccaccaaccgaaggccagaccaggagggcccaacccaggttcggccgaaccctagtgatcaggggcggagcccaataagctgagggggattcccaggaacccggcccaaacttggaaatcacttgttacccctatagtttcaccatgtaggaaccccctcagcccaaaccaaggaacccccttcttgtccagcccagaatggaaaaggcccaagtaggcaagcagcagacacaaacacaggcaggcccattcgatggagtcctttgcgctgctcgaggcttgccctggaagcctcacaatcatgggagtcacgacgcggtcaagcgggcattagcacaacacatcgtttcgtcttcaggataatcaagttcgctgtacgcgcctcctcgctctcgcaatctcgccggctgcctccgttccggcggcagcctgattcaaatcgccgacgccaattgacactgtgccccaagccccaaggtcaccgtgctcctgctgctcggcactcctgattttgccgctctgcccgtgatgactggttttagctagggcgagccgagcagcccgagcttctgccctttgaagtttaatcgttgcattgtgtgatcttgtctagttgtctaacagggatgatacattgttgcttgagttggagcctctgagctgttggacggcaacttggtgccgacgtttcatccaagattagctctccttggctctgggcctctggtctctcccaatccaccgacaacctccaattgagagcaagtgagatttcccctcacttctcaaccttatttcttcaatcttgaaaattttcatcttgtcttgaataggttttatacgatctactgatatgttttgtgaatagtgactttgtgtctgtgcttgacactttagtaacttcgtgtatatttattagttggtttctttgttaaggtacacaatttctaaatatttatgtattttcttgttgtatattgctatcaattagataatgatgtttacagttattagacacacgagtatttagtactccataatagtgttccaactagatatgcggctatatacaaaagaaagctgtaggaaccccccttgattttgctctggctccgcccctgctggtgatcgccgttgatcccaggttttggcatggacgtcccagatcacgccctgatggcggttgcggggcacttcggacatttccccttcgccaaccgtcatacctacccctatataaagacatcatctcactcacttcaacacacacttccaagcttgagctaaattataagaggctctattgtactatattgttgttaacgaccaaatttggtaatctaagtattggagatggagttgagaccgaggtggaaattaagatggaatcgctcgaggaatagagcagaatcggctgatgtccgaatcggctgcgactaggatcggcagagttcgagttggacagggttagccgattgagccgaatccgataatatgacacggcatacgttgtcgggttaggttgacgtgcttcatgatgatttccacgcatggatggagtcctgagaaggcaattgtatagtgcttcatgatgattgccacgcatggatggagtcctgagaaggcaattgtatttattaattaggatattttatgtaatttctttagagatatgtttgggcaaatgtctgccgcaaagacttatagtatcttagagtttgttagagataagagtcatgcccgatatggacatattttgtaatctcgggtataaatagaccccgagccccatgtaataaaactaacacacgttcaaatcaatctcggtgcatagccacccttttacttttgttttgtttcgacgagttcttgctttggggttgagctgcatcggtttcaatcttcaacaagaggtaaaacttattgtggcggcttgcattctcgggattagtgcttccatctttatgatactctaatcttgtttatgtgataaattgaattatcatatatcttatataatctccggcaatatcgctatctaacctacaatcggctaacatcaatctgtcagtagaagacagccgattaggttaaataccgatgttgacttagattatataggaaatccaccactctatgacacatccaacggcttgattgtctagatattgtcttttttttcatacttatagatgcatctgttgagtttgatcgtatgagtcgtgattagaatctcaatctctagcctgcctttggttgccaattagggtagcatcggggtttcagccgatcttatctgatttgaatatatttatcttatgtgcttgattgacatgttaaatccgccctttatgttaagatctcgtcgtatttaagtatattaagctttccgtttggtatattgtacttgctttaatatctcaatataaaacggtatcggagtattagccgatacatgctagatctatctgatcggctatgctatgaacatatataatcttgttgttaatatatatttcggtctaagtgatttatactgtctcgacatggcgaccaatctatcccaatcacttgatttaagtatatatcgacataaggattatatattgttaatatcaacagccgatcaagtagatttagttctttcttacttattaatgtctgccgatcgatgcatatatgacatcggctcaaagataaatgatatgtcatcggcatctagccgatcggctatcgtttatagatttaaccgcggtttctttgtctttgtctcttgttgatcgcaggatcaaatcaactggcacgctcacatacccaaaggcaagttttggacctgcactggagttaagcagatctcccagacctcgtgtttttacatcaacacgcttttggcacgcctggtgggaccattagaagtcagaaccgcaacagtattctctcatggctgagaaaccaccagcatcgccgtctttgcgccggcaaagaagtttcttccaaaactaggatcccgaagtttggtgggtctgaagttcatgagagcaacatcatgctcatcattttggacaaattgacacctgaacaaaagaaggatcttgaggcgatgatgtagcaaacacagaaccaattcttgaactcattcatggagactcgccaaggaacaattgttcagaggtacaagatgaaattagatgctgatgttgctgcgacaagttcttccaaggatggggaggtacaacaggtctcagatggtacggctcaatcaggtgataaaagtgctgcagatggctcaggtgataagggtgatggttctcagggagtgcaaggtgaggatcttagcccagatggcaacctggcgcagctacagtttaacaacttccaagatcggattgactatactgtgcgacatgctttgattaatcaatctggagtgttagtcaatactttgtcaaacatcgtgaagtcgatggttgatggctcaatagctgagtatcaggctacaggaccagtttatttaccaggaggtgttttcccaaattatcggcccttgatcacaaataatcagccgactgctcagccaattgctcccaatgcgccatcagttcaaccgacagcaccagtgtcggctcctgcacctgctgcaccatgatcagcaccagggcaattaattaatcctcggttgttggtgagagagcagccacagcatagtggacaaaatgtgaatcggctaactcaagagcaagttgcagctatgttcttaccaactcggcctactgctgacccagttcaacagcagtcgattcagcagacaccaccgaggcagcaagttgctcagccgattcaacagcaaggtttgctaaatgcatcggttgggtttaggacgcccgataatcagccaaggcagcacattgcaaatcaagttgttccagagcatttggttcataatgtgcaaccagatcgatcggtgataccacaagttattcccaaacatttggtgcacaatatacagccaaactttcagaattatcaagggggcaatttgaattatcagtatcagcctccatcgccgcaagttcagtatcagcaaggagggtcggctcagcctcggttcgctcctcagtacaaccagttcgagcctgtgccacagcaagtgcagggggtgcctcaacagagaccgtgggccaatatgattgcagatgtgatgagagagcaatttgggctcaagccaaaggacgctagaaacttgtatcggcatccaaaccctgagtggttcgagagggttccattgcctaaccggttcaaagttccagatttcacaaaattctcagggcaagatagtgtttcgacctatgagcacgttagccgattcttagctcagtgtggtgaagcatcggctgttgaggccttgagggttaggttgtttcctttgtctttgtctggatgtgcttttacttggttttcttctttgccatatggatcaatcaacagctgggccgatttggagaagcaattccatagttacttttatagcggggttcacgagatgaaattgtctgatttaacaacgattaggcagaggcatgatgagcctgtgcaggactacattcagaggagatgaggaataagtgttacagcttgagcttgactgatgcccagttaaccgatttggctttttagggtatgatagctccgatcagggagaaattctcatcccaggactttgatattttgtcacgtcttgcacagaaggtaaccttgcatgaacaaaggtttgcagaagcccggaagaactttaaaaaggttaatcatgtctgtccctacatggatccgatgatgatgatgatgatgattctgaggtagcagcagccgagtgggttaggagtaagaaggttataccatgccaatgggtgaagagttctagaaaagaagagaggtatgacttcgacatcaccaaggctgataagatctttgatttgttactttgggaaaaacagattcaacttcctgctggtcatacaattccatcggctgaggagctaggcaagaggaggtattgcaagtggcataattctgggtctcattctaccaatgatggcaaagtcttcagacagcagatccaggcggctattgaaggaggcaaaatcaagtttgatgattccaagaagccgatgaaggttgatggccatccttttcctgtcaatacggtacatacagctggtcgaacagccgatggggggaaaactcggggttttcaagtgaacttggctaagattatcaacaagtatcagagaaaatatgataagcagcaggaaaggtgttatgacgaagatgacggcggttttgacgaaggtatgaggctgtcgtctattgaagactgtcctaggtgcagcaatgttacagaaatttcaaaccgatcgcataatagaggcaatccgctaaggcaagcaagggttcctgttcatcaaagattgggcccaatgaaccaagattgtgaccaagaggacaatgaaggcagaaagactcaatggtgtccttctggtatttttacaaagaatcagaagagaagggttcagaggttgaggaacagggagcgctttcaggaggttgagcaagaaatcaaccatcggctgaagaaaacgaagccgaagcaggagtggcgcgttaagaatcaagttcctacagctgatgaagccatggccgatgaggcaaaaatattggctaaagggaaaactgttgtgattgcatcggttaacatggttttcacactacctgcagaatttggggccaagcaagccgatgttgatgaagttgaggaagcatcagctaggttggttttatcaccagaacaagcagtctttgagaagccagaagggacagagaatcggcatcttaagccattgtatgtaaacggttaaatcaatgggaagccgatgtctaagatgatggtcgatggtggggccgcagtgaatttgatgccttatgccacatttaggaagctaggcaggaatgctgagaacctcatcaagacaaacatggttctcaaagatttcggtggcaattcgtcacaaactaaaggggttttaaatgtggagctgacagtcggcagtaaaaccatccctacaatatttttttgtcatcgatggaaagggttcctacagcttgttgcttggaagggattggattcatgctaattgttgtattccttcaaccatgcatcaatgcttgattcaatggcaaggcaacaagattgaaattgtaccagccgacaggtcagttaacgttgccagtgttgattttgctctttgggagatggatggccttgattgctagtctggaaaggtttgggaaggagattttctaaaggtgttcgattatgatatacagccgattgaatacggagagcccaagttattatattgagggcatcgtggagggttcaaacgtctacaccaaggacacagtagatgatctcgatgacaagcaaggaccgggtttcatgtcggccgatgatttggaggaaattgatataggtccaggtgatcgaccaaggccgacatttatcagtaagaacttatctccagaatttagaaccaagttgatagagcttttaaaggaatacagagattgctttgcttgggagtattatgggatgctaggactcagccgatcgattgtcgaacatcggttacctatcaaaccaagggttagaccgcaccagcagcctccgagaagatgcaaagccgatatgctcgaacctgttaaggctgagattaaacgtttatatgatgctggttttattcgtccttgccgatatgctgagtgggtttctagcatagttcctgttatcaagataaacggcaaagtaagggtgtgcattgatttcaatgatttaaacaaggctaccccaaaagatgagtatctgttgatggtcgttattgaccaatttcaaccgtcaatattatccaatatatgaagactagctatgcttgcaatgcataattctcaaataaaatagttacttccactatatgctttgctactaacatgtatgcaggagaagcactcgtaaatgaagagaacgaggtggaaatatatcgatcaatcagtcaaaagtctgccaacgatctacaattacatgagaaggcccaaaagtccaatttaataatcacaaatgggcctagaatgtatgtcactgatttaggggcccacatggaagtctccttgaggaagctaagggccagaagagcccatagggggttggccgaccccttgttgagcccaatccagtcacattttggcctggagataagggaggccaaggaggaagcagcaggccaaaaactaggcctgttgggccactctagggttcggctgaacctagtaccttgatctcagccgttggctctcccctttggcatggacgctccggatgaactcctgatggcggttgcggagcatttccgacaattcccatgctctacaaccgtcattgggtgctataaaaggacctcacctccttcactttcaatacacactcaagcaaggatcaaagctctctacaaagttagtagtagtgttagtggagtagagttagaatagttccaagtccgcggaggcttcggggagttcggtaaaggttctatagcttttcctttcttctttgtaagacttccatttatcaatataatattcttatttatacaagttcggtactttattccaatcatagactatgagtaccagtcttagtttattcataagtagtataatctgtgtagttaaaccttctgggatttgcattgatgctggtataatgtctgattacctggtcataagtctgctctggctaggctgagagctatggcccggggactcagctgctctgcaccgattgaatggttgtagagtaataagtagtaatttaagcatggagcttaggttacctcttatcattatttgggggtatattctctgggtgatttgcaggccgctgatggtgacagctcagtacgggtgtctcccctgcagtttatattcctacatacaatttcctagggttggatacacctccgaatcctacatcggttggagggttatgacaggttgtcgtaagaaactcggcaacccggggtaactttgcttttcatcgggagggcatagctatgctgcattgttaaaggggttatattacatagtgtacaggaatagaacatatctaacctactgccacttagctataattaggagatgtaggagttagctaaatccttagctgtgtgtcattctacccttaagctaaacatacccctgcatagacccttgatgtatacaagtaatatataaactattagcatagtactctcttaccatatcttcccttgggattaaacaaatacgatacctaggaatactcccgggtgaaatggtacaatggtatatctgtgcgattccggatcacatctgtaaccataatataccatgagtatttctagtgctattgctgggaattatatttccagtagtgtcgctaagaaataccaacaagcatttctggcgccgttgccggggaagataaatgattaagagtttactacttgctaatagttttatatttacctctgtataagtcattgtccttcgtaggcaaaccttgtttgttttctcttttatgtgaaaacaaggtagtacaggactagttctgatctgccgaccaatttcaaatctggagtcactagtgaagtgaagccgaccccgtgtcgtttatccttaaggttactctatcggcaaccagaccagccaattccgcgccaccagaattacacgatacggctgagaagtccctttgcaagttcgctgctcgctctgctggtaacatactagttggaacccaagtcagcaggggagatggtgactttgatttaaagaccagctaaattaacgatggcgcaggcttgcccgttctgtggcaagcctaaggaggatgcaagtgctcatttgcagcaatttgtggaaagccatagcacgtataccgtcagaagaatcagactccaactgttgccgttctccctcctcgagagagcagaacagtggttctacatcaaccgtgcaacggtgaataccgaaacaattgctcaacagcattcctctcaagattcttcctgatgggcaagaccaacgctcttcgcggaagaatatctagctttcagcagacgagggatgaaaccattcttgaagattgggaaaggctgcaggaatacgtcaccacccgtcctcatcatgggatggccgagtggctcatcctgcagaatttcttcaaatgattaaccccctcgtcctaggatcacctggatgctgctgctggagggacattcttctcaagaatagtcagatgccaaccaattgagaagatggtctcaaatatgggttggagcgaggaacgactccaaacccgtcaatgcggcatgtacaccgtcaagaggacggagatgctcgccgcccagttggatctccttatgaagagactagacaacaatgagaaggataacaagcagggtaccgttaaagccctggacttccacacgacatgtgaggtctatggcaacaccggtcactctgggatggattgcccgaaaacccatgagaacgttatgctcatgaacaataacaatgggtatcgtccacgaggagaccaaggatggagcatttctccatggggtagatcaagaatggaccaaacacaaggaggtcaaagtaaaaccccgaaggacggatagcctcaatactttcatgatgaacttcctggagcaggaagaaacgagtaaccgtcaataccttaagccggcatccaagaagccgggaatacaggccggtcaacctgtgttcccagttacgaagaggccgctgcccgcacctaaggcaaagaaggtgtggcgggttaaggagaagacactcgttcctgtacctccggaactgggtgcctcattgagctaaatacgtcggaggtatggtcgtgctcgtcggacctaaaacgacatcccccttgccaacaggtaaattggtagttatctcatatttattttccattgcatcaaagcatgtttggattttcaaacacacattgagatctgaatttgaggcaaattcttcaaataaatttttgtgagcaaaataaaataaagtttttagaaaacttttgcacagccaccaccacattggtcgttggaatccaatagctaaaggtggggctggttgggtccaccaagggttcggccgaatccctggttcggccgaaccggcctggcaccggctggctggaaatttttgcagggtagcggctagtggggcccacatgccattcctagccgttatccatgcactatatatgtagctcggctgggagaaggaagtcacaccaccttaactcattttcactccctctcaaaaccttgctctaaaaatttattcaaagttttgcaagctcgcctcaaattcacacaatttgctgcatttagtttagacacttgcatatacaagtttgctttagtttggtgcaaggttatcggcgggtatttgcttaacccccgtccgagtagtcttgtattcttgctctttgctgtagccataaagaaacgacttttgggcatattcaagagacgatcaagctcacggacaagccgacacgataagccgagtacaccttcttccgcggatgcatccatgaaggaggcgtacattccaccgaggctgtacaacaactcctttcacgacctcgtgggcgaccgggaaatgcaagcctatcatatgctgaaagaccgaacctgtgctcggacctgagcatacgactcgaccttctgaaaaggataggtatagatgctgagcttcattactttttggcgtgctataggttgggataaatttcatgtgtagacgagccgggttcctggcgggcgccgaaaaggaagcagtgacgccttttcgacgaaagcttagcttggtaggcgctgcttactcaccctattcccttagacaatgcaatgctgtgaacacgaaagtttgcagttcagccctcttctcccatgcagagtcgcaggcagcgcctcggataaaagcatggacgagccacatgcagggaaacttgcacgtgtggttctggccggggaccccggtatactgtactaatatgtgtaggtccctgtaattcgagtgagattgtcatggcgcaaaagcagatatggtccggtattcccttgttccccgtattggttatgttctttattccttgtctagcagaaactaatcgagctccgtctgatctcccagaagcggaagctgaatcagttgctggctataatgtggaatatgcacgggatgcgatccttaatagttcaagtcccatagagttattttttatctttgattcccaaacgctgcgtgcaagtcaagcttacagaattcctgccggggcgccttctttcttatgccagccaagtagtaatcagaaaaccaatcaatcttccttacactacgacaattcacttgaactaccaacatcatgagtgacccaggccggccgtatatgcgtcatttctcttcatcattgtctctatttgttaattgctcgctacccgtagtgggccttgagtaggatttaagcacgggtttcgaaccgtgcagtttttatgtgccatgctagaggtaggcgatggtgttactttccggttattccgcaaggaatatcaccttttttggaaggaccttagcttgcatctaggctttgacaaaacatgcaaaattaatttcaggaacgcatttcctgattttaacaagcgtatgttttggcaaagtatttcgggtctctcatcctatagaaagcctagaactaatgacatccataatcctaccttgaggctgttgcataagttgcttggtttcacatcgtttcttagagctgatatccagatagcgcgaactagtcctcttgtatgccatggttagaaaaaaaatcaacgtttcacccattcaacccatgatcaagcaatggttagaaaatgtgaagttgtctggtcctgttgagtgtatttctttggtgactcgtttagcatgaagagttgggactatgcttaatatgcaagtatctagtattcttgttaccggctcttatgttgatgaggcctatctggttcaaggccacgcactcaaacatggtccaaatgattttgtttcccggctatacaaatgaaattccgttacctaacccggagtttcatttgtataactgccgagaactaaccatttctctccaagcggagttgcctcgtgatgtcccacgcaggataacacggcgtatggggagaaaagcaccccaagaggcgtcttcctcttcaccaccagtgcagatgtatggagacagttgggacccgaccgcgcatgcccttggttggacccaattccggcaacatgacggcggaggttcgtcctggcagagtgccagcgacagccggtggcatgagccgtaggagctgcactggggatactcgcgctccttcagttcaagtggtctacctccatcctcttggatgcattgctcagtctcctctcgaagggatttgggagaactcatccgggggacggatacacttgaactgcaggcaaggaacatgcaacataccttggaggatgatgtggtacagtcatgggaatggcagcagtctgttggtgcacagctcgcaaatttcaacactatgatgcaacaatagcaagctgactggcaagcgtttcaccgctaccagggatttgatccccgccatgagccatagcaagaagcaagcttgggggggatgnntntccnggccgccgagtaacggcagtcctatcacattgcatatttccttttcaacttgcatgtttaaattgttttattgcatttataaatctgaaaacaacataaaaattgcaaaactaaaaataccaaaaagataggttagatttcatatgctaggtaagacatgcttagttcttcatgtcgaaatgatgaatagttactctgttttatatctctcatatatgggttcatggttaagtactctctcaagaattgaataagagtagccaacaattatccgggaacctgaggtaagtgagttgcactttgctgatctgagtctaggttgttgtgagatatgagatagtaaataagagttgctatgaacctattctaagtttgacttgaattccggatgttttattttccaaaatgataaatttgaaagttcctcatttgatataaattcctaccagagccaaaaatatccatattgattaagccatatacattttggttacttgtaattctattgaactttgtcaaatctttgtgacttgtgtagatactattcatgctctatgaacgagatcatacacccacatatgcacacatatgctaagcttctacactagaagatagcatccatatcatccaccatatccatgttatcattatccacaaataagctctccatccatgcttcctttccaaagaaaaatcctttgcaaaaaaaataaaatttaaaaaaaaagagggaaaggtatggctatgagaaaaataataaattcttgctctcccaaaattggagcatgaaagaaaaaaaaagagagaaaaaaaaagagaaaaagtagccataccctctctatgaaaattaaaggatattttggaggaaaagcataagcacaaagaagaagcattttctgtatccacattttattttctatcatgttttccaccatattattcgcacacactttgcacgatcttgatcttgagtatgattagtcatctattttagtccaagtttttgatttagtaataaatgtgaatacaagtgtgccatgttttatccctaccaagctccacatatcaaaccttagagtaggaatcaaaaggcaaatctggtgaggaatccatattcatacactttgagtgatctagagaattatttgaggaacttggctttcttttgcaaaaatcattttaaaacttccggaatgaaagttaaataaagattgggtaactagcgctctaattactgttctgtctctcaaccgctcaagacaaggagatgcagtgtttcgtgggaatcaggggtaagggtaagccaccatgccaaacatatttaatttgagatagagtacccataccttgcatctatatctttgagatatacaacattgcagcaactcctgatcaacaaccaagtctttgttcctttcgtcctttactcgggacgagcaaaggttcaagcttggggggttttgttgacggctgttatcgaccaatttcaaccgtcaatattatccaatatatgaagactagctatgcttgaaatgcataattctcaaataaaatagttacttcaactatatgctttgctactaacatgtatgcaggagaagcactcttaaatgaagagaaggaggtggaaatatatcgatcaatcaatcgaaagtctgccagcgatctacaattacatgagaaggcccaaaagtccaatttaataatcacaaatgggcctagaatgtatgtcactgatttaggggcccacatggaagtctccaggaggaagctgagggccagaagagcccatagggggtccgccgaccctttgttgagcccaatccagtcacattttggccaagagataagggagaccgaggaggtagcagcaggccaaaaaccaggcctattgggccactctagggttcggccgaaccactaggttcgcccgaaccttgatctcagccgttggctctcccctttggtgtagacgctccggatgaactccggatggcggttgcagggcatttccgacaattcccatgctctacaaccgtcattgggtgctataaaaggacctcacctccttcactttcaatacacactcaagcaaggatcaaagctctctacaaagttagtagtagtgttagtggagtagagttagaatagttccaagtccgcggaggcttcggggagttcggtaaaggttctataccttttcctttcttctttgtaagacttccatttatcaatataatattcttctttatacaagttcggtactttattccaatcatagagtatgagtaccagtcttagtttattcataagtagtataatctgtgtagttaaaccttctgggatttgcattgatgttggtataatgtctgattacctggtcataagtctactctggctaggccgagagctatggcccgaggactatggtgctctgcaccgattgcaaggttgtagagtaataagtagtaatttaagcatggagcttaggttaccgcttatcattatttgggggtatattctctgggtgatttgcaggccgctgatggtgacagctcagtacgggtgtctcccctgcagtttatattcctacataaaatttcctagggttggatacacctccgtatcctacatcggttggagggttatgacaggttgtcgtaagaaactcggcaacccggggtaactttgctatgcatcgggagggcatagctatgcctaagcatagctatgctgcattgttaaaggggttatattacatagtgtatactagttagaatatactaagatgttgtatacttgaagtacaggaatagaacatatctaacctactgccacttagctataattaggagatgtaggagttagctaaatccttagctgtgtgtcattctacccttaagctaaacttacccctgcatagaccttgatgtatacaagtaatatataaactattagcgtagtactctcttaccatatcttcccttgggattaaacaaatacgataccttggaatactcccgggtgaaatactacaatggtatatccatgcgcttgcggatcacatctgtaaccataatataccatgagtatttctagtgctattgctaggaattatatttccagtagtgtcgttaagaaataccaacaatatccaatgctagtagcctatcagctgattgatgctgcttcggggcagaagatattgagttttatggatggaaatgcaggatacaatcaaatctctatggccgaagaagatatccataagaccgcttttaggtgtcctggtgcaatcggcttatttgagtgggttgtaatgacttttggcttaaagagtgctggagctacatatcaaagagccatgaattatatataccatgatcttatcggctggttggttgaggtctatattgatgatgtggttgttaagtctaaggaaatagaggaccacatagctgatttaaggaaggtttttgagagaactaggaagtatggtttgaagatgaatccgacaaaatgtgctttcggtgtatcagctggccagtttttgggatttcttgttcatgagagggggattgagataactcagaggagtgttaatgcgatcaagaagattcaacctccagagaataagacggaattgcaggagatgatcggcaagataaattttgttagaagatttatctctaatttgtctgggagattagagccttttacgccattattgagattgaaagccgatcaaatgtttacttggggggcagagcagtagaaggctttagatagtattaaggaatatcttagctcttctccaattttgattcctccacagaaggggataccttttaggttatatctatcagccggtgagaagtcaatcggctcggttttgattcaggagcttgaaggaaaagaaagggttgtgttctatttaagtcgtcggctcttggatgcagaaacaagatattctcctgtggagaagttgtgcttgtgcttgtatttttcctgtacaaggttaaggcattatctactgtccaatgaatgtactgtaatatgcaaagccgatgtggttaagtacatgttatcggctccgattttaaaagggagggttggaaagtggatattttccttaacggaatttgatcttcggtacgagtcgccgaaggcgattaaggggcaggctatagccgattttattgttgatcatcgtgataattcaatcggctcggttgagattatgccctggactttgtttttcgatggatcggtgtgcactcatggttgtggtatcggcttggttataatttcccctcggggggcaagttttgagtttgcttatactattaaactatgcaactaacaatcaggctgagtatgaagcggttctcaaagggttgcaattactcaaggaagttgaagccgatgctgtggagattatgggtgattctttgctggtgatcagtcaattggcaggagagtatgagtgcaaaaatgatacattgattgtttataatgaaaaatgtcgagaattgatgaaagaattttggctggtgactttgaagcatgtatctcgaaaacagaatgttgaagctatgatttggcccaaggggcatcgggttacaagccgatgatgaaggatgtcaaaatagaaattgccactataacaaccgatgattggaggtatgatgtgcatcattatctgcaagatccatcccaatcggcttctcagaaattgcgatataaggctttgaagtataccttgttggatgatgagctatattatcagacgattgatggggtgttgctctgaagtttgagtgccgatcaagctaaggtcgcaattggtgaggtacatgaaggaatttgtggcactcatcaatcggctcataagatgaagtggttgcttcggcgagcgggatatttttggccgacaatgctagaggattgtttcaagtattacaaaggatgtcaggattgtcaaaaatttggagcaattcaaagagcgccagcatcggctatgaatcctatcatcaaaccatggccatttagaggttggggaattgatatgatccgtatgattaatcctccatcgagcaagggacacaagtttatattggtggcaaccgattattttaccaagtgggtagatgcgattcctttgaagaaagttgattttggagatgctgtacaatttgttcaagagcgtataatctatcgatttggtattcctcaaaccattacaaccgatcaaggatcaatcttcgtgtccaatgagtttgttcagtttgccgataacatgggtatcaaattgttgaattcttcaccatattatgcacaagctaatgggcaagccgaggcatctaacaagagtttgatcaaattgattaagagaatgatgatctcacatgtgccttgtgcaacacacatcaaagagagactaggcttcatctcttttttacatgtcccttcagtgtggcttgttggcagcagatgggcatttcctggaattgtaatctggagtttttccaaatgcttgtcttggcgagaattagatttgctcgaaagggtttccttgaagtttttttcatggcagcatggcatatttggaagcaaaggaatggattaatctttcaatctgtccagccatcaattcagtcatggaaagctatgtttgttaaagaagttcatctgcatatgtgtagaatgaaagatcctctcaagcaatccatttctgattggatacaaactttgtagcatttttgttttgcttttccctctgtaactttgtacatatctttattttataatatttaaactgctgggcaaagccctggcatactcgattaagagaaagatgattaagagaaagatttctgattatcctcggcagtggcatactcgattggccgaagcattgtggtcctatcggatggcttgtcatggttcgatccaagtctctccttataagtttgttcatggacatgaggctgttttaccatgggaagttagaatcggcataagaagaacggagttgcaaaatgatttgacagccaatgagtattataatctcatggctgatgaaagggaagacttggttcaatcaagattgag

SEQ ID NO: 24191 - DNA, 5643 bp, Oryza sativa
tagggactcaagataacaaattcggcaagtggtcgctgaattgggaaggaccgtttcaaatctataaagttgtgtctaagggagcttacatgttgcaaagacttgatggagaagtttatggaggagcactcaatggaaaatattttaagaaatattaccccaagtgtttgggttaatgcatgatcggctggtgttgccgatacatgatagctgatgtatttacatcgccttgagatggccgatattgttgtatcgcgcttagttattttttctattgtaatcggttgtgttttgccgatgtacaatggccaatattgttatatcgcccttagttcaatttataattttatcaatgcctttgacattgtaaaattatggggggcacatatatgcaaagttgaaaaatttttgagcaaaaacgaggagttatattaatcggcacaaaggattattaagacaagttaaataatgtaccagaatgtcttagccgattacaaaatctactatatcctattacagaatgtcactgagacaagtggcgctggatagccgatatagctctctgcctaatttgttctacttcttcaatggcctgggcgtcttgagcatcggttccagagatgacttttaaggacttggtcatgtcagcgacatttttgatggccgatttcaaccttgccttctgttcttcgacagcttgcgggagatcgggtagcttattgtgttccaaatccagttcggcgttgcactcttgaagttgtgccaagagctcaatcttacgagcttcaagccgatcaatattggatttgatcaggccctcggatagttgatcaagcttagccttttcttcatgaacaagctgccgattggcctggattgtagcttcaatatccctacgctcccagcgttcggttaatctcagtttggatttctccagtttgaattgatgttgttcaagataagcagctggagtgaggatgtcggctagttcttccgggatcagagcctgaacttcgtgtagccgagtcctaattgatccacaatctaccaccaagctgtctagagatgatgcctctaacgaatgagagatatcttcaagagtcttcctcacatcattggataagggagctaaagctttgcttgtggtgtcatcttctgtctcatcaaagtaatccttgatatcaaaagagaacagatcggctaagacctgcaaaaataattcaaagagacttagatgccaaatagacatggccgatctaagtccttgtgtcaaagggaaacttactgggatggcagaagcggctggttgtacttcttccttgacatggtgactccctgcagccgatggaatttggtcacttgatgattgctgtacaggggaagaaggaggaggaggaggctgcaaaaagagataagtgctagataagatcggctatgattgactagtgaaagaattgagaatatcttactggtggagccaatttgagagttgttgctgctgatttcttcttcacagcagttttcttcttctgcaattataaaatctataagcaatcggctataaatgaaatggttgcaaaaagaaatcaaggagagttgtttaccctggaaaaatgagctggagcggaaggagccggagtagtttgtttaggtgaagccaatggttttctttcagtatcgcttactctagctgcagcttgatcaacatcttctccaatctcttcttcatccagagcttgttcaatggatggatctagggcaggcaagtcatcggttggcttggtcttcttcgacttagctttcttctttggggctggagccgatgggtctatagtcgatgctctggtttttctctttttgccggcatcggttggttctctaatgagcccttggagaagacttgaagtcttgggggcatgatagccgatgacagggggagatggtccaccttcattgggaatgagacttggagcatattcgatgtatttgccactattgctcttgtgagggggagaggattctgttgtctgcaaaatagaagagaagattagtcaagttatgaatcggctgacaattgttcaaatagaattaatgaagtcaaggtgtacctaggggataacattggaaaagagatctgtcatgtacatagaagccgattgatggaacagatgcatcttccattcaccccaccatctgtcaaatgccccgctcctgaaggttgccagctctatattttcaatgctgcccaaaggaggtccttgaagattgagcaaccgatccatcattagggttgatgaaatttctcctcggcattggattttatcggcaaagaacaggccgattggtaattgacccatatcaaactgtctggcagaactcatcggatgataaaattcataacaaacttggatatttcttccttgatgaatgccgataggaaggatgcatgggctgattgcagccgagaagacttctctggacttttggtatctctcgtggttgatgtcttcaaatctaaagtctgatgggagctctagaagtggtgagtcctcataggggagggggggggggagggtgtttttgaaagccctcataaaagctgcagaaccaatctttgagcagctcagccgataactttgctccaacatcggctggtgtggatgcatattccccataagacatacatctgcgatgggtgcgttcttctccatcgtcttctataattggctctagtcttgggaattcggcttctgtcacagatggccgattgacaaatttcataaccatcagatttagccaagtctgcaatagccaccatggtccacctgttccaactactaagccgacagctattttggccgatgctttatttaacacttggtataggtagccgagaagaattttgcctaagggaaattgtttctttgattctagggcttcggctacaaattgccagttggttgtaggaccacaactggatccacagaaaaggaacttttctagccacatcagcaagaaagccacatgttcccgaggagtgacaggccctttgcccatgtatgccgctacatagccctacatagccagaccaaccacctatgcttttggtcctgaaatcaaattggttcttggtgttcatactcatagggttagctgatgaagttacgtctaatccggtaatcatggtgatgtcaatcaaagttggagtcatcggcccttggttgaacaggaaagcgttgatggtattggactagaaataggtggcggcggccattaaaggttcatctttagctgaattggctatggtaagggcaagcacttggccgattccgatttcgtcccagtgaactttcttgctagccgacatgcgcttgtaccatatagtccagctcttctcgggtgaagttttctcgagagatggccaagatttgaaggtattcttccagtgtcctagatctgggttggctaatctgaaaggaatcgtattggtttcaccgatgatgaacttagtaggatcaaggttgccgactgggccgagaaagtaatggttcttgtgagataggctcggaactgcgatcagattggaaagatgctacgaatccaaaagaacagggaagaagaaaacaaaagataaggaaagggaaaactaatctgatgcgaaaaaagaggatctagccgatgagaacttacctccacgtattcggctgatgatgtggcagacgggctagtggaggtcgacatcgctacaggcgaaaagttggccggacaagaaatcgcctgggaatcgccttgcgcaccgaggggatcgctggagaaagagaggacgaagtttggcttaagcggtgaaaacagaagtcacggtgtgaagattctcggggatgacggttagtatttaaagcactgtgtagatttctctcggaaaacggcaagtgcggatttctctcagagtcgacatgtagcaaatccgaaacattttccaatattccggacttggggggcatgtgttaacgaccaaatttggtaatctaagtattggagttggagttgagaccgaggtggaatttaagatggaatcgctcggggaacagagtagaatcggctgaagtccgaaacggcagcgactaggatcggcagagttcgagtcggacagggttagccgattgagccgaatccaacaatatgacacggcatacgttgtcgggttaggttgacgtgcttcatgatgattgccacgcgtggatggagtcctgagaaggcaattgtatctattaattaggatattttatgtaatttccttagagatatgtttaggcaaatgtctgccgcaaagacttatagtatcttagagtttgttagagataagagtcatgcccgatatggacatattttgtaatctcgggtataaatagaccccgagccccatgtaataaaactaacacacgttcaaatcaatctcggtgcatagccacccttttacttttgttttgtttcgacgagttcttgctttcgggttgagctgcatcggtttcgatcttcaacaagaggtaaaacttgttatggcggcttgcattctcgggattagtgcttccatctttatgatactctaatcttgtttatgtgataaatcgaattatcatatatcttatataatctccggcaatatcgctatctaacctacaatcggctaacatcgatctgtcagtagaagacagccgactaggttaaataccgatgttgacttagattatataggatatccaccactctatgacacatccaacggcttaattgtctagatattgtcttttttttcatacttatagctgcatcagttggatttgatcttatgagtcgtgattagaatctcaatctctagcctgcctttggttgccaattagggtagcatcggggtttcagccgatcttacctgatttgaatatatttatcttatgtgcttgattgacatgttaaatccgccctttatgttaagatctcgtcgtatttaagtatattaagctttctgtttggtatattctacttgctttaatatctcaatataaaacggtatcggagtattagccgatacatgctagatctatctgatcggctatgctatgaacatatataatcttgttgttaatatatatttcggtctaagtgatttatactgtctcggcatggcgaccaatttatcccaatcacttgatttaagtatatatcgacataaggattatatattgttaatatcaacagctgatcaagtagatttagttctttcttacttattaatgtctgccgatcgatgcatatatgacatcggctcaaagatcaatgatatgtcatcggcatctagccgatcggctatcgtttatagatttaaccgcggtttctttgtctttgtctcttgttgattgcaggatcaaatcaactggcatgctcacacacccaaaggcaagttttggacctgcactggagttaagcagatctcccaggcctcatgtttttacatcaacaattctatactagaataggaagagagtagagtagaagaagttggaagaattccggagttgtcggtaatcttctcctatttcttttattctgtttattactctgaattcaatataatattcttcttgagta

SEQ ID NO: 24192 - DNA, 2735 bp, Oryza sativa
taaagtagatattaattgcttagacgtggtgtttaggtaattattatccagtaattgatgcgtgtcccacagtacgttgaggtaggtgtagaggtggtgacagccctcgagatcacttaagtccttcctgtccgggtacgtagtagagcgacatctgggaacagcgggttgccagtgcctgaagtattgtgttaggattaaagttaagctttccctagacactaattctcactagtaaatcctctctatccaagcctatcctttgcttggtgtccatggatgaaccggaggaagatctgaccatacacgttcccttggattcgatacccttgtaatactccataggggaagtgctacattggtatatccgtgcgcttgcgcattttatctgtaatcgtattaaataccaacagtggtcgaagtggagccacccaagacagacagcctggtgaaattcatgcaaattttcctggagaaggaaacatcgatgcccaggaaccgttattggaagacgccggtaaaaccacccatatcgccaagaagttagagcagccggctcagaagaagccgccgtccgcaccaaagccaaggaaggtgtggagggaaaagccaaagacgcccgctccatcacctccagagacgggtggaaaatctacgaactgaatcagaaggaggtacggtcttgcacgtcggactttaaatgacgcgaccttcgccaacaggtaaattggtatgtatctacatttttgctttcaacaatttggatttttgcatcagcacatggttgaatttcaaagttgcatttaggatttttgaattttgaggaaattcttccaatgaatttttcagagcaaaccaaaataaaacttccaacaaaaattcgcagtgccacgactacactgaccgttggaatccaacggtcgaaagtggggccgattgggcccaccaggggttcggccgaacacctggttcggccgaaccggccaggcaacggtcggctgcctccctctttgaggcaatggctagtgggccccacaggtcggttttgaccgttgtgggtgcactacttaagccaaccggccgggagagggaactccaccccatttcaacaaattttcattccctctccaaagtttgctctcaagttcattcaagctttgatagtttccctcaaattcaaatacttagttgcatatatacaagctgctttggtgaaactaatcggcgggtgaaattttttttattcctaacccccgccgagttagtccgttcttgctccattgtgcagaatgaggaggcgattgtctcgtctgttcaaggggtccagctcttcatcaagtcatcatgatgagtctagtactcgttcattagctaatgtctcgatggaagacgccgaagctccgcgatgactcctaaacgacaccgaccttgaccttgtcagtgatcgggaaagacaagcctactacatgttgagcgaccgggagtatgctcacacacgagaatactctccggagctgctaaaaaagataggtatggatgttgaatttcgttctatttggaaagtggttggttggcaaagatttgctgtggtagatgagcctggttctcgtttgcttactttgcaatttctgtgcactttgaaagaaatagaagatggaatttcctttcgctttttccataaggagtacacacttacatagaaaggcttaagtacacttcttggttttcacgattcctgtaaaatatatcttcagaaaggaatttctgggttcgagaaaaataggttttgggaagatatttctggtgctccaatttgcaagaaacctatgacgaatgatatccataatcctacacttaggctcatgcataaatggattgctatgactttgtttcctagaggtgatcttagacccattaggagggatgaattgattatcatgtttgccatggttagaaagatcaaaattgctcctgtgaaatgtatgataaggcaatggttagaaagtataaagttctctgctcctgttgagttcacttctcttattactcgaatagcaaaagggctaagggtcgttagcgactaaattgcttttatctcagccgctcgtccgtgtattgatgagacctatctagtgcaagggcatattctgaagcatggagtagatggatctttgatttactttttccccggttgtacaaatgaaatcccgttgccaaatgcggggtatcatttgtacaactgccatgaactaaccatttccctgcaaaccatagaagaatttcgtgtaggtggagcatacagggagacgcgcaacatgacaaggaatgaacgagagagttcatcatcctcaacacccgtacagatgtatgaagcaggttgggcaccagctggggatgcacccggatggacccaagctctacgccacagcatcggagtcttaacctgggcgagtgccagtgaggaccggtggcgtgcgcctcatgacatccaatggggggacaaccaaccttccagatcaagtggtgtgcctccattccttgatatgcagatgggggagatccagtacaacctcatggaacacatagctcaaacgcaagaatggcaacaatctgctgatgctcagttcgccaacttcaacaacatgatgctgcaacagcacgatgaccttcaagcgtacttccgttttcaggggttcaatccttatcaaggatcctgagcgaaagcaagcttgggg

SEQ ID NO: 24193 - DNA, 3016 bp, Oryza sativa
ccccccccccactgaggtaacttgtatcacattgcatatttccctttccaattgcatatttgctttccaattgcatcttataaaacttgaaaacaacataaaaatttgcaaaatagaaaatatcaaaaaaaaaggataggtttgagtcatgctaggtaagacaagctagttctctttgttgaaatgatgaatagttgctctgttttatatctcttatatatgggttcataggtaagtattctatcaaaggttaaatatgagtagccaacaattatccgggaacctaaggtaaatgggctgcacttgctgatctaagtctaagttattgcgagatatgagatagtaaataagaattgctatgatcctgatactagtttgacttgaattccggatgtttgtttttcaaaatgataaattgagagttcctcatttgatataaattcctaccaaagccaaaaatgtgctatcatgattaaaccatataaattttggttgcttgtcattccattgaactttgtcaaactcttgtaacttgtgtagatacttctcatgctctatgatcaagatcatacacccacatatatgcacatgctaaactcctacactgggagctaagcaatattccatattaccaccaaaaataaattctccatactttcatgtgctttcttctcctaaaaatgaaaatccttttgaaaaaaaaagagaaggagggaaaggcatggttgtgaaaaaataataataataaagttatgctccatcaagcatgagcatgatgttgaaaaaaaactgtagccatgccctctcctaatcaataaaagaaggatttttgggagaagaaagtaagcacaaaggagaagcatttttctttatttttcctcatgtaccactttcatcatacaccacacacacattttgcacgatcttgatcttgagtatgtttagttatctgctttagtctaagtttttgctttagtaataaatgtgaatgcaagtatgccatgtttgatccctaccaagctccacatatcaaaccttagagtaggaataaaaaaggaaaaactggtgaggaattcaaattgatacacttggagagaccgagtgaatcatttgaggaacttggttttctttttcaaaatcatttgaaaacttctggaataagagttgaatgaagattggatgattggtgctctaattgttgttctgtctttcaactgcccaaggcaaggagaagcagtgtctcgtggtaatcaggagtaagggtaagtcaccgtgtcaaagattatttaatctgagagagattacatataccctgcacctgtatctttgagatatgcagcatagtagcaactcctgatcaacaaccaagtctttgtttccttctgtccttcacttggaacgagcaaaggttcaagctttgggggttttgttgacggtcgttatcgatcagtttcgaccgtcaatattactaaaatagagaagaactagtgatacttgcaatgcatatatctgttagaataataatattccactagtattaggtatactaaccttttgcagagaatgacaataaagtggaggagaattgtcacgtcctgataaattcatcccgaaataaaaatcattccctaaaaggaataatagaattaattaaaattcaaaaagaaattggcaaacactaaaatacgtacaagaaaaattcgaatatggcccggagaatttttgttaaattctccttggtctaaaaggagccctcaaattttacttgaattttcagagcaccggaaataattattaagcaacaacaacatttatcaaagtttactaaaaagaaaaagctaaaaataaaccctccttcctcctttgggctgagcccagcccaaagtccttccctcctccctctctttttccatccctctctctctcttgggcctccccttccccttccggcccactccatactctcctcctccttctgggccgaccctcccctccctccttcccctcagcccagctccctcctcctccctctccctcccgggctgcctctccctcctctcctcctgggccgcctccgggcccaagccaagcggcgccctcctgcccgtgccacgcacgtgcgtgcgctgacggcgcgcccgcatgggtcccacgcgccgggtcgttgtcctcctcccgcccgacctcctctttctctcccggaaacctagcgccattcctccccaaaatccacgcgattcaaaccgggaattccaaaattgattagggggaattaatcccctttccttcctattcaattccccccaatttcccccttgattcgtgccctctaacgcccggaacagccgcgccattcccggccgccttccatggccaccggccacgaattccgccgccgttccccgcctctcccgtggccggctccctcccctcacctataaactggaaccccctcgctccgttctctcgttttagccttctcccgcacctccccgtgtgatatgaccatggctactacggatacatccgttgctcacatcatggatgaacaacaagatatcaagttcgagtcctccaagtgccggaatccgattcggccacctgctacactgctgacttcaaacggccgccgaatctgcatacgacctccgtttttggcccgtgaatacttgatggaaagctctcggagcgctctttccaacggatccagcctcatctccgaattccatctcgtgtggccggaatcacacacacaagttgctgcatcacctataatgggcctatgggcttgtaacttcatttgggatcccggcccaagtggggcccatgtggggtgcgccccagctaggtggagcacgaccttaggcacccctaggtcatcctcccacccctatttatatagctaggtacccattcagggtttcttgggttttgatagattgaagtttagccattgctacttgcttgcagcgcgcgtgaatgctagaccgcccgttgtcacgaccggaaataaccc

SEQ ID NO: 24194 - DNA, 16627 bp, Oryza sativa
gaccgtccgttgtcacgaccggaaataacccaacgggcgttccttacgtgcatgtattattccttgtcccaggaggcaaggtacaccaaaagttgatacatttcagagtttatcaagcggaagcgtaaataattaatttattacatgggcggcgaaggcccagcacacacaaagacaaacgggaaacagcggaagactagggcgacgaccacaggcgcttgacggcaggcacgagctagacaccaaagccttcatcttccaggaactcctcttctgggtttgggaaaaattgagcaagactgagtacaaccaccgcactcaacaagacacacccacaagtgcagaataaatgcaagggagtacaagggagccataatatagggggttagggtttgcagtaaacagcattaaaagtcacttagttgctcaaagctactttgtaaacacggtcctagagatatacaatattattaattaaggccgtgaacccacacgaacctgccttaacccaaggcctacgatgattcagaccgaactggcaacccgaccctgggtcccagctcgtcccaagccaacccaggccaaccattccacattttagttgttaagcaggttttaagaattaaaacactaacttgggtacattgctcggcttgcccataaccgagggcgcggctattcgaataggttatactctgatcagaggtgtacatctttacccacaagacacatctttctcacgtgtaaccacgtgccacataccaccacggtatacggacggaagacgtgacatagtttccaacccatcctagccatagacaagagtaccgacccaaccccaactacggccggaacctccgggataggtaggcaggactgagcccctagcagtaggacaccggccctgtgccatgacatctcgactaccgggccgtagctcgtgtagccttcatttgccctagagatgtccatcgacccccgacttcgtccatctccatccgtgtacttttgtttataaccagactgagccacaaactaagccttacccactagacatgtggaagtacggtagtgctttgcaacagaggcccgaagaccggtccttatatggccgaggtgctactatcaaaaccatgcaccccgagcccagcctaaaaccattttgaggattttgaatagagggggaggtgtgaatccaattccacaataatccatccattccatagtgtccaggtgatgagaatattcccaaagtctagagttgtaaaaccacctaattttgcctaattaaccagcgaagcttctacctaaattcatactagtggttccatgagtagagtgtccactagttggggttttgtttaatctagggtgaacaaggtaataatatcaataacaataataataaggtcataacaaaggtaaataggcatggctaaataaaacagtgataacgcgggaatttaaataaagcgataatgcaataatttaaatcaaaataatgttataaaatgggaaccaatatgttcaaggatgatgtgacttgccttgctcgctttcccaaacgtcggcttcaacctccacgaagagcagatcttctgaagctgcagcgtctacacgaccaacggaaaagaaaaggcttttactctaataaactccatataacaagcaggaacaaagcacaaaaatgggttcttgacttcttaaggaaaaattagagacttgaacggtccaattccgagttcaaatggccaagttatggccatttgaagtttatatgctctttaaatgaatatttgcgaatttcttcatttaaattttaatttaaaaagggtttattgcgtcagccgagggggaggggcgcgcggaccgggtccacgggagtggggcccacgcggcagcctcacagtccacggtggaccaggtgcacccgggctcacaccggccggcgccgtgggccccacacgtcagccgcacccgagggcggccacgccggcgcggtcggcgggagacggcgcgcctgtgccccgatgatcgccgccggcgaccaccggcgcggcggagcggcggccgagagaggggagggaagggggaaaggaggcgacggtccacggctcaccccggggcgacggcggcgacggaggaggcggccggagcggagggaggcggtggcgcggctcaggtcgacggggacagcggcgctccggcggtcggcaaccgaaacagagaggtggacgaggtcggcgaggatgcggtgaagccgaaggaggcggcgccgaggtgggaggcggtccggggcgacgacggcggtgaaccggagctcggcggcgacggcggagagagaggcgatggcgcgagctcgattccggcgaggagaaggcacggcaaagggtggaaacgggcgaaggaagtgcggggagggtttaaatagggttggaagggggagagagcggccggaggggaaggaaaccggcgcgggaggtccggccgccatcaatggcgccggcgagatttgcgggggcaaatccgcccgtttgaacgcgagagagagagggaaaaatggggggaaagggagaggggatcacggggagttattccccccactttattgcacgcggggacggctggaggcggcaggatttgcagcggcggcggcgctagggcgcgggggaggcggcgggagcggcgggaggaaggggatgacgggtgggccccacccgtcagcgagggtggcgggcgggcccgcccgtcagcggcgcgcgcgcggggagaggccgagtgggcagcggggagaggagagagagagtggggggaggagagatgcgccgggccggcccaagggaaggaagggggacttttagggtttttctttttataaaactttttcaactttgtttatttcttaataattattatttgtgctctgaaaattccactaaaatttatttacacattttaggcttttaggaaatatacaaaaatcctctaagccttatttgacttttaactttgcacattttaattgttggaggctttcacatggattttaattattataggcataatttaaaggatatattttagagtcgttttggcacgtgacatctgtctgcttgttcttcggaaccccaacttatcattcgtatttaactcctatttgcaattcagattgcttttatcttgttcttgcttgtatcttcgatttgcttgtaggaataaggttgatctgcaccggcaagatcaacaacccatggagaggtgtatcgatcgctaaggcgcaacacaacgtcttgtacggttgtagtcggatcgtcaacgtcttttccacaaatcgtagttatctcagctcaccgaaagatcgggccaacaatagccttgagtgtctcgagtggaactcagggttcatcaggtgatatcagagctttcgttgctcggtgagtttttttttatctacctataaccagaaaatagccaaccaaaaaaaaaattgtatcttttacctagccatattgtgccattgcattgttcttttcagtttttgctttgttgaattttgtgttgcatcgtcatgtcgtgttgctggtcttagcgtctagttcgtttagagtttcgagttctggtcacattttgtaccacagtcgtcaccgcccccgtgtctctgttgtcgtcgggacctacgaaaacggaattggctcgctgccacggttctattttcgtagttttcagaagtttatgtcggttagtttttgagttcttgagttgcatagcttctgtttggtggctgtgccgtgatggtgcatgccgtgatggtgcacctgtgcatgcgcgtgtgagaaagatggaaggagaagattagattagattgactggtttggtttctatttagtgccgagtctgtttctatttatcacctggtacctttccaaaccgaagccgagtaggattccttcccttgcgtcatcttgtggccgagacttgtgagtcgactcacactccctcacgtttgtttctgtccggattggttaaacacttcggtgaaattttatttttggtgtcggattcaagatccgtttgcaaaaacggaaccgacataactttagcattccattgttgtataatttttaattttggtttggacttttacagttgagtccctgtaatttttatatttacgtttgagtccctgtaaccttacattgaggtccttgaatctgtttttgtaaaataaaatcaaaaaaaaagaaagaaaaaaaaaggcagaaaggtgcataaaaaaaagaaaagaaaagccgcacccaaaaaaaaagaaaagaaaaggaaaggaaagaaaagaagaaagaagaaagaaagaaaagagaaaatactgttatgtttgagctgaacttcatatatcagagttgtgcatgagttattcctagtgctatcttgtggcatcgtttgtgtctaggctcgcgtctctagtacgttctagcctaggaccagcacggtgcttgactttgaacaattattcaactttgcattctctgatttgagcatttgctattcctttgctacatatttaagcctacccagagctccacagatttgattgcagccgtacagcaagtattcaccaaggcatcgatacatccaacctccattggggtgcttggttgagtcggtgtatgtcaccattccgcttgcattggtaagatcttgtaagagcttggttaaaagcttgagtgtgtgtgatttttgagctgccactacctagtagttaataggaacgcgcatatttttgtgtatgtttcttgttttctactaacaatggcagggatacgcaagataattggggatagctgtgctcaacatcgacatcttcgtcgagacatgaggagggatcaacatgaccattatgaggtaagtgatgatgttctaggtaagatcaaatctgcattgccttatttcgagggaaactatgatcctcgtgcttacattaattgggagctagcggttgatagtgaatttcaaaagcatgtcttgtctgagaaacaaaaggttatgtgtgcctctagtgttttaattaaacatgcttctaatgattggaaacatctttgtaggcataacaaaataccacaatcttggaaatacctgaaacgatatttcagagatgtttatgttcccatgtattatgctgacattttgttcaacaaactgcaatgtttaaaacaagataccagaactgttacttcatactatcatgatatgcaagcttgtttattacgttgtggtttagatgaatgcgaagaagctaaagaattgaggtttttatgtgggctaaacaaagaaattcaggacatgcttgattgtcaaagatatacatctctttctcatttgttacaacttgcttgcaatgctgaaagtaaaatagaggagagagacatgaaagagccgccaatcccattgttcacactcaaagtcaaggcacctccatcatctgaagaggacatcaaaggtaaagtaaatggtattgaaattaatcatggtgagtgcattgttaacgaagtaaatttgtccacctttcatactaaagtagagcaaccgttagtggaatcaaatgctggaattcctttgtcacaagttgatttactcgctgttccttgtgataaagaagagttgtgtgataatgcttcacttatatccatgccacaactagtgaatgaacatgatatttctagagtttctttgtgtgctgattttaagcatgctgttcacattgctaatgaagttgaggaacgtaaattgctatcttctttaaatactttgggctatgttcagtttgatgatttttgtgagctcgataatttgaaggagaaattatttgctaagtctgatttgccatgtccaactaatgctatttttcatatcattggcaaatataatgatagaggaatatatttggtgcatagagttttcatttgttcggatgtagagaaacatgttattgctaatcacactacttcgagtttctcttgttttgattgaatgaaacaggttattttgaatggactatgtgaagaacaccatatggaaaaaccgaggacggttttccgtgaagaaggggaggatgatgtgaccatggctactacggatacatccgttgctcacatcatggatgaacaacaagatatcaagttcaagtcctccaagtgccggaatccgattcggccacctgctacactgctgacttcaaatggccgccgaatctgcatacgacctccgtttttggcccgtgaatacttgatggacagctctcggagcgctctttccaacggatccagcctcatctccgaattccatctcgtgtggccggaatcacacgcacaagttgctgcatcacctataatgggcctatgggcttgtaacttcatttgggatcccggcccaggtggggcccatgtggggtgcaccccagccaggtggagcacgaccctaggcacccctaggtcgtcctcccacccctatttatatagctaggtaccccttcaaggtttcttgggttttgatagattgaagtttagccattgctacttgcttgcagcgcgcgtgtcggctagaccgtccgtctgcttgttcttcggaaccacaacttatcattcgtatttaactcctatttgcaattcagattgcttttatcttgttcttgcttgtttcttcgatttgcttgcaggaataaggttgatctgcaccggcaagatcaacaacccatggagaggtgtatcgatcgctaaggcgcaacacaacgtcttgtacggttgtagtcggatcgtcaacgtcttttccacaaatcgtagttatctcaactcaccgaaagatcgggccaacaatagcctttagtgtctcgagtggaactcagggttcatcaccgtggccgcaccacctctccccgccttctccttctctctctccggcgccggccggcctccagccgcctctccctcctcgcccgagcgccgtccggtcgcgccgtcgccaccagcggcctcgcagccaccttctctcccccggtcagccctccgtttcgcggggaaaccaccggaggcgcatccccgccggcaaccggtggcattgccgctacccaccctccagccgcccctgccgcgccgctcaggtgcgggccggccgcgccgtctcctccctcggcgtcgccgcgtcgacctccaccccggcctgccctcggtttcgccggaacgccgtcgcccacgccggtctcgccctccacctcgccggagttccttcggcaaccccttccgccgtgcccgtgcatcggccgacgtcgccatctcctcctccggcatcgcagcggcaaggtcgccctcggcctcgcctcccctgcatccgaaccccgccggtgttcgttatcatcgtctccgttcatcctcatcgacgactcctccggtcggtcgttcgtcctcgccggctcgtcgtctcgcggcgccgcctccgtcgtcggattcgcagcggctgttccacgccgtcctcatctctgtgcagctactgctggctgccctcgtcgcctcctcgccggccccggtcgtcgtcatcgtcgtcctctcgtcgttcccggtcgtcgtggcgttcgtccctccgtcaagccattcgcgttcgtcgtccgcgttccgtcaagtgagccgctacagccccgtcatcgtctttgtcctcgtctccgcatcatcaagcctcgcgccggccgcgtctcaccttcgtccaaggatcgccgccaaagtcgttccctcaccgtccgtctccgccgcgcccgttcgtcgttgtcgttcccacgcctcgtcgcgtggtggtaagtatccctctccctcgctgctccgtcctcgtcctttcggtgtcgcctgtgcctgttgtgcggttgtcgaccccggtacccatgtaccggtgtcggtagtcgtttgtgtgtgcgtgtggtggccgtgtttgtgtgcgcgctcggtagccgcgtggtttccaagtgtgcagccctcgtggtgtctagtggagtccgtttgtcggccacttgcctcggttgacacacggggtccgcttccgtcgacccgtggactgtctctgtgtactcggtctaccatggtcccttaggttgacatgtggggtccgcatgtcaacagcgcagtcttcctgtcttttccaggctagcgcttacacatgttttatagttgtaaaacctaattacaataatccgcaaatctccatataacagcattaaacttcggatgaccatgtcttggtcatacgagctccgaatcgaaccgttcaagtctcctaatgtttgttataacctaaagaaccatgtgctttctttttatgtattgttattgcttctttataggcttgtagctttgcttgtgtgcttcgcgtagtcttcgtcgttccggaggttcccgaagcgtggtttgcggtcgtcgccgaaggttcggaaggccgttatctctgagcaaggcaagtcacatcatccttgagcatattgaatcccagtttataaaattattttgatttaaattaatgcattatcgctttatttaaaattcccgcgttatcactgttttatttagccatgcctatttatctttgttatgaccttatcattgttgttattgttattattaccttgttcaccctaggataaacaaaaccccaactagtgggtactctattcatggttccactagtatgaatttaggtagatgcttcgctgattaattaggcaacattagatggttttataactttagactttgggaattctcatatcatttggacactatggaatggttggcttatgttggaattggacacacacctccccctctattcaaaacccccaaaatagttttaggctgggctcgaggtgcgtggttgggttttgttagtcgtacctcgggtactataaggattaagctcgggcctctgttgcaaagcactaccgtacttccacatgtctagtgggtaaggcttagtttgtggctcagtctggttataaacaaaagtacacggatggagatggacgaagtcgggggtcgatggacatctctaggacaaatgaaggctacacgagctgcggcccggtagtcgagatgtcatggcacagggctggtgtcctgctgctaggggctcaatcctacctgcctgtcccggaggttccggccataggtggggttgggtcggtactcttgtttatggctaggatgggttgagaactatgtcacgtcttttggccgtatgccgtggtggtatgtggcacgtggttacacgtgaggaagatgtgtcttgtgggtaaagatgtacacctctgatcagagtataatctattcaaatagccgcgccctcggttatgggcaagcctagcaatgtacccaagttagtgttttaattcttaaaacctgcttaacaactaaaatgtgaaatggttggcctgggttggcttgggacgagctgggactcagggtcgggttgccagttcggtctgaatcatcgtaggccttgggttaaggcaggttcgtgtgggtctacggccttgattaataatattgtatagctctaggatcgtgtttacaaaatagctttgggcaactaagtgacttttaaatgctgtttactgcaaaacttaacccctatattattaccccttgtaccccttgcattaatcatgcatctgccggtgtggcttgctgagtactgtggttgtactcattcttgctcaatctttccccccttcagtaagagaagctttggagaagaagtcttaggtggagtcctggcttataccccagttgagcgcctgtgaagatggagccgtaggcccgctagtccgctgctgtttaattttgattgtcaggccttaagtgcctttgtaataatgtaaatattatcgatataataaagatgtgccttttgtatcatgtttgtgtggtgtaccccggcttttcctgggacggggattaatacactagcgttcgggaaatgcaaaatttctcagtcgcgacaagctggtatcagagccatctcaactgtaggataagccaagtggataaaacctaaggacatattttataaatgaaactatttgtgaaagttcctttttcctcctttccgtaatgctatttgcaaaatgtttattctcttcttcctccttcggatttttgactagtactagatggtcagctttgcgaagaagaagatgtcgccaattgtttgccgaagctccggaagaccacagggtccgctagcgaagcgaaggaagcagtgaagccagctgtgaagaagcagtgaagatcttggagaacccgtcgcagaacctaagccaccctctattgtttcgtttgtcgtgtgtttcctttgcttgtgtgtgtagcgcgtggtttgcatcggtgggttgtgatgtaaccatgctaggttgtttgcttaatctacttgcagaataagtaaaacaaacaacacatcaacaagaagagttagttcctttaaggtcctgtctctagttctggtctattctttcctggcttgtttcctctctcacctcaatccctgtcacagatgtttaacagagaaaaaggaaagaatgtcagcgggtatgcctccagtaactcaagttttcaactcaatccaccactagcaccactagcctcaagagagttaaaaagggcacacccttggtccattccaagcatgctgcttagttcacagctaccattggttggaagtcaagaccaaaatcagtatgtgtttgatcgagcatttgccacccaggtcaatgagcttccaatgccagaagagcatgtccccttttctcatgattgtagagaacaaggacactatgccctgaattgtccatgggtatatgccaaagaagccccttcctttggtttagcagggcagacatcgctaaatgtcacgaccggaaataaccaggaattgcaaaacacaggaaaaacacaagaatggtcgtttaattggagcgcagaaaaaacacaagaatcggatgagagagatagactcaaaggaaattttccaagaggttgaagctcttgctaaaaatttcctccaaaatccacatgcaatgtgccattctataggaattttataggatttggaaagcttcaatcatttgaatcaaagggccaaataggaaaattttctataggatttgaatcctatgaaattcctacataaatcctttgattcaaaggggcccttagtttagtaatatctagatggtggaataggaatagagtagaaatcaggagtccagaagccttcggaagagttcgggtatggctctagtagcttttctcttctcttttgtaagctttgtacctttattagaatactcttctacatacatttatggtattgaaatactttccgagtatatgaatgcctactttacattatgttcatgttatactgaatatacggctagcttatctgggagatgctttggtgtgggtataatgtttgcatatgcaattactttatgtcatgacgatgatattagagtagtatctggtagtttagatgtggtgtctagattacgggatatcattatttggggttatatattgcggatgagaggtgggccgctgatggtgacagctcagtacgggtattcctccgcgccggtatataatcctaagttaattccctggggagggtatttctccgtatttagccccggttgtatggtcatgacaggctgttgtaaggaactcggtagtcaggggtggcttctcgaagtatcagtagggcatcggatagagggtattagctagtatatcagttaactagaatgtatggatactatgtatgttagaagtataggaatagattatctttctcttttcttcccacttagcttagataatatattacgagaatgagtagttaatgcttgtgtatcactctacccttggattatttttgacccctgcttagaatatgattatcacaagtaatatataaattattagtcaagttctctctacatgatcttcttacggaataaaataaatacgatacacttggaatactctcgggtgaaatgctacaatggtatatccgtgcgcttgcggatgaactctgtaaccataatatactagaagtatttctgcgtcattgctgggacatatatttcttttaatgtcgttaagaaataccaacaatcatcccctctcatctcatccgtccatccaccatctcatctgatcttatccatccattcatcagtgatgagcgattctaccaattccgctcccacgcgatgactcagccgcagtgccacacaaatccccgctgcaatgactcctccccacgaatcccgctgcctcctcgcctgccatgatgacttctgcccacgaatcccagccgcttcctcgctcctcctcaatccgtgtgcatcctccgtcctcctcgcgacaggccagcgacgccgcactatcggagttgacgtcgtccccatctgccgccgccgtcgcagcatccccgaggtcgtccccttccgccaccgccgccgatttctccacccattccttgctccatcgcgatttctccgtcgtcgcgacctcgccccgccgatcgcgccctcatcactgtttcgcctgccatccactgctcctatagccacctccatcgcgtcgccggttcctcacgcatgttgctaagtccgacccgatccggttggttccgtcatcgaggttgccgcctccagggaggccaagctgatccggcatctgctccacctgctgccccctccccgtactctgctcctgttccccctaaaccctaaggtaataccaatttatcctattttacatttttttgtgttgtgtcaatttgtggatcaccatttgttttattgatcattcactatttgccaatcagaaattggccatggagtttgaagatcttaacgttttgtttcctccttgcctgatcatatatgtcttggatcaggagaagctcttccatgaattaggtaaccaaagtcgatgaataggctagccttaaggatggcggcttcggaaggcgtctgtccctattctccgttgatcctgcacagcccctatcaatggatttgcatcaattctttcttctgaactttacgaaggaaaattttgtctggttctatatttttttatttgtttggaggtaatgtgatgttttgagataggctctaaatttgcttgtaatacggatgattatcactaatcactgtgaagccatcctactgttctggttagtagttattgagaaatatataacatttgtcttgatcctcgagaatacccaacttcttaaagagaaatatatctatatatatatctatactaatataaaaagaggagttgccccctccaatgctacatgccaagtcatccggactaaacgcgtccatccgcgcgcttctcttcctccaccgcactatttcacagccgaggattccacgcgcgaagacatcgctcctccacccgcagccgcggagaccgcgcgcttctcttcctcgctcactcctcccagcgtcctcgcaggagcgactccccactgccgccgcagccatcctcctcgctcgctcctccttctccccgctgctgccgctacgccgcgccctagccggagccgccgcggccgtcctccttcttccccaccgccgcgccccgctcttccccacctccttcttcccagatcgtgcttctcccactcggatcagccgccgccggagccgactttggccccttctccgccgccggaaccaacatcgacctcagcccgcggccgtccttcttcttccccaccgccgcggctgtcctcctcacgggcttctcctctgccccgctgccggcgctacgccgcgtcctcgccggagccgccgccgtatcgttcttctcccactcggacccgtacgaatctccgtcctccaccttcgccgctcgcccctctctctctctcttcgcccgcgactccatcccctccctagccgctgccctcacggcctcgccatcgccaatccctccatgccttctcgggctcatggtggaggggcaggggctgccttcggtggagagttacagccgatcccccatcaacagcgcccgcgagtgaggatcaagccgccgttatcgagccaaatcaggcggacaagctgagctgacggtgtatacgggaggtagagatggacaccagcgacggcggtgcgttcgataagtgaccttgatagcatgtggcgggagaggatcggcggtggcgcctgagatgtcgacagggaacatgcttgcagatctcttttccatcaatggctaccacgagggtcttcccatggtgcttgcccacattgccacctacgccgcgcttgctcttcccccaactgtcgacgcccggcaccatagccgccgaggccaagaagatctggaccatctggtcatctttggcgccatgaatccggccacttccgccaacggggctgctgccatcatcgacccgccgtctagcacggttcaatgggcatcatcacacgcctatgcttcatgtccttctttactagcaggttaaaaaatccttaaggatttatttgctaatcatctttacctaatacatatctggtataattcttcgttgccttggttttattactgtatttttaggtcatcaggtggagaagccatccatatgctaaataggtctcaagataggagtgagcagcaagttcggttttcattgggccatactcctcatctgaacaaacaggtttacatagtttacatagttgttttacagcctataatatgaaaaaaattattggatagcttgttattgtgaggtgatcttgtttgttgttgaatgatattaattgattggttgttttattaggaattctcagcaggtgtgttgatttctattttgcttaattttgtttaattctgcagccatcatggcccagggagtataaagttgaatagagccaatggatgctgtggcggttgcgatgacggtagctcaacaatggcactgggcgtgcactgggaggtatgcttaaaggagagtgttgtagcatttgcatttttggcagttaagtttgagcactggatacaaatcattgatcttctagaagtaacattttgattcctgcaaactaatgcggcacctctgtctcaacactgtcatcaggtctgctccccagtttggcactccttgtggtaagggaaacgaggagaaagaaatgacgaccaacaggttgtgaaagacaccaacgacctgcatcacgcaaataaacaggtatttattattttggttagtttagtttgttgtgcagacattaattaaggctaggggtaggggttgaagacttatggatgaatccggtaccgtaaccttcacatttgaccgttcattagtagctaaatggacggctaccatgcatctgatacatcaatctgtaggctaatgacatatcttgagttatagcgatactttctttaaacaattgctatctttttatgtactgaaatttgcataatccttatgatgtgtttttctttaatcatctttatgtaattaatacatgtagaggataagaagagagatgattagcttctgcatttctgagatgtgaatatctaattaggtatccagatcctaagaaaaaatatcttcagagaatagtatcaagcaaatattaagagaaagcagtgagcccatttttttttgggtatttcataccattaatcgtagcattcggcagttctgcagttatgtatactttgcacttctattgtgcaaatgttatgttacaatatatatgctgttctgaaggtccatgacgaaattcttgctgcaatcagggaaaaagaggagggacctctccatttgaaatgctctaggctacataaaaaactgacctattcatatgaaaccttaagatagtacatattattattagacaatatgttggtcttttcttgctaaacctgaattgttctattggtgcatagtggaattagtaagattggtgtgactaagtagatatatttgaagtgtatacatttttattaagtcaatagacaatgtttcagcctgcagtgatcgacatattcaggtgtcagtaaagaggcacaacatttatttgcttactggattacttctagacaaggtttgcttcttgcttttctatgactgacatgttgtagctccgctaaatgaagtattattacaattttaatggagcattatgatattagttatgctgatttaaaatgcggtaatctattgctttagacatggtaacatacatgatgaattgacctcttgttatagttttagtttcatcatgattttttagaaatatatataatatatgaatattcacaatgcaacatcctctgccttttcttctttggatatatcacacggagataaaagggaattattaatatgttagattgtgctatcagtgttgatgtgaaacaaagttatcactggtattttttatcatggatttctattttctaatatccgtttcctatctaaccaaaggagggaacaacaatcggtgcatgatctctctacctgatttagacagataacactatcaaac

SEQ ID NO: 24195 - DNA, 2064 bp, Oryza sativa
gcaccggcattcttcaacccaaaagtcatgacaacccactcaaacaaaccaacatatcccgggcacctaaaagccgtcttgtacatatcctcttccgccataaagatttgattgtagccgacattatcatctaaaaagctaatcaccttatgacccgaggcatcattaatcatcatgtcggctataggcataggatattcatctttgggagtggctttatttaaatctctaaaatctatgcaaactctaatcttaccacttcccttcttctccaccgggactatgctagatacacactccgcataacgacatggcctaataaaccctaccttcaataaccgatcaatctcctctttgactcggtcatatagcaaaggattaaaacgacgaggtggttgcttataaggcctaaaacccggtttaattggaagccgatgctcaacaagctcacggctaagacctggcatctcatggtactcccatgcaaagtaatcaacatattctttaagtagctcgattactttaaccttgtaatcggctctcatatttttgtttacaaaagtcggcctcggtttagttccatcacctatgtctacttcttccaaaggatcggccgatgtaaacccttttccaagcttctctacttcttcaaaatcctcaacggtttcaccaatatcgttctttgtagaccgatattcttgcaccctcttttgtaaccactctaaattagcctctttactcattatacaaatttatgtggcttagccgtgctacactagccggctttacagagataggtacaaatttgccatcggagatactaataaaatcataactagaaagatctctccccgaaaagcattggatattcccatgacgccactcaaaagtaacatcggccattgcaacttcggccgatgtatccgcttgaacaatctcaacatcatcgccgtcccattgaattaaacattgatgcaaggtagaagacacacaaaaattggcatggatccaacaacgacccaaaataacattgtagttaccttgcacatcgacgatgaagaaagcagttggtagcgtcttgtttcccacggtgagctccgccgaaaagatacccctcgcctccgttggttcaccattgaagccattgagaatcatgttggtcttttttaactcatcatcctcacgccccaacttcttgaataacgaatacggcatcaagttccggcttcccatctacatggcctttgagataaagaggcttcatgtgacagtttgattcatcgggcttctcaaaaactgcatctttaggacctaattagaattgagcaacctcggcttcatccatagcacaaaactccataggcaacatacataccatgttgatatccatgtcttcttttggagataattcacttttatcaactgattgttcttccttctcctctacatcaatcggttttgccttctctatggatttaggcctccataccggtggtggtcgcaactcattgaaccttttatccctatgttcttcggcctttttctcccttagctcttgggcccgaagacgttgcaaccttctcttttgtgtagccgtcaaatccttaggcatctacctaggattcggctctgttccaggaggtagataatgtcctttattaactttgcttgaagacgatgaagccctcacattgccctttgcaatcctctcatcaaaccggcgctggagcccagtcagactggccatagaccaccggtcagaccggccagacgcgccggtcagaccgacgtgtggcacgcggttagaccggcctgaggcgtcggtcggatcactgtcgggtcgacggtcagaccggcctaatggcccggtcataccggcaacatggccgcggtcagaccggctagagggcctggtcagaccggccgactgcgaagagctggtaccggcttcggattttttgcttggggactttccaactccatctccagaaggtataggcacatcatggaaccccactttgatagtaattacttccgaagccctttcctccaccttgacgcgct

SEQ ID NO: 24196 - DNA, 5438 bp, Oryza sativa
ctcaccaccttgcctcttatatttctccaagagcatagtaaaaatcaccttggtcttcctaggggccttagaagttgaagctccacttttgttctccttccaaacgccaacctccggcttctttggcactatcatcttaggcctcggctcaccaatgaccacttccttttccttagtagattcgacttgcttcggccgaatcaacacctttttatcattgaaactaattgtattcaccggaaaaggatcatcatcaagcttcatcttggagccttggtgaacttcaatcgtccttcatctatggccgattgaacctgtcgtcgaaacacattgcaatcattagtagaatgagaatgagaatcatgccatttacaatatgctcgacgtttcaactcttcttgagatggtatgacatggcctttaggtaatctaatttgtttctcttgcaaaagataatcaaaaatcttatcacacttggccacatcaaaactatatttaacctcactttggcgatctttgcgaggagtcggcattaagttagaacaaacaaaaggcttatttttattagtccatgaccattcggcaacataaatatcatgatcaccctcctcctcactatcactagcctcagggtaatcaactacattaacattaggctttttgtcaaatggtctagctaattttttattatccttaacccggctttcttgagccagagccctttgcatgagttgactaacatcaataaattgttggccttctagtctctctctaagaggaacaactaaaccattaaaagcaagaccggccaaatatctatcagttatattcaaagtataacattggtttctaacatctctaaatctcttaatataatcaatgacagattcattatacttttgcttaaccgatgttaaatcacataacctaagctcagtttctccagtatagaaataatcatgaaattgttcttctaattgagcccaagtatgaatagaatttgccagtaaagaagtaaaccatgtgaaagcattaccggataaagatagagaaaacaaacgcaatttaaaagtatcactattagcctcaccacattgcgccataaattgacctacatgctcccatgtggtcttaccatcctcaccactaaacttggcaaattcgggaactctataatttcgaggaaacgacacattatcataataatcaggatatggctttttgtaagttctagcacgattcctagtttcaatccagaatctattcctcataatatcactaatcatatcctccatgttattaggcccttgttgatttggcggtgggtttggtggcctaataggttgtgtttgtggcgcaatatgattatattggccttgtctagtatcgggaggatatcccctagaaacattattataagtattaggaacatgtgggggaacttggggattacttgtggcagtagatacagaaggatcaaatgttttaaagtgatacaaataactagcattagtcatcggatctattccctatatcataatatgcggtcggaccggcctgagagctggtctgaccgccggggtaatacttggtccgaccggccatttggccggtcagaccgatggctgtgtcgcggtctgaccagccaccaggcccggtcggaccggccgtgaacgccgttctgtcggttttactacccgtttgatctataggaggttgattagcagtggtataggctttatgctttaatgtgtaatcatccataaaagaaccaagcctactccttaaaaacccatcaactttatccttaaacattacatctaatcgatctttaaaattagccatagatgaatctattgtagatgcaatttgttgttggatagattgtgatacctcgtcattacttaccacgtcgggagcgagcttgggacgtggcccgggcttgatgatcacgccttgacgagtcctagtagttgctctcatcaacgcctcccgtgtgagctcgttgatgtactcctccatagctttacgatcttctccttcgaagtcatccgatgtgaccggcatcacattagatggctccacctccgtcttggatggcggcttcgtcatggcgaagtcgaagttgagttgacgatgaacggatctcctccccagcggagtagccaaaaatcgtgttggcaactttttgtgacaagttggcaagcacgatcgcagcaccttatgccttgcggtgatcctagagtcgccaaccacttagatgggttttgataactaaaccggctagcggagccgatttctagataactacccgtctcgtgggcaaaacggaaggttttcaggacaaacctacaaagaggtgttgcactctcgcagcggcggcgggcggtttacggcgcaaaccgacaaagatggacaaactaagagaaaactaaaagcaatatgaaaaacgattcgattgattgatagtagattggtcttttacaatgaaccggccatgtcccttatataggggttggtcttgccctctacaggccctcctccacgtccaactcgggatagaagccaaaggaaacccgaaacatgccttcccgagcaaggaaacctcgagacccgacgaaacagaatcggactcggtcctgccagttagaccggccacacaccgccggtctgaccggccctcaaccggcggtctgaccgcccaacacacagcggtcagaccggcccactcggaggaaaccggtagacttccaaattttggcaatctttcctattttaatcctaggtgccaaatttgggtgtaaacactatgtatgttagaagtataggaatagattatctttctctgttcttcccaattagcttagataatatattatgagaatgagtagttaatgcttgtgtgtcactctacccttggattatttttaacccctgcttagaatatgattatcacaagtaatatataaattattagtcaagttctctctacatgatcttcccacgggataaaataaatacgatacccttggaatactctcgggtgaaatgctacaatggtatatccgtgcacttgcggatgaactctgtaaccataatataccagaagtatttatgcgtcattgctgggaattatatttctagtaatgtcgttaagaaataccaacaaacatttctggcgccgttgccagggaagattcataatagagattacttgaactaatactttatatttatctctgtataatcattttcctttgcaggctaaccttggttgttttcactttttgttgtgaaaacagggtagtgcatgactggtttcaacttgccggaaaacttcaaagaaaatccagaagctttcttctggagcgtcaggccgcgagtcgttggtccgcagaaaactctaccgacaaagaaaccagccataccagcgccaccgaccttcaagactatggctaacaagactctccgcgagttcgctgctccctctgctgacaatgtggccattgggctgcagatcaacatggtaggtgtggatttcgacttgaagtccagcctcatcacgatggcgcaggcttagcccattctgtggcaagcctaatgaggatgccaatgctcatctgttacaattcttggagatctgtagcacgtacaccatcaagggcgtcagtcccgacaccgccaggctgcggctgtttccgttctcccttcttgggagagcgaagcagtggttctatgccaaccgtgttgctgtcaatacctgggacaaatgctctatggcattcctctcgaaattcttcccgatgggcaaaaccaatgcccttcgtggaaggatttcaagtttccagcagacaaggaatgagtctattccggaagcatgggaatgtatgtaggagtatgtggccgcctgtcctcatcatgggatggacaactggctgatcctgtagaacttttataatggactcaccccgatgtcccgcgatcacctggacgcggcagctggaggagctttcttctctaaaatggttcaaggagccgttgatttagtagagaagatggtctccaatatgggttggagcgaggaacaactccagacctgtcagcgaggcatgcacaccgtcaaagagacggaattacttgctgccaagctggacctcctcatgaaacgattggacaaccacgagaaaaggccacaaggcaccgtcaaggccttggactcacacgttacgtgtgaggtctgcagcagcacgggtcactctgggaatgactgcccggaaacccgtgaggaggcgatgtacatgggcaacaacaattggtaccgtccacaaggaggtcaggggtggagccaactacgcccatattatcaaggaggtaacaacaacggtaacttttctaaccagccctccttgaaggatctagttttttcgcaggctaaaaccactgatgcgctaagcaaaaagcttgcaaccaatgacaagatcctagaaaacaataatgtcaagttagatggctttgcttctgcttttcaaaatcagctgagctttaactaaatgataaaaacccagctagctcagttagcatccttagtccctgtaaatgaaactgggaggattccggggcaacccgactcctccattgaaaatgttaaggcgatcacgatgaggggaggtaagtccactcgtgatccgccgtatcctaaccctgcaggaactaacgagattgcaaaaaaagcgtcatctagtgactcggctgacaaggaagatcagccagaaaagaccgtgccgcaggagtactgtgacacatggttgctgttgtttcctcaacggatgaggaaaccattagtggacgagcaattcgctcgttttgttgaagtaatccagaagatccacattaacgtgccgttgttggacgctatgcaaatgccaacatacgcccgttatctcaaaggcatactcaacaacaagagaccgctcccaacaacggaggtggtcaagctgacggagcaatggagcaacgtgatactccacaagctcccggagaagaagaaagatccggggtgtccgacgatcacctgctcgatcggggcacaacagttcgaccaggccttgtgcgaccttggagccagtgtcagcgtcatgccaaaaaacgtcttcgacaagctcaacttcacgatgttggcaccaacaccgatgcaccttcaactggctgattcgtgagtccgttacccggcagggataacggaggatgtgccagtcaagatacgagattttttcatcccggttgactttgtggtgctggacatggacacgggaaaagagaccccgctcatcctagggcgcctgttccttagcaccgcaggagccaacattgacgtgggagcggggagtattgttggtatttcttacgaccacagataaatccgcaagcgcatggaatac

SEQ ID NO: 24197 - DNA, 20221 bp, Oryza sativa
  unsure (1)..(20221): unsure at all n locations
taagaaaggtaatttcctatctattgcttcgggcaccgacccctgctggtctgccagcctggttccggctatagctctatgatgtatccgaacgtggaggattactaggacggaattcagggctgtcaccacctgccgcctacctctgataaatccgtgggatacacaacaaacaaaggtaacgtctaacctagacaccacgtctaagttattaattactactctaatactcgcgcaggaacttccttctctatctggagtcctagtactagagcacttagtataaatactaaacaatgaacctgcaaagatggaaatatatcttactcagattaaataattaaataacataaaaaaggaatacaaatgcttactttatagaagaagttctccgaacccggagtagagtgtaccgatagctccggtactcctcccgaattccacctaggaaactacactcgtcgaggtagaagtcggatgagcaccatacttccgggcactcctccagagcttcatctcactctctaccttattctaatgtataaaagatacactagagcctcttgtaattcagctcaaagttgtgtgtgttggaatgagatgaagacctccttatataggctccaaatgatggttaggggcatgggaattgtccaaaacaccctgcaaccgcctctgggaaggaatccaagccatccacgtggaagcagatggcgaacggccgcagaacgggttcggccgaattggtgggttctgccgaacccaaaaatgtgtcatcccggcctctcctttggccggtaagttgcttaatgggcccccaataacctgcaccatgttttggcccaattctaaatggtttttattgacttatggggcctccaattcgtgtaaacgtgtcctgaatgtgcagaggtgcattttgtcgcatgacggatgtgttttctcctcaaaatacctgcatacacatatttcaccaacactagtggaaatgattagtaataatacctaccactaagttggataccatgttttatttcattatatgcaggtattgacggtcagatattatgatttaaggaccgtcaacaacacccccacacttaaccttttctcgtcccgagtgaaggctatgaactctacaacagagttatgacttccttactaataatcatgcaaacaaattattcaaagccatacctgtacttgtggatctttgtagtgtctaccatacaatcttggacaattgaggaatggaacaatctcgactcaagtcaccctaacttttcatgaagaacaacttggggtttttcatgtaacacaaaattataactttgctttactccctccattgattctctcgatcactcaaagtgtatgattcctaacaaaggcatatgattgtgccttttcttttcctaccatctaataaggcttatgtggagtttagggtatggaaaagagtagagcattgcttgcatcatatatattgcaaagtcaaataatggatccacggaaatacaagacatactttctggtcaagaatgtgcatgtgtatgtgtatggttaatttcgtgggtggaaaacggaaaaataaaaataactccttttgtatacctcctccttcatttatttttttttgaaatttgagagagtgcatggctatctttttttttcttttctttttttttcatcatcatgctccatacttgtattagcattttttttcttttgtttttgcatagccatgcttctctccctttttttttgaaagaactttggaggaagaggcataaatgacatggagtatttatttgatggatgaaatgaatgacaaatgggagatgctaacttctagtgtagaagtcaagcatatgtgcgtgtatgtgtgatgtgaccatggctaccacggatgcaaccattgctcacatcatagatgaacaagaagatatcaagatcaagtcctccaagtgctggactccgattcggcaacctgctacactgttgacttcaaacggccgtcaaatctccattcgagctccgtttcggcccgtgagtatttgatggaaagctctcggagtcctctttccaacggatctagcctcattgtgatattccatctcagtgagccgcaattgaagaaacaatgggctgcattgtctgtagtgggcctgtgggcttgtaacttcatttgggaccccggcccaggtggggcccatgtggggtgcgcaccaagctggtggagcacgaccctaggcacccctaggtcgtcctcccacccctatgtatagctagttaccccttcagggtttctcgggttttgatagattaaagtttagccattgctacttgcttgcagcgcgcgtgtcggctagaccgtccgtctgcttgttctttggaaccctaacttatcatttgtattaaattcctatttgcaatatcagattgcttttatcttgttcttgcttgtttcttcgatttgcttgcaggaataaggttgatctgcaccggcaagatcaacaacccacggagaggtgtatcgatcgctaaggcgcaacacaacgtctcatacggttgtagtcggatcgtcaacgtttctctcaaatcatagttatcacaactcaccgaaagatcgggccaacaacagccttgagtgtcgagaggaactcagggtccattaggtagtatcagagctttcgttgctcggtgagttttatctacccataaccagaaaattgccataaaaaaattgtcctgtacctagccatattgtgccattgcattgtttttatcagtttttgctttgttgagttttgtgttacatcgtcgagtcgagttgctggtgttagcgtctagttcgttttgagtttcgagttctggtcacgttttgtaccacagtcgtcgtcgcctccgtgtctctgttgtcgtcgggacctacaaaaacggaatcggcttgctgccacggttctatttttgtagttttcagaaatttttatcggtcagttttggagttgcatttaggatttgcttgagtttctggtttgcccgtgaatagatcggcctttgcttgttgccggtgtagagaggaggaagaagaatttccaaatctgtttttggaagtatgtgagtttaatctggaaagaaatagtagatcagattgattgaaatcagtttccttttttctctcaccatatccggactcctaggtagtgccgcatccttcctttcctcacccaccaccaccccgggtccgcgaccaggccgagtccgagtgtctcctctcggtcacggtttcaatctataccgtgatcttgcatactgcttggtgaaaatttttcgagtatcggattgaaaatccatttgcaaaaacagaacctacaggacgagaggattccatttttgtatagttctaattttgggtttgaacttttacatttgagtccctgtaatttttgtatttacgtttgagtccctgtaatcttacattgaggtccttgaatctatttttgtaaaataaaataaaaaaaaaggcagaaaggtgcaaaaaaaaaaagagaaaagaaaagccgcaccaaaaaaaaagaaaagaaaaggaaaggaaagaaaaaaaaagaaagaagaaaaagaaagaaaagagaaaatactgttatgtttgagctgaacttcatatatcagagttgtgcatgagttgttcctagtgctatcttgtggtatcatttgtgtctaggctcgcgtctctagtacgttctagcctaggaccagcacggtacttgactttgaaccattattcaactttctattctctgatttgagcatttgctatccctttgctacatatttaagcctacccagagctccacaggtctgattgcagccatacagcaagtgtttgccaagacatcgatacatccaacctccatttgggtgcttggttaagtcagtgtacatcaccattctgcttgcattggtaagatcttgtaagagcttggttaaaagcttgagtgtgtgtgatttttgagctgccactacctagtagttaataggaacgcacatatttttgtgtatgtttcttgtttgctactaaccatggcaggattgcgcacggggaaacgagatggtcatgctcaacgtcaacatcttcaccatcaacgagatatagcgacttcttcacgcatcacatatgaggtacatgataatgatcttgcaagggtagaatctaaattgcctggttttgatggtaagtatgattccgccgcttatgttaattgggagctagcagtagaaaaacaatttgatgagtatgatttttctaatgctcaaatgattaaggctgctagtaataagtgtaccggttctgcatctttttggtggcatactgtgggaaataagcttgaaacttgggatgaatgcaaaatactgatgagaaaaagatttgtgttttcatactatagacgtgctctccttgagaaatttgaacatctaaaacaaggtgacaaaatgtcactacgtcagaacctacattttgtaacacaattttgtaacacaaaaagacatgtgttacaagaacactctgtaggaacactttgctttgtgttacaagtacattgtaacatatattcagtgtgttacagttgtgttacatacagtaatgttatctatgtgttaccaacacctacagtaacacaatatatgaaaaaaataaaaataaatatattcaaccatagaacaaaaaaaggcacagggaacaactgaacatgcatgagaacactgatatggagcatttaggctatgaggtgagactttgttatttttcatttcagcaagacaactcattttttaacatggtttatatgaatgtatcatggaaattgcactaggtggatcataaccataaggaaataccaagccactacgactcatcatcactctctatgctcaggattttcgacaggaggtaattcttacccactaataaatttcctggataatcaatgtgttatgtctatatcaatgtgtgagatatgtgtaatgtacacatgctaagaaagatgatgctaacatttgtcaccactgaaaatctagtgctagtaatagttttagtatggatgtcatgctttcatgtaatgctgaaatctgattttagaccattgatatatcatttaatcctgactgacttttagtaaagaatattgtacattttagtaaagcaaggtatgtccatttttctcatgttttctgccgctttgttgctccaactttgtattttattgactattcaattgctcttagtgaatctgtgttcgaagttagaaactaaaagtgatgccaaaattaaagattttctaacctatatatttgattctacaaaaaacaatatagtttttatctagcaaaatcataggatgtaacaaaacttgtccatctgtaggtgaataaacaaaaacagcaaaaggtacaaaagactatgaagagtagagagaaaaaggatggtctgaacaggactacacatgttagggagtactttcatgattttaaaatttgtatcacttatagtgatttacaagaatctaatgagaacacaatgactagatttttcagagggcttaattccaatattcaagctgggcttgttaatgtgacatataatcatataggccaattgttcatgcttgcttgcaatgttgagcgcaaaattttggagaacccaacggagcaacaagctatgcttgtgcctcctatcattgatgttttgcaggaagttcagaacagtccccaaaatgagaagaacgatatgtttgagatgtcacttccatcactcatgaatgaggagaaggctgatgcacctaccttatctgaagagggcataaaaggtaaattaaatgttgcagaaattactcaaggtgagtatgcttctgatgaattacatttttccactttccatgctgacctagagcaaactttagtggaacctacttctgaattgcctttgtcacaagttgatttgcattatgttccttgtgataaagaagagttgtgcgatagtacttcatttatatccattccacaactagtgaatgaacatgctacttttaatcttgattctccatgtactgaatttaagtatgttattcacatgtccagcgagaatgatgaacttcaattgcaatcttctttaaatacattgggctatattatgtttgatgattcttgtgagctcaattgtttgaaggacaaaatatttgctcattctgatttgccatgttctcgtaatgttatatttcacatctttggcgaatataatgatcttggaatatattttgtgcatagagtttacatctgctcagatttaaaacttcctgtacatgtggataaaacatgcaagctagagaaaaatgttattgctaaccaaattgtctcgagtttgccttgttttgattggaagaaacagattgttgtaaatggactacgcaaagagcaccatatggaaaaaccgaggacggttttccatgcagaaggggacgatgatgtgaccatggctaccacggatgcaaccattgctcacatcatggatgaacaagaagatatcaagatcaagtcctccaagtgctggaatccgattcggccacctgctacattgctgacttcaaacggccgtcaaatctccattcgagctccgtttttggcccgtgagtacttgatggaaagctctcggagtcctctttccaacggatctagcctcattgtgatattccatctcagtgagccgcaattgaagaaccaatgggctgcattgtctgtaatgggcctatgggcttataacttcatttgggaccccggcccaggtggggcccatgtggggtgcgccccaagctggtggagcacgaccctaggcacccctaagtcgtcctctcacccctatatatagctagttaccccttcagggtttctcgggttttgatagattaaagtttagccattgctacttgcttgcagcgcgcgtgtcggctagaccgtccgtctgcttgttcttcggaaccccaacttatcatttgtattaaattcctatttgcaatatcaaattgcttttatcttgttcttgcttgtttcttcgatttgcttgcaggaataaggttgatctgcaccggcaagatcaacaacccacggagaggtgtatcgatcgctaaggcgcaacacaacgtctcgtacggttgtagtcggatcgtcaacgtttctcccaaatcgtagttatcacaactcaccgaaagatcgggccaacaacagccttgagtgtcgagaggaactcagggtccatcaatgtggaatgtgtgttcttgaccatgaaagtatgaaaagcgtttcactagtgtcacaaaacttgacaacgttcattgaaatgacaagcagcgtatgtagcgagctaatcatgaatgatcaaaccatggctctagtgggaataaaaatatcaatgaggagtttagcatcattaaatgttttttttctttttataaaattcccaagtgtgcaacatgaagagcaggatttctatcatcagaacatatctcattcatcaattacctagatagcatggggtccctattggatatatcaccacaagcaacaagtaatgagcaaagaataataggcatggatgtcattttcagggagaccatagactctaattgtaccatccctagcttgggttcaattatctttaatattttagaattgataatcaaattaaactcaagatagaatggatgtccaaaggaaaaattgtgcaaacctgcgctttgtataaaacagaggacgattcatggtagaggtggttcagccgaactggaggtttggctgactcctcattggttctgactgcatcagttttccttgtgtggttcgtcatggctcatcactactgggtgatcttgctttggttatggcgttgatgtgcaagatcacccccacacttgtctttgtatctgggaggctttattgaacacaaaaagaaaaacaaagacaaaagtgaagcgaaaaggactcacttggttggaagaccaaggagccaactttattttattttattttatttaatctttttccctttttattttaggcaccaatggaaatggtggatatcctggaaggatggagacatgagatgaggatgcacatggtgtatgatattcttaccagatagatcttaccaggcttagaactggatcaaatgtaacaaagttttgcatttgttctgcttggttccttgtgcatctctttcccatggaccaaggagcatgatataagtgtttgaagttattgtacattgctcattgatttgtctttttatttcctgcaaaaggttagtggacaacaaatactcgaagcactacaaagatttgaatgattttattgtagcctcaagattaattgttcacatccacgctaaaaaggaattggattcaaaacttaagaagcgtggatcccacaagtttgccaacattttattttatttttcgagagacagtccttttattctgaaacatttttttttcaaatttttattattcaccaaatttttgtttaagcacaattcatacagggctgaggtaaatttgcatgaacatgctaaaggagtgatcggtaatatacgcaccgtgcaccttgataggtgatatgtttctcctttgcatgttaccaattgatttgttcccggccctgacctacctccattatgaattgaacttgaggactcacccatgaatttgaacactttcctgtagggggttaatccacaaaagatatatatccaatgtctatgaacatattaactctgagattcattagtcaaactaaactccatgtccaatttgattaaagcagactattttaacctaagcgccatgcttaatttaaaaagcctatagatgtcttgcgcgaacacccaaaatagagcatatgcaaatagacacaagaaacataaccatgtaagatcaagtctcattcaaatgaagataagtatgagtaaaaggaatggtgaaccctgttttatttttcgcatacctgagtgtacttaccgccagcatgatgtatattttgaaatctctggggcagtggcatggtcacaaatgattgtcgatttctcctccacctccatgcagattgtaccggaggaagacgctttaaccatgccaactcaggcaagcaagttggtcatgcacacacatcaggtgcaagaaccttgtgccttgaaggcgtgatccattggcacaatgctgtagagacgtaggatacatttctttctgggcaaatgtgcaagtgccaactggagtggagcaggaaacacctagaaaagaagagggcatctcctcttgcttgtatgcgtgtaggtgttgcgggagcaagaagttacgcacagctaggagtggataaagtctaaaccaaggtggcacatgagctcgagagagggactaggtgtagccaggcagcatgattgctactagcgaggtgtatagccatatttcaaagacacgcacataatgcggtctttgatccaaatgtagctcgtcagctctcttgctcttttcttcttctcccattttttttcttttcttttgtctttcttttctcctctttttttttatcttcttttttttttcttttttttctagcaagctaggactaacaccaacttcaaaccaagatggccttggttgatggaactcgtcatgaaaagctcgtcgacctttcccccacacttggacttttgtgtcgcaagacatcaaaaaccaagtgtgtgatgtcggattctcctatcgagtgtgttccaatacccagggtcaccaaagtgtacaattgatgtagctacagtgttcttaggcatcgtatgaccctcgttcttaatctcaacctaaaatggttagtgaccaagaatacctgatggtgcatactatcctaaaaactggttcttgcttttattagaaagaaaacttaccatgataatccagggtatctcccggcagtgctttgtttatggtcacaagcttgaccaacgggacatcgctatgcaagattagtgccacaaacaaataggagatttgcagtatttatgataaatgtaagcatctacaaccatccttctaaacatgctagaaatgtggaccggaaggtggttgtggtcctcgcacagagacgcgacactaatcgaacaggactctagggattccttatgtgagcatgaatcctgggggattttgaaatagaaactttcatgctcatatgtggaatgttttctctcatcctccagagtcgatgtctcaagcttgtccgtggcctccttctcaagagatacatcgtgcaagaacctggttgtttcttgatgataaacaataacaacgctttgaggaccagagggacaaggcttaggcttgatcgagggtgatgagggtcgttccgtttcatgaagatggtcaataggttcagaagaaacgaacgaagatacaaacatcacctcctcgaacggctcatgcttgggatgagcctttgtattgctggaataattcagggtgtttccataatcttcataaagattaattactactactcgcgtaggaacttccttctctatccggagtcctagtactagagcacttagtataaatgctaaacaatgaacctgcaaagatggaaatatatcttactcagactaaataattaaataacataagaaaggaacatgaatgcttactttatagaagaagttctccgaacccggagcagagtataccgatagctccggtactcctcccgaattcctcctaggaagctacactcgtcgaggcagaagtcggatgagcgccaaacttctgggcactcctccagagcttcctctcactctctaccttattctaatgtataaaagatacaatagagcctcttgtaattcagctcaaagttgtgtgtgttggaatgagatgaagacctccttacataggctccaaatgacggttaggggcatgggaattgtccaaaacaccctgcaaccgcctctgggaaggaatccaagccgtccacgtggaagcagatggcgaacggccgcagaacgggttcggccgaattggtgggttctgccgaacccaaaaatgtgtcatcccggcctctcctttggccggtaagttgcttaatgggcccccaataacctgcaccatgttttggcccaattttaaatggtttttattgacttatggggcctccaattcgtgtaaacgtgtcctgaatgcgcagaggtgcattttgtcgcatgacggatgtgttttctcctcaaaatacctgcatacacatattcaccaaaactagtggaaatgattagtaataatacctaccactaagttggataccatgttttatttcattatatgtaggtattgacggtcagatattatgatttaaggaccgtcaacaagtatccgtttccacatcaacgggaaggaagagaagtttgagtttcaaccaaggacagaacaatgctccatggtcaggataaagtacgggccgaacccacagaatattcaagttgttgttggcggttgttaaatgccattctcataccgccaacatctgcataaagtcgagacaataaaacatccaacatagtaataggtgcttaatctcacatattccacaagtgttcgtgtatatttgtatgcagatgataaaccctgaagttgggaggaaaatcagactaaagtgaggagaattatgtatccatacaaggaggggttgtgaacttcattgaaacatcagtaaatcaacccaaaactccgagaaatggatagaggaaggcctaggaagtccaccaaccgaaggccagactaggagggcccagcccaggttcggccgaaccccctggttcggccaaacccttatgatcgccgttgatcccaggttttggcatggacgtcccagatcactccctgatggcggttgcggggcacttcaaacatttccccttcgccaaccgtcatacctacccctatataaagacatcatctcactcacttcaacacacacttccaagcttgagctgaattataagaggctctattgtactatattgtatactagaagaggaagagagtagagtagaagaagttggaagaattccggagttgtcggtaatattctcctatttcttttattatatttattactctgaattcaatataatattcttcttaagtaatttagatttatcttgtgagaattatctctttgttagttcctaaatagcatacgggattattgttcattataatcaactaaaatatagtgattgctttggtgagttataaacactaaagtagatattaattgcttagacgtggtgtttaggtaattattatccagtaattgctgcgtatcatacagtatgttgaggtaggtgtagaggtggtgatagccctcgagatcactgaagtccttcctgtccaggtacatagtagagcgacatctaggaacagcgggttgccaatgcctgaagaattgcgttaggattaaagttaagctttccctagacactgtttctcactagtaaatcctctctatcctggcctatcctttgcttggtgtccttggatgaaccggaggaagatctgaccacacacgttcccttggattcgatacccttggaatactacataggggaagtgctacatcggtatatccgtgcgcttgcggattttgtctgtaatcgtattaaataccaacaagcatttctggcgctgttgccgggggacggttgctgatcatttccgaacccagttcatcctcatatcctttttacttttttattctacctctacccctgctaacctggaaaagttgcgagacggattctgtcttgccttctttccagttactcgtattactgcccttcgagtagaaattctcagtttcaagcagatcgaaaacgaatcaatcggtgcagcttggtccagattcactaatttagtgcaatccggaccaaccctgcccttacccgagtatgtgcttctccaacatttccatacgggtttggataaggagtctgcattctatctggacataaccgctggaggatcgttcatgcacaaaacgtcgtcagaaggaagaacaattttgaatcgtattctagaaaatacttccttcatgacacaatccaatgaaccccagcaggaggcattcgtgtccaagatagaggaacctctaatgatcgagccacgcactgaaccatccacttcagctagctcgattgatgagaaagttcttgagcaaccgtccgtcgaggatgaagagattcagactccggattgtgccgcaattctgttcatggacggcttcgacgaagactacggcaataccctgaactattttagcaagaggaaaccactcgttcctttgccacctcccgatcctatggaactcgggttcctacgagaaactgtctgggtgttaacatccataatgagcgatgaatggctaagggaggcagagctttcatccgaagtaattcggataaataccgctccccgaatcattccttgctatatggaagggaacgacgtcggtattctctacagtccaattgtcggggccaacctcgtctctgagtcttttgcattcgcttatttaagcgataaggcagtgaccccaacaaacaaatttttcaaacatccgaacggaaatatcattggaggatttgggattgtacaagatgtacctgtctgctttgaagacagggaggcaatcttggatttccacatctttgaaatccaaggctttgacatcctaatcatattgcccattgagcaactcctaatcaacacaccccgattaggtagcctcaaaataacactgggagaaaatgtattctcaattccattctcacgggcaaggatcaccttgaccgaccctctcccagaaattgagtcagcggaagaggttaccgcagttccccttcatgagtctcccgaagcccttttggaagatgagttccccaattttatcaaagaagaagcagatcccggtgagactctcgacctgccaatcatggaaccgccacctcgacctccgcttgagcttaaacctctacctccaagcctacgatatgctttcctacataatggcagagaggcccctgtcataatcagtgacaagctctctgaagacgagactcaacgtcttctcgccgtattggaaaagtatcgttctattcttggctactcgcttcaagatcttagggggaacctcaacgatggctcaataatgcaatgcgagaagttgtaaagaaagaagtcttgaaactcctgcatgccgggattatttatcccgtaccatacagtgagtgggttagcccagtccaggtggtactaaagaagagaggaatgacggtcgttgcaaatgctcaaaataaactaattccgtaacgaaccgtaaccggatggaggatgtgtatcgattacaggaaacttaacaaggctacaaaaaaggatcatttcccgctacccttcattgatgaaatgttggaacggctggcaaatcattccttcttctatttcattgatgggtattccgggtatcatcaaattcctatccatccggaggaccaaagcaagactatgttcacatgttcgtatggcacctatgcataccgtaggatgtccttcggactatgtaacgctcctgcatctttccaaagatgtatgatgtatattttcttggacatgatcgaagacatcatggaagtcttcatggatgacttctcggtctatggaaagactttcggtcattgtctgcaaaatttagacaaagtcttacaacgatgccaagaaaaggacctggtgcttaattgggaaaagtgccacttcatagtccgtgaagggatagttcttgggcatcgagtgtccgaacgaggaattgaagttgatcgtgctaaaatagatgttatagatcagtttcctcctcctgtgaacatcaaaggaatctgcagcttcttgggacatgccggcttttatagaaggttcatcaaagacttctctacaatcgctaggctgctgagcaatttactagccaaggatgcgccctttgagttcgatgatgcgtgcctaaaatctttcgaaattctcaaaaaggtactcgtttttgctccaatcattcaacctcctgattggactctgcccttcgagattatgtgtgatgcaagtgatttcgccgttggtgcagtcttgggccaaaccaaggataaaaagcatcatgcaatctgttaggctagcaaaactctaaccggagctcagttgaattatgcaactactgaaaaagagctgctcgcggttgtttttgctatcggtaagtttagatcttacttagtgggagccaaggtgataatttatactgatcatgccgctttgaaatacctgctcactaagaaagatgctaaaccacgcctcttaagatggattttgctgctccaagaatttgacttagaaactaaagataaaaagggagtagaaaattctgtagcagatcatttgtctagactgcagatcactaacatgcaggaacaaccgataaatgatttcatgagagacgacatgctgatgacggttcgtgactctaacccgtggtatgctaacatagtaaactacatggtatccaagtacataccaccaggggaaaataaacgaaaactgaaatatgaaagtcgccgtcatatatgagatgagccatacctatatcgggtctgctctgatggcttactacgaagatgtgtgccaactgatgaaggacttaagatcatagaacgatgccacgcctcaccctacggtggccaatacggtgcattccgcacccaggccaagatttggcaaagtggtttcttctgaccaacaatgtacgaagactcaaaagaattcgtcagaagatgcacaagctaccagaggcaaggaggaatcactgctcgcgatgcaatgcccctcacatacaatttgcaaatcgagatatttgatgtgtgaggtatagacttcatgggacctttccctaagtctcgcaactgcgagtacattctggtggcagtcgactatgtctccaagtgggttgaggctataccgtgcaccgccacggatgcgaagcatgccaagaagatgttcacagaaattatcttcccaagatttggtaccccggaatggtcataagtgacggaggttctcacttcattgacaaaaccttcagagaccttctacgagaaatgggagccaaacacaacgtggccactccttaccatccacagaccagtggtcaagcagaaacatcgaacaaacaaatcaagaatattctgcaaaagacagtcaacaaaatgggaacaggatggaaggatagattgccggacgcactgtgggcttaccggacagcatacaagacacccattggaatgtccccatatcagatagtctacgggaagtcatgttgactacccgtagaacttgagcatagagcatactgggccatcaggaattggaacatggattttgagggagcaggagaatggagaaannnnnnnnnnnnnnnnnnnnaggaatggagagagaaggcttaccacaatgcgaagatatataaagaacggacgaagtgctggcatgacaaaagaattgaaatcaagaaattctagccaggagacaaagtgctaatgttcaactccagggtaaagctttttggccacggaaaattgcgcagcaaatgggaaggaccgttcaatgtcatcgacacctctttgcaaggggcaatcacactccgtgacgattcaggtaacatatttaaggtaaacagtcaacacttaaagattttccttgagccaaatgaaactttagaggaagaagtggatgttattgaattaattgtttatgaaccatggtgatctcatctaatgcatgcttaaaaccatgtatagttgttatttttgtgcttagcttagaaattagtggcaataggaagaaaggtggcggccagccgggcccaccagggcggccgaaccagggcagcacccgttcggccccatttttgaatgatagtctcccccgctagtcctgagtctattttgatgccagtttggaggtagaacgatcggatcacacccctgaagctagttcctctctttcttcctcccttgcaaaagcttctctattcaatctgccattcacccccaagaccttcgatccaaattctttgaacctctaatggctagcaaatccttgattccattcatcggctcttcatccaattccacatacaacctcaccggagagccgacactggcaaatcaattgattccggtggaagaatacacgatggaaggggcgaatgctgtatgggctcaacccctttagctgtgccaggctccccagcaattttggagccgattagcgagctccctggttcggccgaaccaggggttcggcccctcgttcagcagagcgatccctctcccctcgccatgtcacaaggacaaaaattcggggggattcgcctgcgcgatggccgacgacgggagagttcggcttgttaaaggcacgacgcctttccgaagatgacgggaaggccgcgccacgtcccgccgagcgttatgtgggcaccttgttcaccaaagcaggggatgaggtgctccacaagtataccacacccaccactactccatccactccgaaggaggagcgattccgtattcagggagtgcgaactcccggcggtgggtatggtaagggtttactccggccattgacggcgtcggaggagggggcagcggaatcccgtagccctccacctatgaaggtgaagcgtcatttgatgccccctccaattgtgagggctcccagccaatatcaagaagatgaggtgaagtcgctggagccctcgatccataagctcgccgcacatgtgaagaaactccgcaaggagaacatagagcttagggattgcaacgcggagctaggggtagagcttgctgaaattagaaacaatttcgacacccttagtctcggtttgtgcgcttaaatcaagcgtgcattcgtagagctgggaaaggaaaataagtattatgctaattagtcctttcccatgaataaaatggtagtaggtgcttggtttttattttccaatcatgtaagcacttgctatgaataatgtggcacattggtgttaaccccaatgtttgccaaggtttgtttttgttttatgtttaataaagattcaggttttgaataagtgtggggagatatcccagcttctgacgtgcatatgctctgaaaattgatgaaatctctgaacacctgaaagcactcaactctgcagaaaattgcaaagggattgggcaccagagtggttcggccgaaccaagactggccccaacctctcccaatttttacaggtaagcaggtgagcacgtcttttatctgtatatctccaccatggtatagtactagagctgaaaattcagaaaacaattggttcaagcataaatgaaagataaaacttccaactcatgaaattcttcatgtgattgatcttgtatattcattattcccagctgaacttgtgtttgtgaacaaccatccatgtttagggaaccttatgcatctaagtaattgctatatgagagatgattcgagatgaaaggaattcttgcaactcttgttatgactcttgggaatttgttttcaaaataaaattgttttaaaagctcaatcctctaattgacttcatcttatgcctaccaagaccatatgcaagtatatcattgatgaaccttatcatgcatatgactgcttgacattatattgagctttgtcaaattcgtgtgactcatgttagatatccttcatactctcatgatcaagtggtcaattccactttcatttccacatataaaattaagccaagcttctacactgaaagttggctttccacaaaaatatccattcaaataaactcctacattgaattatactttcttctccttgaaaagttcttggcaaaaagaaaatgataaaaggagggaaaggcatggctaaaaaaaagagaaggaaataaagcttgctctcaaaacattgagcaaagttggaaagaaaaatgtagccatgccccttccacaatcatgccaagagaaccaatttggagagaaagtataggaaaaagggataatcatttctttattccaccattccacaacatattttactttttcattttccaccataaataaagacccttgatctaggagtatgatgatcttcttgagtccatatttttggctttgcaatatatatgatgcaggtatgtcacagtttatccctaccaagctccacatattaaccttagaataggaatgaattatggcacattttgctttggtaaggatccaaaaagaaaatatacattcttgagagacaagagaggaagtcaataggagaagagcttatttgcgaaaatttataaaaaaatcccatgagtgtaacagagaagcaagaaggactagaatcaagatcgttccatttatcaattactcaagatggtaagatagccactgataaagttcacaggtgcaggtatggttgtgaatgatttatatgcttgattcatatcttgaagaaatttattctacactaacctttactcagggacgagcaaagggctaagtgtggggggttgtcacgaccggaaataacccaacgggcgttccttacgtgcgtgcattattccttgtcccaggaggcaaggtacaccaaaagttgatacaattcagagtttaacaagcggaagcgtaattaattaatttattacatgggcggcgaagacccagcacacaagaagacaaacgaaaaacagcggaagactagggcgacgaccataggcgtttgacggcaggcacgagctagacaccaaagccttcatcttccaggggctcctcttctgggtttgggaaaaattgagcaagactgagtacaaccaccgtactcaacaagacacacccacaagtgcagaataaatgcaagggagtacaagggggttataatataaagggttagggtttgcagtaaacagcattaaaagacacttagttgctcaacgctattttgtaaacacgattctagagctatacaatattattaaacaaggccgtgaacccacacgaacctgccttaacccaagg

SEQ ID NO: 24198 - DNA, 1298 bp, Oryza sativa
gacatagtttccaacccatcctagccatagacaagagtaccgacccaaccccacctacggcgggaacctctgggacaggtaggcaggactgagcccctagtagcaggacaccggccctgtgccatgacatctcgactaccgggccgcagctcatgtagccttcatttgccctagagatgtccatcgacccccgacttcatccatctccatccgtgtacttttgtttataaccagactgagccacaaactaagccttacccactagacatgtggaagtacggtagtgctttgcaacagaggcccgaagaccggtccttatatggccgaggtgctactatcaaaaccatgcaccccaagcccagcctaaaaccattttgagggttttgaatagagggggaggtgtgaatccaattccacaataatccaaccattccatattgtccaggtgatgagaatattcccaaagtctagagttgtaaaaccacctaatgttgcctaattaaccagcgaagcatctacctaaaatcatactagtggtaccatgagtagagtgtctactagttggggttttgtttattctagggtgaacaaggaaatattaacaataacaataataaggtcataacaaaggtaaataggcatggctagataaaacagtgataacgcgggaatttaaataaagcgataatgcaataatttaaatcaaaataattttataaactgggattcaatatgttcaaggatgatgtgacttgccttgctcgctttcccaaccgtcggcttcaacttccacgaagagcggatcttccgaagctgcagcgtctacaagaccaacggaaaagaaaaggcttttactctaataaactccatataacaagcaggaacaaagcacaaaaatgggttcttgacttcttaaggaaaaattagaggcttgaacggtccaattccgagttcaaatggccaagttatggctatttgaagtttatatgctctttaagtgaatatttgcgaatttcttcatttaaattttaatttaaaaaaaagtttattgcgtcagccgaggggagggggcgcgcggaccgggtccacgggagtggggcccacgcggcagcctcacggtccacggtggaccaggtgcacccgggctcacaccggccgacgccgtgggccccacgcgtcagccgcaccagagggcgcgggcggctgacggccgggccccacgcggcagccgctcggtgcgcccgaaggcggccacggcggcgcggccggcgggaggcggcgcgcccgcgcccctatgg

SEQ ID NO: 24199 - DNA, 653 bp, Oryza sativa
ccccagttgagttttgcctgtggagtggagctgaagccccgcaaggatcgcctttttccgctgctgtcgttctgttttggtctgaggactaagtgcctcttctgtaagtattttacgctttatttacgtttagaactgtatattacttgtcgttttgtgtaccctggctggtcctggacaggtatttaatacgcaaaatagtctggaaatttgggttaaatttctgggcgtgacataagccgaacaatagagcattgtattcagcttgattatttgtacaataatattccaagcgaaccgatgcttcataacacatgccattaggtgaaaacaaaactactcctatgccttgaccttctttgcaaaaagaaccatcaaaataaatcttccaaggtataacttcaactaagcaaacctctccctcataagcaatatctatatgatggtctactataaaatcacatacaatttggcctttcatagattttaatggttcataagccaaatcatattctatcaaagcatatgcccacttaccaattctcccacttagaattggcctttgcaacatgtgtttaataacatcggcttgacaagtaactatgcatgtactagataacaaataatgcctcaatttggtacaagcatagtat

SEQ ID NO: 24200 - DNA, 1659 bp, Oryza sativa
tcgatcgccataaccgcgggcacggctattcgaatagttttactctggccagaggtgcacaactgtacccacaagacacaacccaccgacatgtcaccgcgtcatcatgtgcccatgatgctcacgtcaccatgtcgagtgattgtgacgagacccttcgcataaccctcccctaaccatccacaccacgctaaggtttcacccccactcctcaaaaggcagtgggcggtcccctcttgcgccgcggtgaatccggcagctagacaaccggacaccccggccgacccaactccatcacgcccaccctcgccaccggtgcctaggaaagggtcgagctatacttcagatcaagcggttacccactcccgcttgtggcaagcgctgtaagacttccagggtttcccgtgaaccggtccttaattgccatgggtgcgactcacaaaaccatgcacccacagcccaccattcagtcgcattttagttggataattacgaccatgaaacatggccagatgtctcgagcacgcagctcaacaagatactagaatgtctaatactgcaattatcccatcgactgagctagtggtaattaagcatggctaagcatatagttctagctaggtcatcaaagtaacacaagctaggcgatttattacccacggttgacaaaggacagatatcaagtaaacatggcacaagcgagcagataggtaaaaccctaaccccatgtaattagcaaaacatgcatgtttatttgcaaacagtaaaacatttataaattaggatcaacatgctcaaggggaatgtgtgacttgccttgcttcttcacttggatcttctgaactcttatcctcgcgaccgcgaacttccgaaacgacagattctacacgctggcacgcaaaacgaggaaaaactctaataaaaaccaaggaaacagtacataaaaactaaacaaacatgtagagctcaattttagatgaattttgcaagttgaatggctcaattcagagttcgaatgaattagatatgaattttagaagttttgagccatttaaatgagtttctagaattattaacgaattatgacgcaattattatttatttttccaaaggaaaagagggttgctgacgtcatcaaaggggaggggccgcgccggcaagcgggccccaccggtcagcgtcacaagggcgccggtccaccgtggaccgggaccaccgaggcggtccaccgccggtccacgggaaccgacggcccggattggcccaagccgatcggacggccacggggcgcgcggctggggcacggtcacggctcaaagccggccagccgagtgatggcgcacggcagcgcggccaccggcgacgacggccgacgacggcgcggggagcggcagcgcatgcgggcggtggcggcgcacgctagggagcggcggcgcggcgcggtaaggtgaggcggcagccggctgcccggcacagccggcagcggcgcggagcgcggcggcggcgacccggtcggatggccaccggcgacggcggcgcgtcccgagcaggcacaggaggtggccgaccaaggggaggaaggggagagggaggggagtgctcaccgagcggcacgaccgcaaacgggcggccgacggcaaggaacggcggcggcggggc

SEQ ID NO: 24201 - DNA, 1438 bp, Oryza sativa
gggagagcagtacagggcgcgagaagctcgggaaaattgggggaaatggaaaggggaggccggggatgctttttatgggcttggagtgacgggatcatgctcgagagaggtggcaaccggccggcgagatgggcggggcatcgtggggtggtggagaggttaaccggcggcgattttcatggggagagtggggaaaagggtggaggacgtggggcgacggggtcccacgaccggcgggcttgcgcgcggggtggatgaggtcggaaacggcggcgtcgtggggtggctcgggcggccctggcggttgcagccggccaaccagaggtaggaggaggagctgacaggtggggcctcgggtcccacctgtcggggagagagagaggggaaaacgggcgagggaggtaaagcagacttgagggagagagagagccgagcgggccgagggagaaggccggcccgagagggagagaaaaagggcgcgtgggccgcgggagggaaggaagacttgggccgaaaatggcccaaagagaggaagggggaattttatttgttttctttttattttaattgatgaaatgaaatttgtgctattaaaactatttctcgagctccgaaaattcacggaaaattccggagagtacattagggcacaaagaatattacaaaatattcccggccaatgatttttaaaggaaatttttaattccctcaataattcacttgattaagttgatttaacttttatttaatttctagaaaatgtattattaattgatttttattcccgaacgaaaatcggggcgttacagcttacaagttatggagatggtcggagctaaacatgtggaggcttttggtgattcggaattggtggtgcaacaagtcgccggagtctacaaatgcttggacggatcactaaataggtaccttgattaatgtttagatattattgccaattttgataattttgctattagacatattgctaggcatgataattctagagcaaatgacttggcacaacaagcatctggttataatatgaaaaagggataatttctggtattagtagagccggtgcttgattttaaatctttgtgcgatattggcaaaactggagaccaggggcggtctgaccggcgttgcacggccggtccgaccagtgaccaggggcggtctgaccggccgcatgtcgccggtctgaccggcgaccccgtgcggtctgaccggccctgtgtggccggtctgaccggttctggacagagcgctggggggcaagtttcaatcaatttggaagccgaattaattgtgaattcgtacatttgtgcctaggaaacagaagaagattggagaattcctttgattcaatatttgaaggatcccacacttaaggttaatcggaaaattcggcggcaagcgttcaaatacacattgcttg

SEQ ID NO: 24202 - DNA, 4050 bp, Oryza sativa
attgcaagcatcactagttctcctctattttagtaatattgacggtcgaaattgatcgataacgaccgtcaacaatgatttcaccggtaggattgcaagggggtaactcctcctttttatattagtatagatgcagctcgactgtgatcaattaaaaaatcaaactaaattcacagataattatgataccataacactgataattacttcattgccatagtttcgtgccaatataagcaaatgcacaagcttgatttctttacatgcatgtagtacaaggtgagtgttaggtcaacacaagaagcatactttattttacgtacatcgtacggtatattttctattgcataatttgttgaaacaataaatacacaacaaataatggaattacacgtgcaagtttgatgtggattagcaagttttcattattggtcattgtggtttcctgatttttctttacacatacaccaaaattattttttgacttaaagtattgccatggctttgcctcgcaatatgattttcatttaaagcaaaatatttacaaaacacatacaccaacatttattaaccatcttgaaattttgatattaaagcatataatttttttggttttcataattcttcacatacatttattctcacattgcaaatcatcttgatattttatttcagtttgaaatctatcattaacaaaacatttagagtaggttgtatatattaagtttattttttatgttatctaggccatttgtggattctgtacacacatttgtacaatatttgccgatttttattagcatatgctcacagttttgagtgattggtattcaactatctttgctgttccccattttactgcatgattgcattaaaacacatgccatacattgttaaaaaaagatactcctatgtagttactcctacttttgaatgaatagtacactatttggttggtacaaaatatacttgtgagtgaaataccataacaagagctatgcccccaatctaatacgagagatagtaactcaaatcaagaagaaaaccattgtgtaaaaattgtgtgtaggtacttttgatatgaaatgtatttgcatggtaaagtaaaattatacaactctataaaagatactcccactatcataagaattttatttacagagaaacacaaaatagccatgtagcaaatgcgtgggattacgtctagtatctcaaaatattcagtgacaagtttattgcaatactccatattccatcatgttattttaatatagttgaggacctacctatacaaatttggagttttcaattaattcaatgctaagagcatctccagtagaggtcctaaacacaacccctatactaattttgagagttgagactaaaaaatcaggtccaacaaggcccctacagagcatctccagtagaggtcctaaacacagcccctatactaattttgagagttgagactaaaaaatcaggtccaacaaggtccctactaaagcccctaaagtaggaaagcctccaaattatccccttaggcccccagtccctggggctttctccgcagcccccatccgcggcagagacgcacgggcacttcttttttcgtgcgaaatatcctgctagcggcgcctccacggatctacgccgctcctcctggccggcgccctcctcccctgccggcgccctcatccttggtggcgccctcctccctgcccgtcacactcctccccggtaggcctcctccttcccaacgtcctcctccttgccggcgcggcggcaccctcctcccctgtaggcatcctccctggtgccctccttcctggccggccacctgcccacccagcaatatcctccctagatcctgacgcccttctccctggcgctagttgaaggtatcatgttttcatttttccagtggatttgtggattgagttatatggtagcacctagcgtgttcgagagaaaagttgtcagtacgaaaatgtatatttggagaagaaatgggtaggaactaaccttccacgatgagatggttttgtttttttattatgtgattttgttttcctcaaatttttgactattaattaatacaataattaatctcataatccatatgtaatacaaatccgagacgaactcgaatccaactctttccaaagcgatttagccaaagattccaaaggagaaaaggtagaggagatcccggagattgtttcccctctattgattcggccggagaaggaaaggaacggccggatttggaagggaaacggcggcggcgcgaaactagggtttcgggcggcggcggccgaaggtagacgacgactgacaggtgggccccacctgtcagcgacagcgagggcgcgcgcggctgcggcggactgggccggctgggccgaggagagagaagagaggttttgggccgaagccaaaagaagactttttaaaacctttttcaattaaaattatttcttaaatgcaattccatttattaaaaatactttcttagctcaaataaatcccagaaaaatctaggaattatagaattaagcaaagtatttaaggaaattttatctgggcccattttatattggaatttattaattaaaaaattagatcttcttttcaagactttttaaaattatttctaaaaattccaattaaacaacaatttacatattttgaattttcagggtgtgacaaacctacccccctaaacagaatctcgtcctcgagattcagaagaactggcgaacagatgcggatgagctgacttcaattcatcttctcgttcccaagttgattcttcttccgagtgattactccactggactttgcaaaaacggataactcgatttctggttcttctctcacttgttgccaagatacggattggtttctcaacataggtcaaatcctcttggacttctatctgttcaagattagcttcttcggtaggtacccttaaacactttttcaattgcgacacatggaacacattatggactcctgccaaagattgaggtaactccaactgataagcaacctctcctcttctactgacaatcttatagggtcccacaaaacgcggtgccaattttcctttggtatgaaaacgatgaactcctcgaaaaggcgtgacacgaagatacacataatctccttcttcaaaactcaaatctctacggcgattgtcggcataactcttatgacgagattgagccactcgcaatctttcctgaattattttcaccttttcttctgcttcccttaggatatctgtcccgaaaacctgacgttctcccgtttgatcccacaaaagcggagtgcggcacttccgaccatacagtgcttcgtaaggagccatctgaagactagcttgataactgttgttgtacgaaaattctgcatagggtagattcttatcccaacttccaccgaaatctagagcacaagctctcaacatgtcttccaaaatctgatttaccctttcggtttgtccgtctgtctgcggatgataagcagtactaaaattcagcttagaaaccatctcttcctgaagcttcttccaaaagtttgaagtaaactgactgcctcgatcagacactatcttcttagggacgccatgcaaacacacaatccttgccatatacaattccgccaatcgacttccagaataagttgtctttaccggaatgaaatgagccactttggtaagtctgtcgactattacccaaatagagtcatggcctgatgacgttctgggtaaaccagtgataaaatccataccgatttcttcccacttccattcaggaatcttcaaaggctgcagcaaaccggcaggtttctgatgttctgccttgactcgctgacaaacatcacatactgctacgtattctgcgatttcacgcttcatacttgcccaccaaaatctttccttgagatcctggtacaccttagtactaccagggtgaatggagtataaagtatcatgagcttctttcagaattgcatcttttaaatctttgttgtcggggacgcaga

SEQ ID NO: 24203 - DNA, 6454 bp, Oryza sativa
cattgcaatagcctttcctgctaagagcgtctgctacaacattagcctttcccgggtgataatgaattcccatgtcataatccttaattaattccaaccatctcctttgtctcatgttcagatccggctgagtaaagatatactttaaactcttgtgatcggtatatacctctgtacgagtaccgaaaagataatgacaccaaatcttcaacgcatgaactactgcggctaactcaagatcatgagtagggtagttcttctcatgcggacgtaactgacgagatgcataggcaaccaccttcccatcttgcatcaaaacacaacctaacccaagtttggatgcatcgcaatacacttggaaacccttctttggatcaggtaaaatcaaaataggagctgatattaagcgacttttcaactcttgaaaactctgctcacattcttccgaccacttgtacttcacatctttctgaagcagtcgtgtcatgggcttagcaatcttggaaaaattctctataaacctccggtaatatcctgcgaggcctaggaaactgcgaatctctgaaactgtcttcggttgtttccagttggttacggattccacattactaggatcaacggcaactcctcctgctgagatgacgtgaccaaggaacttcacttcagacaaccaaaattcacacttgctgaacttagcatacagttgatgctctcgtagcttctccaatgcaaggcgaagatgttcttcatgttcttctttggttcgagagtagataagaatgtcatcaataaagaccaccacgaacttgtctaggtattccataaacaccttattcatcaagttcatgaagaaagcgggggcattggtaagtccaaaagacataaccgtacattcgaacaatccatacctagtggtaaaagctgtcttaggtatatcttcctctttgattctcaactggtgataccctgatcgaagatctatcttggagaaaacggtagcacctttaagctgatcaaacaaatcatcaattctgggtaacgggtacttattcttgatagtcacatcatttaatgcacgatagtccacacacatcctctgggtatgatctttcttttccacaaaaataaccggagctccccatggtgatgaactcggtctgatgtatcctttctgaagcaaatcgtccacttgcctcttgacttctgccaactcattggctgccattcgataaggtctcttatggattggagttgttcctggtaccagatctattctgaactctatatcccttttgggcggcattccaggtaaatcatctgggaacacatcgggatactcccggactataggaatctcttccaaagttatttgattcagtcttgaccttaaagactcagaagacaatgcatgaacagttaccactcgaccatcattactggtgagagttacttttctgttggcacagtctatcacacctctatgtctggctaaccagtccatccctaggatgacatcaaggtctttggattctaacaagataagattggccacaaatggtactcctttaatttctattctgaccgaggggctacgctgcaaagagagtgcttgattacttggggtactaaccatcaaaggatgtctaagatcttctacttccatcccatgatttcccgcaaaactcatagataagaatgaatgtgtagcacctgaatcgaaaagtactgttgcaggaactgagttaacagggaacgtacccaaaatcacatctggagcatcttgagcttctgcagcagcgacatgattgacacgggcctttgatgctggtacagcagagttactctgggcagggacaaccttcacgcgacggggcttcggacacttgtcagcataatgtcctgggtctccacagttgaaacacaccacgggcttgctgccttgctccctcttggcaggctgttgctgtgttggagctgcaacaggacgtggagcttgattgcggatgttgttgccagcattgttgttgaagaactgacgctgcggacgaacaacagacgaagaacctccctgtggcatagactggggtcctaaagtaaagcgcggcttctgattactcccctgttgtgccttgaagtgagcaatccgacgtttcctctgctccatgcaattgtacttgtcctcctgacgtatagccttatccactaatttctggaaatcaggataatctccaaccatgagtgggtaagaaagctcgtcattaagtcctcccaaaaacttctcctggcgctcttcatcattgcgcacatcttccggagcataacgagcaagacgattgaactcgtgcagatactccgtaacagagcgagatccctgagtaagcgacctgaactccttcttcttgagagacactactcttgatggtatatgcgtcttccggaaagcagcagtgaattcaagccaagtgataggttcagcagtagtcctattcaggcggaagtgatcccaccattcagaggcagagccatgcaactgatgtgatgcaaaagataccttctcctgatcagtgcactgaagtaaatccaacttcttctctatggcatgcagccaatcaccagcttcaacaggattagtggtactagagaaaataggcggcctcacacgaagaaattctgctaacttgttctggggaggtgcatggttatttccttggttctgctgattctgaagttgctgcatcatcatgttcataagctgtgtctgttgagcaagaacttgggccagagttgggttctctccattgttattgttattggggttgttgggaccattcccgttgctgcgagtattcaccatctggcaggaacagggcacaagaagagaaaccgggggaaaactacttaggatagagaattactttaacttttattgatcttaactgagtttcattattacaaactgaagactctcacaccactaaactcaccaacttcctaacactcaaaagcaaacaaacgcatgcaattacatcccaccactgatgtaaatcacatgcgagccacacacaagcaaacctaaagcaaacaaactaacacaacgatctaagacaacgacttaacaagtcactctagttcttccaagcatcggaggtcgattgaaggctcgttcggctcgtcttcatcatcttgggttgctacccactcaatcttggaattggtgcgcttggattcttcttcttcatcacttatgatgatgaccggaggatccgcttgggatgggcaacttctttctccaccacacgaacctttggcgccaattgatagcgagggacgaatagagctctcttccttgcggtaagacgaatcctggccttctgcggtggtgcttctcccttcaatgcggctagctccttctccaaacgatccaccttgtcttctagcttgcaaatcttaccacgattccggtcttcacgatcttgagctgctaacacagtctccgcacgactttcatccatagcccacagcatctcaaccaaatgccttgtggtagcatcattctcaattccttcagtctcaaggtagctgccacggtcacttccctggggttgacgaggatggtagcgatactcagtgtcggccaactgatcactgtagctatcacggagttctcctatggcgatccttgccacttcctgacatgcatggacgtagtttcttcctccagcttcgaacatcactgaggggacctcttcactattgctgtttaaggtgactttgactcggcacttctcttcatgacgatcatgaggaatctgggcataaaaaggggcagtcccaaatccaatggcaaaggacatcgtacgcaactcctggacaaaaccctcaacaccaaacaggtactcaggcttgtagcgcggcatctaaagacaagtgaaaggagagagttaagacatctatccaattaacagcacaagtttttggattaacttgaataaaatttgaaaatcaaagtaaaaggtaagtaaataaagtaaaccaaacttgcaagataatttgaaatagttgaaaacaaggttacaaattttgtactttttaacaacaagtttcaaaagaaataaaagaaagttataaaatcatcatgctaaatttattttattgcagcaagattaaataaaacaatattgtaaaacttttgctgataaatgagccattagtacagtaatggatgtacagtactaataacactggaataaattttgaatgagaactattaaaagagattatgaaatgcatgtgccattagtttggtttaattaaaagagaaagggaggagaacagttctacttttccaatatttttagagggcttctatgggtaaccatttggcataacctagggtcaaggggctctgataccaacttgtcacgcccggaatttctatccaaaattccaaacgcttacatgtgtgtgaaccctcgtccaggaatcagccgaggcacacaataacaaattgataatagagtacaattattactctaattaataagcgaataaaatgtcattacagaggtagatagttcctctcaaacaataaagatctaagcagcggaaaataaaataaacggcgcagacggctccactccacaggcagcttgaccaaggctactcctaaacctccactccatcagcctcattgtagaactcttcctctgatgaatgattgcaaggtgagtatatgacatactcagcaagccacgcagcaaatatgcaagtgcacaggataacaaaggatggcataatagggtttcatttgcaaaagcagcatttagcaaacatttcagaatttaacaaaacagttaagtaatttaacaatattaatccaacgctatacaacataccctgttgtataggcccaaccattctgaacaaccatcccggctgcacagttctatctccaaaccaggaatgtaccattccaaaccaggagctaatcaaattattaccaattatagcatcatttactatggtgagaagtgtgaaactaatcacgaaagacattgttcgacccgcccataaccgcgggcacggctattcgaatagttttactctgatcagaggtgtaccactgtacccacaagacacaaccccacatcatgtcaccatgtgcctcaataccaccacggtacctcggaaaggagttgtgacaatacccctcacataacacaatccactgcagcgcaccttcctggatcataatcacccccttataaacaaggcatggactccccagcgacccccgtgggcttatctccgccacttctcagtctggtgccccgcaatgaaccatgctatacaaaagataaagccgttgcccatgctggcttgtggttggcacgataaatgtttcacaaccgaaactcgtgaaccggtccttaattgtcatgagcacgaccatcaaaaccatgtgctcacaacccaccattatcaggttttagttggcacattaattaattaaccaatcacgattgtccatcgtgaactatcaataagccatcatgaaataatagtgaatcattagttatcccataagtgtgctaaggtttctaagcagggctaagcaattatatctaatatctagttgaaccaatataaataaagctcaactagtcaaattattataacccaaggtatcaaggaataaagtaatcaagaacaaaagggctataacaaacaataggttaattccacccaatgacattcgaaaataaatgcaatagttgaaaagaaacaatagctttaaataggatcaacatgctcaaagggttgtttgggatctgtgtgacttgccttgctggccttggaactcttcaaactcttctccggcgaaaacggactctccggaaacgacggaatctaagcagaaaagagcaaaatcaccaaaacagtacataaacaagcatgaacagtacatgtggatatttttaatgtgtagatctcaattttagaaaaatttagagacttgaaccaactaaatcggatctaagatgaattagttatgaattttttaaagatttaatcggattaaaacacttaaatcggttaaaattgaattatgacgcaataatgaattatttttgaaaaggaaaagagggtttattgcgtcagcggctagggttttggtggaccgagcgtacgggcggcggttcacgcgaacggacggccgagatcgatccaatccaaaacggacggccgagatcgaacggtccacgaccggctcacggcggacgaccccgatgacgtcggcaatgacgtcaccgacagcggcggcggctcggcggagcggacggctcgggcggcgcatgctcgccggcgaacggcggcgcgaggacgcaaacggagggcaccagcacgtagaggacgacgcgacgaacacaccggtgaccaaaacggcggcgga

SEQ ID NO: 24204 - DNA, 2664 bp, Oryza sativa
aagaacaaatccgagatgaactcgaatccaactctttccaaagtgatttagccaaagattccaaaggagaaaaggtagaggagatcccggagattgtttcccctctattgattcggccggagaaggaaaggaacggccggatttggaagggaaacggcggcggcgcgaaactagggtttcgggcggcggcggccgaaggtagacgacgactgacaggtgggccccacctgtcagcgacagcgagggcgcgcgcagctgcggcggactgggccggctgggccaaggagagagaagagaggttttgggccgactttcggcccaaagccaaaagaagactttttaaaacctttttcaattaaaattatttcttaaatgcaattccatttattaaaaatactttcttagctcaaataaatcccagaaaaatctaggaattatagaattaagcaaagtatttaaggaaattttatctgggcccattttatattggaatttattaattaaaaaattagatcttcttttcaagactttttaaaattatttctaaaaattccaattaaacaacaatttacatattttgaattttcagggtgtgacagctaatatggttttgggaattgtaagttttggatagtgctatatggttttcagtgtggtttttaatatgcatgactttgagacactatgccagctgaaatcttgtgatcgtattctagagggtatgggtgtagtgctgcttaatttcctgagctacacaattttatttgtaccgacgttagttatatgcaggttcttcgagtagactgttaaaaaagagaaaaaaaataagctgctttggggtgctatatggttttctttttaattcaattttgtagagctctagcataacctgttctaaattctaatgattagaaaaatttgctaccattatgcattctaccaacatatattagctagtatctgccatttttcctgagattgattggagaagttgtcaatttatctacttattgcagtgactagattgtgatggcaaatgaatgtgattcctttgtgtgcatgatgtccgaagagacccatgttgaggcatattccttgccaatgcaaaatgaagaccttcatacttcaacaaatggtgcaaaaaggaagagccaaaagatcaagcaactttaatcgtaaggaggacattcaactgtgcatttcatggcaaagcattagctcggatcctattattggcaatgagcaaccagggaaggcatattggcaaaggattgcagagcactaccatgctaaccgtgattttgagtctgataggaatgcaaactctcttgagcatcattggggtaacattcaaaaggaagtaagcaagtttcagggctgctacgagcaaattgagcgtcgacatccaagtggcataccacatcaagagcttgtaagttaaattgttattcattattattaataacaatcttgtatgtatgtgaactaacacttgaattttgcttcaagttcttgaagccgaggcattgtattcatccaatgcaccgaagaatagggcatttcagtttaatcattgttggctcaagttgaggaattctccaaagtttcaaactctagaatcccacaagaggccaaggtctaggaagtcttcgaccctaattgagagtgctggtgaagaagatgaagaaggagatgatgctaggaagagtacaactcctgatttattacagccaagtgctaaaaaaagaccaatgggtaggaagcaagcaaaggagaagatgaagaatggagaagatggaccatacaaggaggcgatgaaagatttgcttgacgccaaagagaaagaagctaaagtgaaagaagagagatggaaggaaactaaggagattcaagagcgcaagctcttatttgctgagcgtaagttagtgtgggatcaagaatagaagatcatgttttgtgatgtttccatcttggaactagatgtgagaacatatgtgttggctatgaggacacaaattgcagcttcaaaggtggctgccctcaatggtggatttgatggtagtagtggctttggaggtgagtttggtggcagtaatggagaagtttgagcacttcaatggaataagttggatcgttttggatgatccatgtgtcctttgctagtaggatatgtcatttccacgattggttcttggagtccttttgtgttaatttctgcaattatctaagtgtcatttgctagtaggatatatactacttttagatttgctatttttatgaacgaaccattcattcttgtagggtgtgttatttttaaattatataatgcatctccgcaaaaaaaataatgcatcactgggttcacatagcctattgtggtgatatggagacagccaatgacatgttggtgagaaatttttgttttcattggtgaactataaattttggttgcatgttgttgtatatggcattctgcccacaccatatttacatgtttgaaaattttgattttggttctgaattgtggcgtttgaaattgtaaatttaactatgtttcaattatacgcgttagaaatatttatgtttaattattgtggtgttaaacatagtgtaaacaaggattgcatgttaaaataaaagagaaacatgagtaggggctaaaaa

SEQ ID NO: 24205 - DNA, 23990 bp, Oryza sativa
ttgttacggctaaaatataatgaatttgacgttaagattttaaccctaggtgtaatacaattgaaagtatgtgtatgattttttctagattttttggtgacattttttagttggtgtgcacgtgtgtacacgtgagggcatgtgtgcataggatacgctcccggctttaaaataaggtttattgctggagatgctctaaaacctcttgttttgtggttctaaattttgaatttttagttttataacaaacttgagctatggctagtttattatgaattttgtagtcttgtaaatcttcgtacataaggaagaagaaaaaaaagttgaaaatagatagcctaaataaaaagaaaagaagagaaatgacgtcggaaaaaagaacacaataaccgacggtggtccccgctggcagcctctcacaccgcctcctgtctcgcctccccaccttgggtttgacctggactggacgtgccaaagccaattccaacaccgccacgacgcgactcacgcctataacgatagcccccctctcttccctcccctctcctctcctctccgcttcctaattcccctctgcatcctcctgctcgacgaggtacggacaccccccgctcttcctccctccctccctcccccgcgcctcgcctcatcgaatcccctgtgtcccgcggggattcggcgccggcgtccgcccaattggtcggcctcggctcgggagaccaccgattcagcgcctcgacttggtcgggctccccgcgggatctttggtggttccttttttcgggggattgttctttcatgctggctgctcgattcgcctcttgggggtttcgatccgctagcgttagttgttcctagggtttcttgggcgatcgtctgggtcggtaggtggattcttcacctagggtttctagtgaaattgcgtttaggttttgggatgatgttgtgcgccggcgatgggtcgagcagctttttgggttgttacggtcgcggaagcttcatcccgtcgtggatgcagcgtagttcctcggttctgtttaggctatttcccccctttagcgcggtagttgagtgtggtgtctggtaggctttactttgtactactaagctgcatgtttttacctcttgagatttggtgttgacttcttgttaattcccctccgcagcgtagttgaccccatatgtgattgatggatgatgaccgttccgatggataaagctactgcttccccatcatcaagggagcttgcacagcggctcttaaagaaggtttgctcttttcaatgtttctgcaatctgcattgcctgtgagtttctgtagtagcatgcaaggaaaagattaatggtatatgtgtgaagttgtcatgaaccctcttcaaacagctaacatgcaactgtttttggcatactgtggtcctgtgagctgagttgcgcagatgatctcctgtcaccatccatctcattccatgtttacagtcatctctatgtgactgttccttctgtccttcgtcccagacattgcttactgagcgttgactttccctatctgtgtgtgctatcgctgtatacatcgcattgctttgtcttcctcgcaccagatcatacgatcctatctaatgctcactatttcatctatctgtaactgcaattgtctaattgtgtttgtcggtttgtccagggctgttatattttcttgtaaacaatgcaatagttacatctttggttattttctttctcctaaaaacatcttttgttacctgcctttgtcacctgttcatgcatgtgtgtaggacatttttctgtatgtacttttaccattagggaaaatgcagcagaactgtgcacattatgtcttgtcccctttgtgatatgcccttggttctggcttcttcccatttataccgcattcgtcccacggtgctagttagcttgcacattaatcgatagttgcacacacgtgcttgagttgtaactgaacttttgtgcccacaaatttccatcccctttaaacagtttcacttgaccaaatgaaccacattagcatggtcagcattacaatttgcttgattgaaaaatggaaatgttccaggtgatgaatttaaaacattcacttgtattaaagctaacagttttatgttcctgtgctttgtgatgtggcatttgctagctacagctagctgtgaagtggattaattatggggcaattatttagtcatattggtaaatagatatagagcaaatggggtggtagctatatattttatatttcatgtttgtaacatatgtattttgtggtatatatatgggttcctgtgttgatggggtaaactgtgtttcaaacaatgctgtatttttaattcatatttgttgaagccttgtggaaaaagcgccaagaagtgaaaaacctctgtataatctactactagttggcatactggaatgtgtattcgttttcctctctgtgggttaatgctatctgacgatgtccgagagaagtttatgaccataatcacgttgttcatggaactgagttaactttaaactagatgcagatttgaaatgtatgtgatctccaccaaatgaaaaagctgtccatggttttgtggaacagttgactgctcattgttcataatatgtatatagataggtcaccttttttggcttctgagttgagatgttaaagcttttagaattttgatgtccttgatctagctttggagtgcctatttccttttactatttattggatgcatatggcctatttccttttactatttattgaatgcttatgtctgttccttttaattccttcactaaaattctctcctggtgctttcacatggtgtttcttccacttctatagtttatttcaagacatgaaaccttatgttgaaatagatagtgtatacgagtgagtaatgataatgatgttacttctgcagaacgctgaacatgaaagtcgtctgcgaaggtcagcacagtccaaagtgccatcagatcctaacatatggtttcagatgcgtgagaactatgaaaagataatccttgcgtgatcatgacttctctgaaaaacgtgagatagaatatcttctgtggcagttgcactacaaaagaattgaggaattccgagctcatattgtctctgctgggaagaacaatgccaatcctgatcggatcaagaggatcagatcttctgttagaagtttcctctcagaagcaactggtttctatcatgacttgatgctgaaaattcgggctacttatgggcttccgttgggctacttctctgagggtcctgatagttctgttgttcctgataaagatgggaagaaagtggttggggtgaaaaaaggcttgttgtcatgctatcgctgtttgatatatttaggagatcttacccgatacaaaggtctgtatggggatgtggattatgcaagtcgtgaatatgctgcagcctctatctactacaaggaagcagcttcgctgtgcccttcgaatggcaacccacatcatcaggtatgcagcatgtcgctgtagtaattttctgcaccattagtacaaaacttgttttgtgtgcttgaatggcgatggtactgatgaaaaggtttttgtgttcttgctcagcttgcaatactggcatcatatgctggagatgaggtaacagctatctataggtacttccgtagcttagctgtggataatcctttttctgcagcgagggaaaacttgattctcgcatttgacaaggtattatgctaccttcatgatactactttagtatgatccttgttttccagtattgtgattgggtgttgaagctatttttccttggtgaaccttgaaatgatactgcatgattttatctagctaggagatagtcgatcttgttggattccgttgttcaacagtttgtacacagaaaattcgtatctttactggtgtttagcctattattatccacttgtggaattcttatttagactagaaaaaatgcccgtgtgttgcaacgggtgaaggctattttagtcttatttttattgttatacggtttatcttgggtgaaaatcattgtgggaattcgcttgtatatatatatttttagaaaatcatgagttgtaattaggagtctgactctcgtctcaagttagcatgcgagtttttttaaaatgatttcttatacgactccttttgtatttccaaaagcgtcccaagttagcatgcgagattttttaaagagatttcttataagatgtcttttgtatccaaaagcgaacgaacttaaaaaccgactcaaacacagatctgtatttctaaaagtgaacgaacttaaaaaccgactcaaatacgaatgacctaccaaaatactgataaaaacatcttcaatttttataatcttatttagattccataagataagaaatgttctgcagtttaccaactgggtcaataaaaacgttcttacttatattattattgtacagctgttctttcattgattgcagcgtgtctttcatacttcctccctagaaaactatagagtgtactccctccgtggggtggaggaagtataatattttgaaaaggtcactttttttttattttgaccaacggttgtcaaattataagtatatttagtgcatagaagttataccaatagattcatccttctaagagcttttataaaacattattagttttataagtattgtaaatatattttataataaaacacatcatataattttctcaaaagacttcttcaaataatatacaccctataattttttgagggagttctttatagtatctgatgcacataacacaagaatggagaaatgcaccgtttagccttgcagtagatttggaccagtgtgtacaagtgcctagggggtttctcctgtcagcttcttattatatttgatgagcaaattcagaatccgaattttgctgtgcggtggatctcaaacgcttatagtttcatatgcagaatcatgatatctatgctcagctatcaggtaatagcaaggttcccaacgctaagagcttgccatccagatcagttggtagggccagaggaaggggtgagacaagatttcagcccaaaggttctagtacagaagaaaattcaaaggagcgagagcacagtattcaagaaatactgaaggctttctatattcgatttgttcgcctcaatggaattcttttcacaaggacaaggtacttcgtaaaacacttctgtgactcatcttattctctctttctttgtctcctaaaatgtcttgcttttttcctctaatagcttggaaacatttggggagttgtctgctacagttatcagcgatttgcaaattcttctttcatctggtccttacgaggagcttaattttggtgttgaggctgctgaaaacgcgctttctgttgttaagcttattgctatccttatattcacagtgcacaatgcaaacaaagacgcagataatcaatcatatgctgaaattgtgcaacgcagagttcttcttcaaaatgcatttgctgcagcctttgaatttgttggataccttctcaaaagatgcgcagagcttcatgatgttgcatcaagtatctacttgccagctattttggtcttcattgaatggctggcgtgccatccagattttgtggctagttctgagatggatgaaaagcaagccgatgcaagatctttcttctggagtcaatgcgtgccatttatgaataagctcattttgactggtctcgcacatgtcgatggtgataatgatgaaacttgcttttttgacatgggcacatatgaggagggtgaaactgggaacaggcttgcgttgtgggaggatgttgagttaagagggttttcgcctttggtacctgctcaaggtatcttggacttctccaccaagcaaggttttggaagtgatggaggtaccaaggagaaaaaagcacgtgtagaaaggattcttgctgcagggaaggcgctgttaaatttcgttcaaattgatcagctgcgaatatattttgatgcatcctcaaaaaagttccttatggcttcagaacctcctcctcctgcttcttctgttcctcttgttgtatcttccaatgcgcagacaacaaatcacatacaacaggaacctgaagtctccagtaaaattggttctgtcgcagaagatctaggtgtgcttcagtcaaaggcacaactctttcttgatggagatgatgatgaagaaatagttttcaagcctccagtttctgaaaagcttccgagagttacttcagaacagactagtaatgagttattacagccagtggtggtgtctgatgtcaattggtcaaatgatggtgcaccaccaccaatgacatttcagagcaatggaccggttctgactcccaatgtttatgttcaatctctcccaatctcttctcttggttgggcagccaatgctgggcaacatgtgattcttgatgttggtgcaaggtcaacatctgatatttttgagtctctgaaagcacctgatcataactgggtaagcactggtgcaccacttgttggctcactggatacagtccctatggcgagcttttccaatataatttcggatcagcgtacacctccatcgtcactcggttgtttcagtaacccagataatacagccatactccctgggcaagattcattcttattgagtgcattaaacaatgttaacataggtgcaagtggatttctggatcaaagagtgaatggtggactcagtggattacagtctgtgggaaatgtgcctcaggtatctgctcaagctactatgaatagtacaaatccaatgattggtcagtataaacatactgaagttaccatcccttctgccttctattcagttctgccgtcagtagtatcttctgatggtgtatcaaagaaaaatcctgtcagccgtcctggaagacatgttggccctcctccaggatttaacaatgcccctccaaagcgacaggatgattccattttagctggcaatggccagcatgttcagaccaatgacggcatctggttggatggctacaggtcatcactggattatgtcaataatcagcgttttgcacattcaaatgttaccactgccagcagtactttcaccactccctttccttttcctggaaaacaagctttcagcatgcatcctagaggtagcgatgaaaaacagtggcaggatttccacctttttgggcccacaaagcaacttccagaacttaattttcagcaagggaaccagcaaaatggtccactggcggaacaattaccagcacaatctgcatggtctggcaattaccttgtgtgactagcttgtaccatgaaggttaattttttttcttgggtgcctcaattttgatagagtttttggatgcagaactcacctccttttgttgtacaaatacactgaaattctctggttcaaatgtattatattctcttttggtttcaggatttgctgagaatctgttgggagtaagtggcgaagattgacacttgaattcggccttgataagtacagccctgtcatgtaatgtttcttttggaagatgcttgtcttggaagcataacaagtgctacccttggaactggtaagttttgaatgcacttaattgtggtactccatttcattttgtaatgcttctattccttgttttgtcctcatttatcagtctctctcttacactaatatctcacctaatacacctcactaacaccatcatctctcctattaccaagaaatttaagtatagtatgggtagcatggtcattttactcctttttcgctttgtttcatactcttatgaatgagaagacgcataaactttatctagccctacctttgccccattagactgtttatctaagattatgtgtttcttgataaatgaataattgaattacatctccttgattcaatcatttatttccttgctaatattaggagttcatttgtaatcccctggagacgattgtctctgtcacaattctttaattgatttataccagctaaattaatagtgcagtttaattactttttagttttgatattttgttttttcctattaatttctgcctcatgatacgctagaatctgaagttattatcaaattttaacttgaaaatttgtctaatcttttaattgaacgtcagtccccaaataattcaactaccaaccacgtgctcagatgatgtaattatccagagaagattcttcaactaataaccaaacgtatcatctaaacaactaatgtatgctaaacaatcagattatgtcaattacagatgtttacctgttgacttactgatttacagggtatggcaggtcttccaggctatgaaggggattttagatgatcccttccattgtctgatgagaatatgtacggagagttctttaacttctcagacccagggttttgacctaatgagtaatctgcaattctgcatacgggcagttactgagatgcgtcaggtaagtccgtggattggttgctgccgtggaaactgaagccttcacgaacgaatggatgaaattctgtttttggtggtactcttgtcgatcagagctatgaataaagttggtgatgactgcttcatgcttgtggatgttctttccagctatattgttcatgtggtacattgttactgcaaagtcattaaatacacttaaggataaatcattatgcagttgctatcatatgatgtgctatggtagcaacgtttcgtgttggtatttgtgtgtgaaccaaatgtattatcagcttgatgagctgatcttttaaaacgtattgacttgtaatatgttgtacagaacgtcttgcttgttttaataccgaatgtcgtgcttgttttaatctctttggttagttgcttaaacaaataattgaaagggtcatttaggtttagaagggggttgttgtgaataggctaatttaaaaactcaattaggtgcggaagctgaaattttcgaatatatctgaaggaggttcggatatttctgaaaatggcagaacagcgacaaacgcaatagaaaattggatctagctagtcacaataaaaaatatcaagcacaaacaatagcaaagctagggaaaaggatatcactgaaatttgttccttggaagtttgaatccatgagggggttataattttctttgaggagctcacaaaaacctggtcttcactgaccttttcctcgagagcttatacaaagcattatttcttccattagtggtatctcttctctttcggaggtgagattcgaccttcataaacttcactatttttttccctagtgatatctctttcttttcggaggtaagattcggccttgacaaacttatgctagctaaccatacgtagattgatagctcaaaagtaacaactagtcttctagcacttcttaacctccaaaagtaaaggatggagcaagaatctcaatgggataaaatacgtcctcaataaatcttcacgaagtcaacacgaaacactcacacgaacttaaatccacaactttcacacaaacgcacacaaagtccgagtttgaagatcgatgcagaggagaaataagagagcaaggctcaaaagtggatctcaatgtaaatcaagccaaagacaataatgttcaatagcaccagcaaccttggcttggaaggggaatgggggtatttatagtcgcattctcagatctgcttgttggtgggtaaatattctctttttgtcatggtggccagatgatgggtgtcctacaaatcgacgccggcatgctgccgagctcgcctccatggatgctagcctcctgtgctcctggcgacgacgcttggtcccggagagccaccgtcatcgtgcctgtccctgcctcctgtcgctccagctcctgccgaaccctatcccctgttgcttttgctgtattgttgacggtgacgcaaggatcgtcgacggctcctacatggcgagacacggccccgccgccagcggcatcccccgcgtcaagctcggcggcacgtggtggagaaagccgccgctgacgactccgctcagcggaaagaggcgaagaaggccaccatggcggtgacaacgaggatgtggacggcggcattgcctccgtcgacgcgtcgccgaacctccttcgccctccggcctcctccccacccgtcggccgccctgccgcttgcccagtgagaacattgagagaaagaggatgaagggagaggaagggaaataaaagaggtgatgaagtgacatcctgacatgtggggcccacgtgggtcgctgatagccaccacgtcagacaaaaccggggtcaaaaccaccgaaggacctaaagtgaacgattctaagtggatggatgtcctatatctggtttttgcggttgggggatgattttgtaactcgatgataagttgagggactttcggtgtactttttccttaattgaaccccattacatttgtttgtttgttttgggtggcctgcaatcgaatacactgcaatcagatccgggcctagtacaaatccgttaccgctccaaaacgagtggtaaagcttaacgatacggagcggaagcaacgcttgtgttgtcgcgagtctcgtgacctagcctaagcgccgccgccgcttcgccttccccacgcgggtcgccggcgcccccagcctcaccggtgttgctccccctccacgcgctcgccaccaccgccgctccccgagtcccgtgcgcgccgctgtcgacaccggagcttggccacctcggcaaggccggtgacctccaccacctccagagtttcgtctctagtccattcatggattcgaccctaacaagcggcttgacttcgccatcttcaaggagactgacctcatcgttcatcgacatctcttcaaggaggccccgctcccctagcccctagccgaagatcctgaggtacacagagaaggtgcccaggaggttctcttaccatcaatcactatgttttcgtcgttttcacggtcaatcactactccttgttggtgagaacccctgctgaaaccatctttttttgtccaactctgcaacctctgaaattttctaataacatcttgggccaatccattcttttaatcagtagtgctcaagatttatgatgatatgctttaatttgatgcaattttcttgtgattgatcttgaagtaagaattaagggatggtttatttttagcaaaagttaatatgtactcttgttcatttgagtggcagcttgatgtattatgtgtgctaccgggatatattctggatataggtttaataattgttttgatttgtatttttttataaattactatggctcatcatcccttcccttaagtactaaaatctggagaagaaatgtaggacttagaaatatgatgattgatattaaatttagagtaaaatacagcagcggtccttaaacttgtcgtgaggtttcacttaggtccacgaacttgtaaaacgtacgtcgagatccctaaacttggtttattgtatcatcccggtccaaagtctcgtttgaccgtggtcttaccaacgtggcacgccacgtggacgatgacatggaattttttttctcccttcttctttttctctcccttcttctccttttttttctcccttcttcattttcttttctctccggcggccgctgcaccacgagctccacagccgggcctccatctccttttccatcagcctctactccactcgccgagccaccgtgccggaggcaagcacgcgacaggagggaggacagtggcgctgacgggagggaggggacggcggcgactcggggaggaggatggcggcgctgacgggagggagggggacggcggcgcatagatgtcctcctcgatctcctccggggtgagtgccaccaagaacggcgcgctttctagcgtcgggacgaggacggcacgggcaccgccgccgcccacaacatggagcggctgggcgccgccgtgtccactgtagcaggttccacggcctcgctgcaccgtccgcttgcggctgtggcagggcgagaagtggaggcggaggcagggccttgaactcgggctcggagtccatctctgcaggtaggctctcgggctttgtcgtcgtcagcggcagcggggggtggggggctaggctggggcacgcggagacggttggcggcgtctcgtaggtgacccatgagcttcacccaaagctcctcgatcccaccatcgaagggagttggcggcggcggctgcccccacggctcgaggtggtgcgtcgacgtcgcggcgggcggcttcgcccgcggatccgccgtcgccgctatggccagcttatcgtcagcagctacggtggcacggcgcggcgcggagaggcggcggtggcggcggccgagtcagcgaggaggagacgagcggcagaggagaggaggttttgaggccacagcgggtccaaaaaaaaagggagaagagaaaaattccatgtcatcgtccacgtggcgtgccacgtaggcaagaccacggtcaaacgcggctttggaccgggatgatacaataaactaagtttagagacctcgatgtgcactttgcaagttcgtggacctaagtgaaacctcctgacaagtttaaggaccgctggtgcattttactcttaaatttatgttttttcctgaagtggcgaggctgtaagtagacacttcaatttatttctcaaatgtaacaaacattttttatatttgtctgaattaattgtatggaatttctaattatttgcaaataagaactaaaaaaagaagtttgtttattaatgttagttttctgttgaatttctgttagttttctgttgaatttctaatattgcagtgttacggagcttccttaaagtctaggcattatgcgtggaagaggcaagaacaaaaggatttgaaggtattgtttgagctttctttggatccaaggtcgaaatcaaaagggggtttcaaaaatggataccgtcaagttctagagagcgtacttggtaagaggttgccaaattcttgccttactgctgttctgcacattgagtcatgagtgatgcactttaggaccaagtttggtgcaattgagtcaagatggtgcagtgcgagaaacaacaatatgatgatcatggcagagtaagtcattgaactaattattgatgattatggttgcatcattattctggctatttttatttcatgaattgatcccagtgacattagatttcatgccattctattaagtatttaacaattaactcactttattttcttatgttaagatttttttagtatcgcacgaaatctcactttcttttactcactttattgtactgcacatctacattgtcagtagatgactaaatgcatgagtattatgtaacctcgcaatatcttgcttttactaacttctgaaattttttattaccagatgaagcaatgaagaaaaattcatgtgatggctatatgtcatttaatctatcagatgctcattacgagattttgaattcgtaggtcatttgacttcgggattagaggcctgcctttatttttcatgagcatgttcattttcagtactttgaaattttataagcttgcactatgacagtttgtaatattgtgcagttggttaaaagacgataagactgctagctactatcataaacatgaatgtcacaaaatctggtactgttgtataaattgcgttcaacagcttggttgtcacaaaatgacttctaaaacagagaaatagaggatttaatttgtgttaggtgctttcaagcatgtgcaaattttaaagttgagaacttttcatatacctttgatgagttggagacattttacttgtttttatgcctatattcttgtgcaattagctatgtaaatcgcgtggtttactcacgtttgtttttttctttattacatgaagatgagatgttaatataatgatgcgtccaattctctgctttgtgatgcatggtgtccaatatttactcgagtctgaagtagatctacaagatcttgttcagagatcttccaggatatgatgctaggctgatattagatacaatttcatgacttctaactagctgctttcaaatatttgcatgccgaaatttgttgagcttctttatgtagcttttgatgtcagctgctattgatatagtactggagtgtatcttccgcgaatgtttcatagcatatgccatgcgcttaattgcatacttgtataccagcttcatttaatcagttatttgatcaatagttgtctggaagcaagcagttctccaagcaaatgatcttcccaaaagtttctgttccaaatttcgaatcgtgtcctgtggatcggcctcccgttccttggctgcaaccctcaaccaaacgccgtaatgtaaacaaatgatgttaccgtctgcaaccaaactaaccgtgtaatcggatacaatggtagctgttacggccggtggcaataccatgagagtttacgttaccacttccgaaccaaacaccaccctaaggtacttcagacagttcaccacccgccgtaagggtctataattgccgcttcttcctctgtggcctctttgctggggcagcacttcctcctttgtctgacgagcttttcgcctctgctggttgctttggatccctcctcttcccttgttccgcgaccaccttatcaactgcttcatcatcactgtcgtcgtcaccactaccctcagaagaatgatgagctttcttccacgagcccttcgatgtctttgctggttgcttccttcctctctttgattcttttgtatcttcctcatcctcttggatctcatgggttgccttcactaattgcttccttcccctcttggcaggtttagcctcttcctcatcatcgtccacttcacgagcagctttatttgatttgctctgttctttgcttattttcgctctgcttgctgttgcatcaatcccgtccagcttctgcaactctggcacatatgctgaagtctgaacaaacaagtgagaatgggatcagcgatcagcgcaacgcatgaaagatatattgagcttgatccaaatgggtaaaggacttaccctgccaccaactgtaatgaagtcaattttcttccctgcaagcaacaaaactcaatcttcaataatgctaagcatcacgaacacatgttttaccaaagaaaagatgatcagaccctccacaaaggccttgccgggtttcttctccctggagtgaaatatccagttttctggatactgactgctgttgcaaccaacttctaaggacttttcaatcacctagagtcatagacacaaaaataagattatcatacacagaaatggactccttatgccaataatgacattgcgatattattgggccagtaaagacattgcgatgaaaatactcaacaggtaaaccagattcctattgggcttaatatgccaatatgttgaaacatttctaatattcagttatattttcaatgtatatgctaacatgatacattatataagaggtgtttttcttgagttcaggcaagacacaaaaaacaactgtgcatatctagtattcagatatcagtatatgctaacatgatacattactcagatatcagtatctaattcgtatataaaatgcaatcatttttttatatatggttgaattgataaataaatagaaaatgcacccaagttcacaaatcaactagatgggtacccttcgtgttgccgtgggagaattgtgataaaatagtcgatatgagttataaaattttcttttttacttattataccattttctttcatttgcttatatattttgtacattaatcaattatccaaaggttataaatgattgagttgtatggtgtggcttgtggggaggagatgcaatttgcacccttgatgaaatcatctaaaggccaaaaacaattaaggtgatgtagcttcatgagagaagagagaatagcattaactaaacttagtggggatgaactttataaatatataggatgccacatgctatccattcctaaagaacaaccatgtgacacacatcacactaacctctataatgcactgatggagtgccttgcatttctccttagaaatcatcgatgctgtttgcattggatgaatccttgcctacgcatcaagcaagcaaaggatgaaacatgcctatgtttttttatgaaaagaataacacaaaaaataacctagtattatacaatttagatgcccaaagaaggttatgtctaaaacaaggccacatctttgttggttaaatggaagacaaattttactacaggatgctcaaaatttgtgtaatttgctggcagacatcgtaaaaacatgtcatggctgaaagacactaaaaaaactaggaatttgccggaggacactttcaaaaaggtgagaatgcccctaggccaaaaaacttctgacctgaggatgtcgtgaagatggaatatgatgtatgctagcaatgtagttggggtaacgacagatttacagttgcatagttttcaaatattcactccaacaccatgtttgaagcctatggctccaggggtattatcccctatttgaagaatttctcactccaattgagttgagaatgtcctccggcaagctaccgattttctagggtgtctttcagccgtgacatgtttttgcgatgtctaccagcaaattacacaattttttgggtgttctgtagaaaaaaatgcctaaatggggatacatgatattcccatagaagtagcactttatttgacacaatcacttaaaccaaagctaaatcccacatgttaggttcaacatcatatctcatctatggcctatatcatgaggattgggtacatggaagaaacaaatggctcaggattgatggcccggagaagagaatgtgttacgggcttaggtcatgggatggagaagagagaacgatatatgggtaaatatattattctatggtcaaacacttaaactcaaataaagctgcccattttatatgacgagacaagcccaaataagaatatctagccaaccagataactaagcaaataactaatctttagttaacaaattggagtactactactaaacatgtaattcatgcacaggtactgcaccatttccagcacagccgagctgcttgtgacatgtgccaattgggcctgctgccgtggcctccaaacaacctatgaagctaaggccctgtttggatcatttagtctctggactaaaattactaaattagtccgtagactaaaaactttaggcccctactgtttggattcagggactaaaagggactaaaggcacgtggaccgagggagagagaagagaggctgccactttagtccctataagttcctccaagagggactaatggaattttagtcccatatgcactttttagtcccttttagtcacccctgtttggattcttagggactaaaatggagggactaatggattagtcccatgaaccaaacagggcctaaattattttttacaacactggatacaatattcaaaattttgtgtgtttgggcagcgaaaagtttttggtcagcaaataaacatgtaatgtgtttgtacagtgacagttttctgtagtttcaagccaactctagggaaactgacctgataaagcacttcatctgcaatccaattgccaattcctgatataaagctctgaaaaacatgattcagaaaaacagtcttagaagctagcagaatcaaaagtgtagtatttactgtggtatttagactacatttgggtataaaattgtaatatcttaatttactagtcaaacacacaaattactgactttcaggttcactaaccaaatctgggcaacaattgacaaagacaactttttagttatttctgattcccacatatataagggaaaatttcgccttctgttactaagcatgcataatttcagatatccaattgttacactgcagatctttgatcagagaacggagcattaaagattgatacctgatcaagcaaaagggcttttattggagcttttttcctacttagtgactctacaaaatcatcaagatgaagaggttcaaataaggcatctggtccaagctcagaaattggtgggacagcttctggctattataacatgcagacaaaattccaaagtgaattactgcagcatactgaagctataaactttgaagtcaaataatcactagagagttacattgtcaagaaagcgaatttttgcaaaacgcctcttatcagtgaaggaaaactccaaaccatcatccatctgtgatgttgacagaaataaaaatgaacctgatgtaagttaaagtgttaaacggatcattagttgacgtctgcctcaggactgaactgcatggagtatcatgagggattagagcatttccaaacagaaagtaatattcttttcacaatatggagagaaggaaaaacaattaaacatgcaagcaaagtcaccaccaaaagtatgaattccaatataatatatttactagaatccttcaataaacttaagtgcaatgcataacatacatatttcaatcattaataaaattaaaaagactgaacaagataaatatgtccaagaagcagaacccagagacaggtcacaaatcacataatcctacatgaacaacccctataacactctcggtgttaacttaggtgctaggcactagatgggtggcttgctagcacctaatgcatttctgcacttctattaatggaataaattcagtttgacagcacacttcccacggtgaccttatctagaagtagataatatatgcaaaaagtacataaacctcacacaaacaatattgttatacttgcctttgaaagtattttcaaaacatgtggatttagctcctacaatttactagtacattactataaaatcaatgcagtcaaagtcttggattgaagaccacaaaaacacaaaataatctttatttggatatggaaggagtatttcaaattcatcagtgaactggcggatgcattaaaaaaataggtgtggaatagaagattagaatccatactacaacaagcagcttggaatacttcaaaggccattcctcagtcgggctcactgcagacctatatcaaatgccacacgaaaaatatgctaaatattttagttgaactagccaaagtgtccgtgcattgcaatgggaagaaaatggaacaaattgtgtacatggagagagagcatgatcggcaaacaaccaagtaagatggcaatgtggaaggagagatagagcggttgttctacggtaatgaaggcgacatatgctagagcaagaggggatgggattttgtttagataaaagaactgaatttctagcataataagccgattatgaactaataaacaaaactttcaatctttttatgttcttttatacggtacatacatcaattagtctgccccatgagtagtacactattcaaatcatgcccaccttcctaacaaaaaattatacaaggaattttcattataaatactgactagccaaaaaattgataaccggcacaggcaccaaccctaaaaatatgtatgtcaacccctatatttatgtgaaacaataagaacttaattttattttaatatacggtttgagtcctttttttgtcattcggataatttaattcgtttctaaaaaaagataattcaactcgtatttttttcatttaccaattgaccatgcgatgggtcctccagggaaaaaaggaaattgtttcttgcacactgcgggcctaccttggagaggcagcccacagcatggcttgcaagcagcagcacctcaccgagtcctatacggacggcaacaaaaatacttcaaatggaagccagctagctatgggcctagcccaggcaacaacacgggccatacgcaccgacggcagaggacaagagtgcacaacgcatgcaccaaatgggaacacatatacaacacggacgacgtaccaaacgtttggcaaaaacatttacagttcttataatagtagagataaactacaactattccaaccaatttaatagacctaacggacacttattaacacttagcagacacaaaattctagtggatatatattatatagacatgatcacatattgaaattctacaagactgttgaagtattgtcacagaggctggtccactggacataactagattgccgctcaaatgatttttttttttggtttatgcaagcatattgctttaataatatcccaaataactcttatcacgaaataacatccacccatacaacccaaggaaggcatattcacattatgttttctctagtatcaatgaaaaatagaaaaaagtatatgaaaacgttgaccatctatctactaaactatttgtcgtcatagcttttcacagatttttctgacatttctaaaaaaattacgacaaaaaccataacagaatagaatcagcacagggtgtaattaacagtgtaaccaaactatgtatttgattgtgtctctccagttatgtcaattggaatcataacactttcctgaaagtggagtaaaatcatctattcgccaaatatagggcttcctaaggttccacgatttcatggaatacaccaatagatgaaaattttcttttgcagaatcaccaacaggcatcaagaacattaggcggctgcaaatgtttcagtacaaattgattgtatctgctaatgaagaaaagcatgcagaatagtcctaaatagttaaatataaagctaatacttaatattgtatgattgataagccatttcattgtcttgtttaataaattatgtgccactgaccttttgtatttgctcagttccacacccttgatgtaaatagctccagccattcctgtaacagaaactaacaattaggtactgtttgtaactttgtatacttagaacttaaaagggttaatgcactaaatgacccctgaaattgacagtggcctcaaattggtccttcaactattaaaatgtccaaaagcagccctctaaacatcaaatttggcccattttaatgtcaatgctggcacactgagttagtgccattgcacttttgctgagtcagaatcacacatggcggaaagactgaattgtaactcggcaaaaactgtaaaatcaagatttttttttctctcgaaaacgcagttgagctgcgtttcatttcattaataaggaagaaaacgtatttacaaagaaaaggggcaaagagaaactgtaatcaagattttggtggaattttcactagtcaaaaactgcactgaaggttccagtacaaattttactcaccggagttccttaacctgaactttagctagtcacacctctccttcagtatttgttcaccttcatttcttttttattgttttttagctattgcgtacttaattttgtgtttccgtttctttaggtaagacacgaatactaagatccagatagctgtagcacgtggagaaagactagaagtgtagttgttgattgacaaatatgttgtgatcaaatgctccaagaaagttgacataacacaaaaaaaatgaggtgcctatgataatgccggattaccaaaacaaccattgtgcttaggcactccatttagcactccaagagttgcgcatttagtttaatagtaattaattaccttataggcattctgtacaaaagaaaacctacagatatatatttacactactaccagaactaaaataagggactcgctaagagcagcgtcaacgaaacatgaaaaatccacaagaacagcatgacacaagattccaaaatgtcacaaataaaaaacaactcaagaaaaaccctaaacctcctgaagaacggttctatcttaaaaaataatagtaataaaaagaaaagcaataaatggtccattgcggaaaggaagggaaatgtgactatagagagggtgtggagatccacggaccgaactggaaggaagggaagggcggagaatcaagcgcaagccacagattcttgcccttgcggcgagcagcggagatggtcctcccgacaagcgctgcctccagccgcggcggggcgacgccgtcgatgaccttggtgtcatctgcagccgagcaccgcacgatcctcttcccgacgcagtgctcctccagcgcccgtcgcgccacctccacctccggcagctccggcatctctcctcaacctctccctcgttgggtatatcctcctcttctcttatttttgcaccggttggatcccagaatccccagattccccactttagagcctgtttgggagagtttgtccccgctgcagctttttccaaaagccgcttctgctagaagctgcctcaagcagtccatagcttctgagaatatgtagttacagattctaaaaaatgaactaagaagccagaagctagagaagctgggttttagagcttttccagattctcggaagctggctaccaaacagctgtttctcagaatctaaacctcccccaaacacctcccccaaacagacccttaccccagtctgaaaaggttaatttgaaaaggtaggagacccctcctcttaccgcttctttgacaagaggattgtaagggcaaaagcaatgtgtcatccatttattcagccccggaggaccaaatagatttaagtcctttaaaagtctcaggatccacaatgcaatatggcctcaaacaagatccaaacctatctatagccacacatggggatacacagcccacagtggacgtgaccaagcccacatagccaaagcgatacgagctaaggcgaaatgacctgggtaccctcaaaaccgtgccctttgactcggtctcgtgagtggggacgaacgcatcgcctcttctcctccgtcgatgcatcgcctcctctcctcctcacgcacctcccatgagccgtctgacgtcgccgacatgaagctccggagtggcttcgtgcacgaccggacatggccatgggctattgtcccagtggtgcgggtcaatttgttgctgtttgaaggtggagagccggcggagagctcggacttgtcggtggagatgtggaccgaagatggcgacgacgtccaggtttatccagatggtgccacttcccgacgtatggcgccgccactttccccaaggaagccccaccaggacgtggtctaggttccatccctctctaggtcgtcgcggctttccccaatgacacttgccccacagcgcgcgtgtcacgccctgaagttttccttcctagcaaaaattcaattgataaattgttttaagaaattatttgtttaaaggcaagagagaaaccctaaattaataaatacagttaataatcggaatcggcgtgtggaatttttcttggattctacgtgtcaaaatatgctaataggatttttaatggaattttcagagccttggaaataattttaactaattaaaaatgagcatgtgtaatatttaaatcctaggaaaaatcttttttcctttttcttcttttctttttccctttttcctttgttgggccgtcggcccactcctcccgcacgcccgccctcctctcagctgggccggcccaagccgcctccctcctctccccgggtcaccgacaggtggggcccacctgtcgcccccgtcttcaacctctgacaaccgcagccgccgccgaaaccgcccacgccgccgccgtttcccgcccttcccgcgcccactcctccccactccgtgccgcgcccacgtcgtcaccccctctccgctcctcccgccctcgcgcgcccgagaatgggcgggattcgtttcgaatcccccaaactctctctccccactcccccacgtcgccggccaaatcggggggtttccctgccgtgtccgcccctctcgagcccctataaggcttccccgcactcccc

SEQ ID NO: 24206 - DNA, 20358 bp, Oryza sativa
  unsure (1)..(20358): unsure at all n locations
cgccgtcgtcgtcttcaggttcacatggccgagggctacctcgtccacccctcctccatcgaattccgccatcggaggccgctgttcgccgcgcgccggtgagcccttccatagccgccaccgtcggccatggctctcgctcgccgtggactccctctctccctctaagctctctcatttcctctcttagggtgtcctggagctcggccactgttcgccgtcgccctccggtcgctcaccgtcgccgttcgtcgtcgtctcctcccgcgccggctgaaccccggtgagaactccctcctcttctcttcctctcgcgcgcgccgccgttcccatatgcgcgtcaccgcgatgcgccgtcgcccgcgtcgccggccaccgccgtcttctcgccggccgccgccgtcttctcgcctgtcgccgccatcggtggacgcttgccgccgccgccgtcggtggtcgcttgccgccgccgccctcgccataaccggccggccggcttgaagctgagccgaccaaggccgtcttcctcctcccctttaagccaccacctggtggggcccacccgccaggtcaccaccctctctcttgtgccgctgacccgtgggccccgcctgtcggcgccgccccaccccttggatgacgtcagccctgggacatattgcgcaataaatacattaaggcttttctttattagtaaaaatacagataatcttctaaaattcatatctaattcatccgagctccgttttagtccattcaagtctcagtaaattcgtaaaaatgtatagaatccattaaaaatggttttgtctcctgtttcagtagacttatagcatgttttgcttgtgtgctttgtttttcgcgtagatttcggtcgtttcgtcgatccgtggctcctcgaagacgttgctatggtctcatcagtggaagagcaaggcaagtcatgtattacaattgatcagattgtacccaatttacaaatgtcccgcatttctattaaatgttgcattgttttacaatatcatgtgggatgggtcctactactcagccatatattgtttaccttatgccatcgataacttgggtatcaaaatgattagatgttggtttagggaacgcttagccatgcttagttcaactagtacacaaaggggaatcacattaatgcatagactttgattattggcatagctttggattagtgccaccgcaatggtgttagttaattaaaatacactacatggtgggctgtgggtgcatggttttgctagttgtgcccatggcgattaaggaccggttcgcgggaaaccctggaagaatttatcgtgcttaccacaagccagcgtgggcaacgactgggcttgtagtatagcttccctctagccgacgtacccaggcgagggtgggtgtgatggtgttgggtcggccggggtgtccggttgatcggcttccggattcaccgcggcacgaaaggggggctgcccgttgcccgctggggacgggggcgaaccctaaggtgtggtgcgatcggttagagggggttatgcgaagggtcctgtcacggcctcttttcagtatgtcgtggtggcatgtcggcgcacggaaacgtgtcgtggggctgtgtcttgtgggtacagttgtacacctctgatcagagtaaaactattcgaatagtcgtgcccgcggttatgggcggtcgaccagatttaccgtaattagtctcacccctagttagctaatggaactggttagttcaggtggtggtttgggcctgtcttaacgtggtgtagcgttgagcagtgattggttaatattgattaattactgcaactgttttactgctttcaactactgcttttaaatgctagctttatgcaaaagaacctttagcctcccttggatatatcctgcatcatacctcctcttctggtatgacttgctgagtacagtgggtagtactcagtcttgctctctttttcccccacaccagagttgaagttcttctcagttggtgatgtctcgaagaggttggtttcgtcgctaccgtcaaggattgcctgtggaatggagtcgcccgctgcaggagtcaagtcttcaggcttatctcgtttttttcttttccactgcatttgtaatcttttatatttttgtaagacgtagatttgtatgtcaacaattgtcgtttgtgtaccctggctggtcctggacaggggtttaatgcacattcagcttagaaattctggttcgtgaatttttgggcgtgacaagttgttatcagagccgaccttgaccgtaggacaagccaactggaaaccctaagagccctctgaaaccttttcatctgcacatgccttttgcacttggatttgttttgggaaaattttggggtttgctcttttgattcgtgggaaaaatcttgatcgctatttcaattggatttatcgactaggaatagtatggtgttttagaaaaacattatttggaatttatttggcagtcagtcgggaatttgttaggtgatatgcactaagtcgtgtctaggttcgatgggcaattttatgtgtgtattatagctatgcatctattttgtgcattaatttatcgtttagtcagttgcattagtatctttgtctgggttcatgaaaaatgttccacgcataaaaatcatcatgctcggcgagttacttgagtcatttgttgctttatttaatttggttttgagcatgtgttggttcctatccttctgtcctctttagatgttagacctgttcctcgttcgcaagcgacgctccaagcttcagagtcgtcgcctttagccttatcatcttcttagttttgattgcttgctagtttctgtgtttaggtttgttgcttgtgggttagtcggcggtcgatatcaagtgccagtggtatggctgccttaattaggagttgtttgcttccttttcagttttttaatcaagattaagataattgcacttaaatttacaagaaagattagttgccgagccatctgttttattcctttctcttatttctacctatcctcgtccagatggtgaagacaaggaacgatccccgtgactccaacgatgccagtggcagcgaagagcagaccgatggagctcataccagtggtgcatctagcagcagtccatctccaccgcccgagaacccaatggtcactcagatgatgacaatgatgatgcaacagatgcaacaacattaccatcagatgttgcagcaggcgcaacagaaccaacagtttggtcccccaccatcccacttgtccaaactgttagactttctccgcatcaagccacccactttctcaagcaccaccaacccaatggaggccaacgaccggctccgtgctattgagaagaagctgaaccttttgcaatgcaacgaccaggagaaggttgctttttctacacatcagttgcaagggcctgcttctgcctggtgggacaactatgtggtaacccgtccagatgcaacggaagttacttgggcagagttttgtcaaagcttcaggaaggcacagatccccgaggggattatggcacaaaggaagagagagttctgtcacgaccggaattaacccaacgggcgttccttacgtgcgtgtattattccttgtcccaggaggcaaggtacaacaaaagttgatacatttcagagtttatcaagcggaagcgtaaatagttaatttattacatgggcggcgaaggcccagcacacacaaagacaaacgagaaacagcggaagactagggcgatgaccataggcgcttgacggcaggcacgagctagacaccaaagccttcatcttccaggggctcctcttctgggtttgggaaaaattgagcaagactgagtacaaccaccgtactcaacaagacacacccacaagtgcagaataaatgcaagggagtacaagggggttataatataaagggttagggtttgcagtaaacagcattaaaagacacttagttgctcaacgctattttgtaaacacgattctagagctatacaatattattaaacaaggccgtgaacccacacgaacctgccttaacccaaggcctacgatgattcagaccgaactggcaacccgaccctgggtcccagctcgtcccaagccaacccaggccaactattccacattttagttgttaagcaggttttaagaattaaaacactaacttgggtacattgctaggcatgcccataaccgagggcgcggctattcgaatagattatactctgatcagaggtgtacatctttacccacaagacacatcttcctcacgtgtaaccacgtgccacataccaccacggtatacggacggaagacgtgacatagtttccaacccatcctagccatagacaagagtaccgacccaaccccacctacggccggaacctccgggacaggtaggcaggactgagcccctagcagcaggacaccggccctgtgccatgacatctcgactaccgggccgcagctcatgtagccttcatttgtcctagagatgtccatcgacccccgacttcatccatctccatccgtgtacttttttttataaccagattgagccacaaactaagccttacccactagacatgtggaagtacggtagtgctttgcaacagaggccccgaagaccggtccttatatggccgaggtgctactatcaaaaccatgcaccccgagcccagcctaaaaccattttgagggttttgaatagagggggaggtgtgaatccaattccacaataatccaaccattccatattgtccaggtgatgagaatattcccaaagtctagagttgtaaaaccacctaatgttgcctaattaaccagcgaagcatctacctaaaatcatactagtggtaccatgagtagagtgtctactagttggggttttgtttattctagggtgaacaaggaaatattaacaataacaataataaggtcataacaaaggtaaataggcatggctagataaaacagtgataacgcgggaatttaaataaagcgataatgcaataatttaaatcaaaataattttataaactgggattcaatatgttcaaggatgatgtgacttgccttgctcactttcccaaacgtcggcttcaacctccacgaagagcggatcttccgaagctgcaacgtctacacgaccaatggaaaataaaagggcgtttactctaataaactccatataacaagcaggaacaaagcacaaaaatgggttcttgacttcttaaggaaaaattagagacttgaacggtccaattccgagttcaaatggccaagttatggccatttgaagtttatatgctctttaaatgaatatttgcgaatttcttcatttaaattttaatttaaaaagggtttattgcgtcagccgaggggagggggcgcgcggacggggtccacgagagtggggcccacgcggcagcctcacggtccacggtggaccgggcgcacccgggctcacaccggccggcgccgtgggtcccacgcgtcagccgcacccgagggcgcgggcggctgacggccgggccccacgcggtagccactcggcgcgcccgagggcggccatgccggcacggtcggcgggagacggcgtgctcgcgacccgatggtcgccgccggcgaccaccggcgcggcggagcggcggccgagagaggggtgggaagggggaaaggaggcgatggtccacggctcaccccggggcgatggcggcgacggaggagcggcccggancgaaggnagcggncggcgcggctcgggtcgacggggtcgacggcgttcggcgggtcggcgacggaaacggagaggtggacgaggttggcgaggatgcggcgaacccgaagaaggcggcgccgaggtgggaggtggtccggggcgacgacggcggcggaccggagctcggcggcgacggcggagagagagagcgacggcgcgagctcgaatctgcgaggagaaagggcggcgagaggcggaaacgaatggaggaggtgcggggagggtttatatagggttggaagggggagagggcggccggaggggaaggaaaccggcgcggcgctctcgggctccatcaatggcgccggcgggattaggggagggtttccaaatgaatccaagggagagagggagggaaaattggggggaaagggagagggaatcacggggaataattcccccctattgattgcacgcggggaggacgggggcggcgggattcgcggcggcggcggcgctagggcgcgggcgaggcggcgggagcggcgggaggaaggggatgacgggtgggccccacccgtcagcgaggttggcgggcgggcccgcccgtcagcggcgcgtgcgcgggcagaggccggatgggccgcgtggagagcagagggagggggagggagatgggccgagccggcccaagagggggagggagggaaaggggacttttagggtttttcttttttaaaaccttttcaactttgtttatttcttaataattattatttgtgctctgaaaattccactaaaatttatttacgcattttaggctttttaggaaatatacaaaaatcctctaagccttgtttgacttttaactttgcacattttaattgttggaggctttcacacagattttaattattctaggcatcatttagaggatatattttagggtcgttttgggacgtgacaagttccgtgcactccagcaaggaaccatgtcagttacagagtacatgcacgagttcaaccgccttgcgcgctacgctcccgaggacgtgcgcaccgatgctgagaagcaagagaggtttttgtttggtcttgatgatgaattgaccaaccagctgatctccggagtctatgatgattttgagaagcttgtggacaaggctatccgtcaggaagaacaacgtaacaaaatggaccgaaaaagaaaggcagctcagatcagctttcctcaggggaacaatcagaagcctcgcttcatgacgggacagttaggtgagccttccaccctgatcgtccgtcagcaccgtccttaccactcgagtaacttcaacaacgactacaatagtggctgtcacggcagcagtaagcagcacaaccacaactcgactccacccccattaatggcaccaactcagtcagatccgccagctatgtcagctcagtcagaacaactcaagaaggagtctgcaggaaagccaagaccctgcttcaactgtggcaagcacggccactttgctggcaagtatccgaagccgaagcgcgctggacctaggttcgtccaggcctgcgtcaatcatgcgtctgcagaggaggcacaggcagcaccagaggtcgtgctgggcacgtttccagtgaattcatttccggcaacagtactttttgattcgggtgcctcgcattctttcatttccaagagaattgctgggacacatggattatcggtagtggaacttaaaatactgatgcgggttcatacccctggaaatgacatgaacaccacacactactgcccctcagtgaccatagagatcaaaaggtcaccgttcctatccaacctcatccttctcgaatccaaagacctagatgtcattctcggaatggattggttgaccagacacaagggggtgattgactgcgcaagccgcaccatcaccctaaccaacgacaaaggggagaagatcaccttccgttctccagtgccacagaagtccgtagcaagtctgaatcaggctactatcgaggatcagacagaaatagcggagaaaaatcccaagaaattggaggatatacctatagtacaagagtatcctgaggtgttcctagaagacctcactacaatgccaccgaagagagaaatcgagttccggattgatctggcacccggaactgctgcaatctacaaaaggtcgtacagaatggcagctaatgagctagcagaggtcaagaagcaggttgatgaacagctgcagaaagggtacatccaaccgagtatttcaccttggggtgctccggttatctttgtggagaagaaagacaagaccaagaggatgtgcgttgattatcacgcccttaatgaggtcacaatcaagaacaaatatcccttgcccagaattgatgacctgtttgatcagttaaaaggggctaaggtgttttccaagatagacctgcgatcaggctatcaccagttgagaattcgggaagaggatattcccaagacagccttcactactcggtatgggttgtttgagtgcacggttatgtcatttggactcaccaatgcaccggctttcttcatgaacttgatgaacaaagtgtttatggagtttcttgacaagtttgtcgtggtgttcattgacgacatacttatttattcaaaatcagaagaggaacatgagcaacatctccgtctggtactcgagaaattgaaggagcaccagttatatgccaagttcagtaagtgtgacttctggttgtcggaagtcaaatttctgggtcacgtcattactgctcaaggtgtggcagtggatccatcaaatgtggagtcagttacaaagtggaccccaccaaagacagtttctcagattcggagttttcttggacttgcgggctattaccgtcggttcatcgaaaatttctctaagattgccagacccatgacacaattgctaaagaaagatgaaaaattcaagtggtcagttgagtgcaatcaaagttttgaagaactcaagaagaagttagtatctgcaccagttctgattctgccggatcagacgaaagactttcaggtctactgtgatgcatctctcaagggctgggatgtgtgctgatgcaggaaggcagagtggtcgcatatgcttcgcgacagttgcgtccacatgagagcaattatcctactcatgatcttgagttggcagcagtggttcatgctctgaaaatctggcggcactatcttattggcaaccgctgtgaagtctacactgatcacaagagtctgaagtacatcttcacgcagcctgacttgaatatccgacagtgaagatggctggagttaattaaagattatgacatagggatacactatcatgcaggcaaagcaaatgtggtagcagatgcttttagcagaaagagccattgcaatacagtatataccgaaggcatgtgtgacaaattgcaacaagatctagagcacctaaatttgggcatcgtggaacacgggtacgtagctgctctagaggcacgccctacgctcgtggatcaagtcagagatgctcaggtaaatgatcctgaaatagctgagctgaaaaagaatatgaggattggaaaagcccgagattttcatgaggatgggcatggcacaatctggttgggagaaagattgtgtgtacctgacgacaaagaactgaaggatctgatactcactgaagctcatcaaactcagtattcaattcatcccggtagtactaaaatgtaccaggacctcaaagaaaaattctggtgggctagcatgagaagagaaatagctgaattcgtcgcactctgcgatgtttgccagagggtaaaggcagaacatcaaaggcccgcaggattgttacaacctcttcagatcccggaatggaaatgggaagagattggaatggatttcataacaggtttgcccaggacatcatcgaggcacgattcaatctgggtagtcgtggatcgactcaccaaagttgctcatttcattccagtgcacactacctatacggggaaaaggttggcagagttgtacttagcaaggatcatgtgtttgcatggggtacctaagaagatagtatctgatcgagggagtcagttcacttcaaaattttggcagaagttgcaagaagaattggggactcatttgaatttcagcatagcttatcatccacaaactaatggtcagaccgagcgagtcaatcaaatattggaagatatgttgagagcttgtgcacttgactttggcggagcttgggataaaagtctgccttatgcggaattctcttacaacaacagttatcaggccagtctgcaaatggcaccgtttgaagcattgtccggatggaagtgccgcacttcgctcttctgggatcaaacaggtgagcgccaactgtttgggacagaggtgctaaccgaggcagaggaaaaagtcaggaccatcagggaaagattgagaatcgcccagtctcggcagaagagttatgctgacaaccgccgaagggagcttatttttgaagcaggggattatgtgtaccttcgtatcactccgcttcggggagtccaccgcttccagactaaaggaaagttggcaccacgctttgtgggaccatacaggatcctggaacgcagaggtgaagttgcttaccaccttgagcttccatctaatatggctggtatccacgatgtgtttcatgtatctcaactgaagaagtgtttgagagtacctgaggaacaagctagctcagagcacatagacatttaggaagatctgacatatgtggagaaaccgattcgtatcctcgaaaccagtgagagaaggaccagaaacaaggtgatcaagttttgcaaagttcagtggagccaccactcagaagaagaggccacctgggaaagagaagatgagttgaaggccgcccatccgcacctcttcgccagctcttccgaatctcagggtcgagattctgtttaaggggggtaggtttgtcacgccctgaagttcttctccctagcaaaaattcaattgataaattgttttaagaaattatttgtttaaaggcaagagagaaaccctaaattaataaatacagttaataatcagaatcggcgtgtggaatttttcttggattctacgtgtcaaaatatgctaacaggatttttagtggaattttcagagccttggaaataattttaaccaattaaaaatgagcatgtgcaatatttaaatcccaggaaaaatcttttttcctttttcttcttttctttttcccattttcctttgttgggctgtcggcccactcctcccgcgcgcccgccctcctctccgctgggccggcctaagccgcctccctcctctccccgggtcaccgataggtggggcccacctgtcggccccgtcttcaacctccgacaacggcagccgccgccgaaaccgcccatgccggtgccgtttcccgcccttcccgcgcccactcctccccactccgtgccgtgcccacgtcgtcgccccctatccgctcctcccaccctcgagcgcgcccgagaatgggcgggattcatttcgaatccccccccccaactctctctccccattcccccacgtcgccggccaaatcggggggtttcccggccgtgtccgcccctctcgagcccctataaggctcaccgccgccgccttctccacgcctccggccgccactagcgccgccgccgagccgcgccgtcgtcgtcttcgggttcgcacggccgagggctacctcgtccacccctccgtcgaattccgccatcggaggccaccgttcgccgcgcaccggtgagcccttccatagccgtcgccgtcggccatggttctcgctcgccgtggactccctctctccctctaacatctctcatttcctctcttagggtgtcctggagctcggtcgccgttcgccgtcgccctccggtcgctcaccgtcgccgttcgtcgtcgtctcctcccatgccggccgaaccacggtgagaactccctccccttctcttcctctcgcgcgcgccgccgctcccggcatgcgtgtcgccgcgatgcgccgtcgtccgcgtcgccggccgccgccgtcttctcgccggtcgccgccgtctatggccgcttgccgccgccgccctcgccataaccggctggccggcttgaagccgagccgagccaggccgccttcctcctcctctttgagccaccgcctagtggggcccacccgccaggtcacctccctctctcttgtgccgctgacccgtgggccccgcctgtcggcgcagccctaccccttggatgatgtcagccctgggacatattgcgcaataaatacattaaggcttttctttattagtaaaaacacagataatcttctaaaattcatatctaattcatccgagctccgttttagtccattcaagtctcagtaaattcgtaaaaatgtatagaatccaattaaaatggttttgtttcctgtttcagtagacttatagcatgttttgcttgtgtgctttgtttgtcgcgtagatttcggtcgtttcgtcgatccgtggctcctcgaagacattgtcgtggtctcatcagtgcgagagcaaggcaagtcatgcattacaattgatcatattgtacccaatttacaaatgtcccgtatttctattaaatgttgcattgttttacaatatcatgtgggatgggtcctactactcagccatatattgtttaccttatgccatcgataacttgggtatcaaaatgattagatgttggtttagggaacgcttagccatgcttagttcaactagtacacaaaggggaatcacattaatgcatggactttgattattggcatagctttggattagtgccaccgcaatggtgttagttaattaaagtacactacatggtgggctgtgggtgcatggttttgctagttgtgcccatggtgattaaggaccggttcgctggaaaccctggaagaatttatcgtgcttaccacaagccagcgtgggcaacgattgggcttgtagtgtagcttccctctagccgacgtacccaggcgagggtgggcgtgatggagttgggtcggccggggtgtccggttgatcggcttccggattcaccgcggcacgaaaggggggctgcccgttgcccgctggggacgggggcgaaccctaaggtgtggtgcgatcggttagagggggttatgcgaagggtcctgtcacggcctcttttcggtatgtcgtggtggcatgtcagtgcacggaaacgtgtcgtggggctgtgtcttgtggatacagttgtacacctctgatcagagtaaaactattcgaatagtcatgcccgcggttatgggcggtcgaccagattcaccgtaattagtctcacccctagttaactaatggaactagttagttcaggtggtggtttgggcctgtctcaacgtggtgtagcattgagcaatgattggttaatattgattaattactgcaactgttttactgctttcaactactgcttttaaatgctagctttatgcaaaagaacctttagcctcccttggatatatcctgcatcatacctcctcttccgatatgacttactgagtacagtgggtagtactcagtcttgctctctttttcccccacaccagagttgaagttcttctctgttggtgatgtcttgaagaggttggtttcgtcactgccgtcaaggattgcctgtggaatggagttgcccgctgcaggagtcaattcttcaggcttatctcgtttttttcttttccgctgcatttgtaatcttttatatttttgtaagacgtggatctgtatgtcaacaattgtcgtttgtgtgccctggctggacgaacgcatcgcctcttctcctcctccgtcgatgcatcgcctcctctcctcctcacgcacctcccatgagctgtctgacgtcgccgacatgaagctccggagtggcttcgtgtacgaccggacatggccatgggctattgtcctagtggtgcgggtcaatttgttgctgtttggaggcagagagccggcggagagctcggactcgttggtggagatgtggaccgaagatggcgacggcgtccaggtttatccagatggtgccacttcccgacgtatagcgccgccactttccccaaggaagccgcaccaggacgtggtctaggttccatccccctctaggtcgtcacggctttccccaatgacacttgccccacagcgcgcccgcgaccacgtctcctagccgcgcgcggcttcgcctccgcccaagaacacgttgcttgagttggacgcacggtcttccttttggtgggcccagttgcaatggtggcacctaattctctcgaattgacgacatgtccgcccaggcagaatgccacggtggagcattgtaaaggctgtaaaagggtgagtttgaggagaaggggatagagaatattggaaagatacgcaaaacgaggtgagctattagtacatgattaattgagtattaatttttttaaatttcaaaaatggattaatatgattttttaaagcaacttccctatagaatgtttttgcaaaaaatataatgtttagtagttcgggaagcatgtgcgtgaaaaacgaaacaatctcactatttgctgctgccgaacgcagtgtaggctgtgttcgggagaaggggttgggaacccctcctccccggcacgcgaaacgaaccttgtattattgcatgattaattaaatattaactatttttttaaaaaatggattaatataattttttaaacaactttcatatataatttttttttataaataacaccatttagcagtttgaaaagcgtgcgcgcggaaaacgagagaggtgggttgggaaaatgggggaagaacacaggcttagagaagagaacaagatgattggaagtttagataagacaattgtaatgacgagattattatgaggatttgatttttttagtcttattttttttttggtatagatgtgaaaattgacaggaagttcagatatatgaaaaataataactaagatttgtttaggtaaagtaaagtagaaattctctctcaattaccacttcctaccaggtattgaaaaggcaattacctcttcctaccagatattgaaaaggagggagttcctctctcatttcccattccatcacatcccatcaaaactcatttgccttctacctgtatatatccaatggtaaattgtatcttattgttcacatccaacggctaatattatttaaatgacgtggcacattcacgtcacatcatgtgattcacttttccatagttaagatgtaggtaaggatgttattgcacagagatgcaactggggttggagtagaactagctcccttttaaccatctttcgtgctcgtcgatgatgtgtgcccccaactcttgggcataaactacacgaagtaggaagctcaggaccacatgtcacgcccggaacttctatccaaaattccaaacgcttacatgtgtgtgaaccctcgtccaggaatcagccgatgcacacaataacaaattgataatagagtacaaatattactctaattaataagcgaataaaatgtcattacagaggtagatagttcctctcaatcaataaagttctaagcagcggaaaaaaaataaacggcgcaggcggctccactccacaggcagcttgaccaaggctacacctaatcctccacaccatcagcctcattgtagaactcttcctctgatgaatgattgcaaggtgagtatatgacatactcagcaagccacgcagcaaatatgcaagtgcacaggataacaaaggatggcataatagggttccatttgcaaaagcagcatttagcaaacatttgagaatttgataaaacagttaagtaataattaagcaatattaatccaacgctatacaacataccctgttgtataggcccaaccattctgaacaaccaccccggctgcacagttctatctccaaaccaggaatgtaccattccaaaccaggagctaatcaaattattaccagttatagcatctgttactatgatgagaggtgtgagactaatcacgaaagacattgttagacccgcccataaccgcgggcacggctattcgaatagttttactctggccagaggtgtaccactgtacccacaagacacaaccccacatcatgtcaccatgtgcctcaataccaccacggtatctcggaaaggagttgtgacaatacccctcgcataacacaattcactgcagcgcaccttcctggatcataatcacccccttataaacaaggcatggactccccagcgacccccgtgggcttatctccgccacttctcagtctggtgccccgcaatgaaccatgctatacaaaagataaagccgttgcccatgctggcttgtggttggcacgataaatgtttcacaaccgaaactcgtgaaccggtccttaattgtcatgagcacgaccatcaaaaccatgtgcccacaacccaccattatcaggttttagttggcacattaattaattaactaatcacgattgaccatcgtgaactatcaataagccatcatgaaataatagtgagtcattagttatcccataagtgtaataatgtttctaagcagggctaagcaattatatctaatatctagttgaaccaatataaataaagctcaactagtcaaattataataacccaaggtatcaaggaataaggtaatcaagaacaaaagggccataacaatcaataggttaattccacccaatgacattcgaaaatagatgcaatagttgaatagaaacaatagctttaaataggatcaacatgctcaaagggttgtttgggatctgtgtgacttgccttgctggccttggaactcttcaaactcttcttccgcgaaaacggactctccggaaacgacggaatctaagcagaaaagagcaaaatcaccaaaacagcacataaacaagcatgaacagtacatgtggatatttttaaagtgtaggtctcaattttagaaaaatttagagacttgaaccaactaaatcggagctaagatgaattagttatgaatttttaaagattaaatcggattaaaacacttaaatcggttaaaattgaattatgacgcaataataaattatttttgaaaaggaaaaggggatttattgcgtcagcgggctagggtttggtggaccgggcgcacgggcgacggttcacgcgaacggacggccgagattgatccgatccaaaacggacggccaagatcgatcggtctacgaccggctcacagcgaacggccccgatgacgccagcgatgacgtcaccgacggcggcggcggctcggcagctgggtcggctcgggcggcgcacgctcgccggcgaacggcggcgcgaggacgctaacaaagggcaccaacgggtagcggacggcacggcgaactcaccgacgaccaaaacgacggcggagaagcaacggacggcgacggcgacgaggaaggagcggcggctaccttcgggttgacgacggcgacgatgctccggcggtctccgacggcagcgaaggggcggacgaggacggcggcgacttggcgagcacgacggcggtcttcccgagcggcggcgacagctggagcgacggcggagcacggctgaagcggcggcggcgaaggcaaagctagggcacacggcgctagggctactccggcgacgagaggcgaaggcgagggtggcggcgagaagagaagagcacggggatccttttaaaggggctcggaggcggcggcgaaggcccacggcgacggcaacggcgaaggaaactcgcggcttggaaagagggaacccgatccgaatcgaacttgattccaccgctttccaaagcgatttagccgatgattccaaagagaaaaaggtagaggagatcccggagattgtttcccctcaaccaatttggccggagaaggaaagaggcggccggattggaaggaaacagcggcggcggctcggcggcggcgcgctagggtttcggcccgaggaagacgacgggcctgacaggtgggacccacctgtcagcggctgcgagggcgcgcgcgcgcgcgggcggctgcggactgggccggctgggccgagaagagagagaaggcggttttgggccgactttcggcccaaagccaaaagaagactttttaaaaccttttcaatttaaattatttcttaaatgcaattccatttattaaaaatacttccttagctcaaataaatcccagaaaaatctaggaattatagaattaagcaaagtatttaatgaaattttatctggccactttttatattggaatttattaattaaacttagattttcttttcaagacttttaaaataaattctagaaattccatttaaacaacaatttatatattttgaattttcagggtgtgacaccacagtagggaaggattcgtctccctctaactaagggatgaatcaacgtggtggccttcaccagtttgggtctagccatcttcttgttgtcggggcatcatatggtgattgtgccatgtgaggatgaaggagtagaacgcagttaaggtgaaggcttggttcacgcttcttgccatcctcttgttgctcaaccatcttctttagcttgtcgacctcccgcaatgcaggtgtctagctttgtcagcttagacatgttgaagaagtggtggccatcgcctcatcggtgcttggccttgaaaatatttccaccttgttggtgtcgaacagatgatttccattgcttttgccttgtctgtgcccaacaatggaaattgatttgcatcatgagagttttcaagtcgatgaagtggcttcgccttgtcgaagcgtagccttgaaggtcccccttatcggtgtcggatagatgatttattttgactttgccttgtcagtgctcgacaatgtaaagagcttgagtcgtcgatgtagtcgataatgagtcggaatatcatcggcgatgtagaagaggtgggatgttgtgcatattgctcccgatgtctcctatgatgatagctggattgtcatcagctacgtagaaggacatagggataccctagtgttgttgatgtagttgacaacgcgcttgaatggcaacgtcgcgtaagggaataaggaggtcatatagcccccaatgctagtgtagttcgtgatgcgtcaggatgaaagacgtgggtctgtgtagtccccggtcttgttgaagtagatgatgaagtactggaagccatcggcagtgtagatggaagacgggtcgatgatgtcatactgagatatcgtcagtattgtagatagaagagagggttggtgttgccccctaccatgaatatgatgatgttgtgtcaagataacattggcggcacataaggttgtgaaggcttcaagtgaccttcttatgatcaatgttggtggaggatgctccgaagtagacaacgatgcatgggtcacatttttttagtgcccattggccgccttgatgtgcagactttgcatcacccgtatatctttatcacatcagactcgatcagctctagggcctctttcaattgaatcatttgcatctaggcaacaccaactactccttcatatagagattagtgccactcctgaagactgtcgaagaagagagtgactcaaattaggtcacttgcagcgtttaggagtagctggtttagaaagatccaacatagattcggatcttacatgaccaccgctcttattgaaaatcatcatgcatcatcatgttgtttataggttggaggagttgacgaagatatagacgatgaccactaaagcacagcaaagatgggaggataaccaggtcccactgggcgtgccaatttgtttaggacagaacaaataacaacgataacgatatgcgagggcgtgtcagtgtaactaagtacacaaaataaacaaagaacatagggaacatgtgttttattaatctcaaggatcataaatacaaattcccaatgtaacatgtatatatgtgtgttggtggctgttaaatgctaattttacgccgccaatacctgcgtaaatcaaggaaataaaacatccaacatagtaatagggtttaattctaacatattccactagtgttggtgtatatttgaatacaggtaataaaccgccaaagttggatgaaattcagacttaagtgaagacgaagccctatctatacaaagagtgggctagaaactacacagtaatatgcttaaaagggccttctactcgtagaaatggatactaaaggaggaggagaagcaacatgctgctgaagtgtgggcctgttgggccaggcaatggttcggccgaacccatggttcggacgaaccaccagctgcactgtcggatccatgttttggcgtggacagtccagatctcctcctaatggtggttgaagggctaaaaggacatttcgcgttttcctaaccatcatacctaccctatataaggacttcaccttttcacttcactcacacactc

SEQ ID NO: 24207 - DNA, 1197 bp, Oryza sativa
atcctaggtgccaaatttgggtgtaaacacatgcccccctgcctttttgatgaacaacgtgaatctaaaagcatagcatatgtttttggtcttaggacgataatctaattaccggccatagtacctcctaagtgtcttgccaaacgctcgggaagtatttcttcaagtacttcccgttgattgctcgctgaaaacgctccccttggagtgtctccaaaaaatacgcgttccctcgaacaatgccgcatacttgataaggaccctcccaactaggagaccacttaccgaactccttggatcgagtacccaaaggcaaaattgtcttccaaaccaagtctccaatttgaaacaactttgctttcacccttttgttgtatgccttggccaccctcttcttctctttctctatctcctccaatgccctcaagcgctcgtcgatgactccatcaagattatctcccatcaacgtcttgtaatcttcacttgacaaatcatcttgcttgatataacgaagagaactaagatttacctctaccggtaaaacgacttcttgaccataaaccaactcaaaaggagtgactttagtggcaccatgtttagatatcctatgagcccacaatgcttcggaaagcacctcataccacctctttgggtgttcctcaatcttcttttttactagcttcaacaatgtcttattactcgactcggtttgtccattagcctgagcgtagtaaggagaagaactcaacaatttaatactataagattcggtaaaactcttcacttccttagacataaaaaagcaccttggtccgtagttaatgtttgcggaataccgaatctatgaataatatacttcaaaataaagtcaattaccttcgtatgagtcatattcttcaaaggcacggcttcggcccacttggtgaagtaatccgtagcaactagcacgaacctatgcccccttgatgacgaaggataaatttgaccaacgaaatctaaagcccaccctcggaacggccatggtttgattatgggattcaacacggtggcaggcaccaattgaacattgccgaaccgttgacaagcctcacatcccctataatatttgaagcaatcattaatcatcttcggccaatagaatcctgccctcctaagcaaccaatttatcttgtgggccgattgatgagttccacaaat

SEQ ID NO: 24208 - DNA, 1836 bp, Oryza sativa
agaggattctgagatatctaaagcatacagttaagcttggtttaaagattagtaaatctaactccttgcttgttagtgcgttttctgatgcagattgggcaggatgtttggatgacaggctatcaactggaggctttgctgtgtttataggacccaatcttgtgtcatggagtgcacgtaagcaagctactgtgtctagttcaagtacagaagcagaatataaggcattggctaatgcaactgctaagattatgtggatatagaccttacttcatgagttgggagttcaagcgcctaaaacagctaaggtatggtgtgacaacattggtgcaacatatatgacagctaatcctatgtttcgtgctcgtacaaagcatattgaagtggactatcattttgttcgagaacgagttgcacggaagttgttacaggtagaatacatatccacaaatgatcaagttgcagatggattcaccaagactctaactgttaaacagttagagatgtttaggaaaaatctaaaccttacaggataagattgagggggagtgttagagttcggatatattgcatgtacatgtgataatgctcccgtatggctgaggatagagtttgttgtgttagttagacaagataggatcaatttctgaaatttagctgtacacaacaaactctcactgaagctatttatctcttgtatcctgttgcctggtttgtggcattattatcaacacgtaacctcctctctgtaggagttcctcgcttccacactcggcgttgccacagcgatgtacacgcgtcgagcgcgcctgagaggtgtcggcgccgatatctccctctcacgttctctcttgtctgctggtcggttggaggagttgcacagagaggaagcgagccacagccactgatgagtgggcccaaaacgatgagaccaaggttagggagaaagggaagggtagaaacataggtagacttgatttttggacgattttccaggatatatttctcttcccttctttgttaattcattcattaatttgtgtcgcagatcaattcatgtggattttagtggaggtagataaagatacctcagattccatttattagattccattttctttggttgcactaaaaatatatggatagattactcacagaaattagcagacgatgggctcgttggaaactagttagaatttttagaagagctaaacaaaggaaataaattctggaaaaattatatttactcatgataattgaactagtatttgaataaattattttctctatacacttccatgcagttaaatgcacttttaaataaagtatggtttttgccgattaggaatagtctattattcgactggtttgattgatttatttgaggtatcaaatttagttattaaattgtatcaaaattactgtgtgttgtatatgttaagtgagcgtacatgaattttcccatgattttatcttgcacaaattattttagataattagcaagacttatctcttatatgtgtttccctttcctaaatgtatgtaaatgtttataaaagttatatttggactcttcttaacctgagatgatgttgatatgttagaattacagtttaccttacacatgtcataagcttcttacctatttatgtataagtttactttagtataaattaagagaatgcttatagagacgattaagatagaatttaccctatatgagttaatttatttattcactttcatgttcatgacttgtctttagatggatgaccaaattagttttgtggggcttgacatcggccttgttgatatattgtaaggtgtactatggtt

SEQ ID NO: 24209 - DNA, 24400 bp, Oryza sativa
tatatcggatagtccgatattttttagccaacactcagacaaagatagagggcaaagttctaagaaatttcggatagtctgagcatcggatagtctgatcaggatcggatagtctgacaggaataaaataggaacagtccaaataaaggattttgagaactagtgttctaccaattatatgcatgtggtatccctcttaatagtacggcatcctaatacaaaacacaagatatacatggaatagaagacaattaccagaaaatatgccgcaaagcttgtaaattcaagttccactcctttttatccttgcatccatctcaacaaagagcattagtgaacctctaattgtgttgtcataaacaccaaaataaatgaggggtcctagatgcactttcaatctccccctttttggtgattgatgacaacacaattagaaataataaaagattaggatttaggtggagctccccctaaagataagctagaaaagaatatgagagctcccccttaatctatgcaaaagattagaaatcacaatataacctcatgcatatgcatatgacaagatacatcactcatttaagcatggataagagataatttcatataacatgcacataacatcatccaagtctgcgaggttcaacaagacataaacatgcataataaagactttaaacatgacacaaaagcccaatgttcaactagccaccacgaaaacgagatagattttttttaaaagttttgataggtaggttggttctccccctttggcatcaaggcactaaaagggaaaagagagtggatcactcatcctcatcaaaatccttgtcctcctcacttgactcctcatcattgtcatcttcctcctcttcttcttcttcttcttccataggagccttgccacgatctgcacgagaggagcttgcctcagctgcaaaggggtcctcaaatacatcctccccactgtcctcaacctcaaacccatcgggagaacacagctgtcggtgacatggggccgggggtatcgtgactagaggcttgggtagccgcggtcacccacgtggcctgaccccctcgggggggtcgggcccgagggtgacgtggccacccctccctctgtctccccgaggggtcgggccactcccgtttcggccccgagggctggggcgccccgaccccctgtggttttggcgccacgtgtgtgggttaggtgagcccaccgggctcacctaaccgcatttatagcaggttggacgagcgcgccacgccgcatttaatgcggcgcagtgcacgcttatccggtccgtgaccggtcacggtgtgtgaccggtcacagaccggtcagatcgcaggttaggtggcaataggcggcctgtcacacacctcgccccgtcccgtcggaatgatgagagcttcctggctctcgtccctagccggagccggtgtgctaactcctggagttagtatgtcagtcccggtcagatccattccaggcttcagcgcaagtatggcaaggaagtcgctggccattaaatgaatgttgaaatgggcgtccaccggaaaagcgggcgagcggggcaggaggcgtgtgctctgcttgtcagaggtcacttccggatgtagactagccctcattgtaaaaagcatgtttcttttcttaggcagcaggaggcccgtgtggtgaccccggaccagataaaaaggaggcccaggcctagagggaaaaaaaaggaggagagaaaagagaaaggggttgggactctggcgaatgggttctagagcctgaactctctctcgctctccggctctctgtattccttcacgcacagatccaccagaacacaggagtagggtgttacgcttctcagcggcccgaacctgtctacgtcgcccgtgtcttgtgcatttcctctctcgctgacgttcctcagatcgagggcgaagaacctcacttagcgcccccggccgaaccggcaaaggggggcctgcgcggtctcccggtgaggagccccacgctccgtcaacagcaaatgggcgttgtgaaggaggttcttgatccgccgagtgtccttcttccttgctctgcgttccttggcttgatgaactgagatggttttgcacatgttaaagatggacttgaagaaccgcaaagaagagttggagtccgacgaggtgacagtagcggagggaccagcacgagaagaagcacgagtggttcgaccagccggcacggaaacagccttgatgggacgaacttggtaaccggtgtgagccacttccttgtgaaacttcttcttggacacaatctcaatcatcttcataatgtaaggcccatagccatgtcctcgcttaggtatcatggagataagccagattttttcaaagatgaagtcaaaagcatcaaagagctgtgggtgtgccttcatcttgtggagcaaatttcttgtataggcaaggacattgctagcatcaccttccttaggattaagagttttgcgcaagagcttgttgagataggcatagaaaggaaggagacctttgatggtgcctaactcatagtccacatcttggtacaagaagtgaagagaatttgtgtccatgggcttctcatcatgaatcttgacacgattggtgcgagagcgagccggaaaccccaaaatggcagcaaacttggcatatgtcactgagtatatgatgccatctgtcatccaatggataatcttttctttgtttggctcaaagtaaacggtagcatagaattgtgcgatgatctctttgcaccatgggtattgcaagcccattagttccttcaagttttgccgagcacaagcttcaatgacttcattaataattggatcatgcaactcctccatatacttccaatcaacccactgcatgagaatcgcccccttcttaggtgcaatcactgtctcatagtagtcctgctgaaaaaggttccaaaaccgaggatcagtggacaactgttgatatttgtagggatctttcttacgctctttctccacttcagtccacttgcggttccaccttgtgactctccgatgataattaggatctctagagggagcagtgacaaagaaaggcccttcttcatgagcggcttgctgagcggcaatgtcctcttctaactgaatctcttcctcaaaggatggagcatgagaaccactatcttgccccagatcagaagaagccgtggggttgcctcgcctcactttgctagttggagcacttgagccttctccactgactcggctgcggcgaggggggaagaggagcacctcgctccacatttgccacttgagctgctatatcttcagaggcttgagcttgcgtgtcaatagcatctttgcgggattcggacattcgacgtatagcatggcgagctttggaagtgggagaacgacctcgagaactcattggaacacggcgagagtaaacttgattcttgaactgacccttgatcatgaggatacactgatttagaacagaggataatgattaagaataacttggaaggagaatatttaggcatgaatcaaaagaactttgatctaggccaaaaggaggtcggatagtctgatttgccgttggactatctgatggcatatcagacattccgacagccatttgccctagaccaacaaatctcgattcacacaaaaatatccgatggaatcaaatgatcttctaggaactaggtctaggcactaaaacaagatggttcaccgaagggaatatagaaataatgcaccatgacggagatcgaagaaaaacaaggaaatacctcaagaaccaccaagaaaatcactagggaaccagtgatttggaaggagttgagggagggaaaccaccccaaagcgaaggaatagcagtcggagacttcgaaacgaagatttttggtggccaagaactagagttttgagtggagagagaaaacgactgctccaaatgggtgaaggggtaaaaaaaattacccctggggaggttaagtccccttgccctcggccccacgtcggatagtctgatttgaaatcagactatccgatgtggtcggattgtctgacatcatgtcagacagtccgacatcctttggcagagacaataaaggatggcacaaagagaatgaacttgatggctagactattacttgggcaaaagcagcacaagagaaataacttagcaccctcgagagagggaatgtacgaatctatagcaaattgtgcaaggaccaagattcattagagaatgagacccccgtacacatagattcaagctatccacatagattatgactagtgtccattcatgaattgaatgtgcactttgtcatgatgtggcatgcaaacttattctagtaaatgaaaataaatgtatgcaaaagatcaagccacattccgagaatccaagatatttagttcatttctcaactcacaaaacctagcttcatctagaggcttggtgaagatatccgccaattgtttgtcggttctcacatgttggatgtctatgtcgcctcttgtggaatggtctctcaagaaatggtggcgaatatctatatgtttggttcgggaatgttggacgtggttattggctatcttaatggcgctctcattgtcacatatgagtgggattttggacacatttaggccatagtctctcaaggtttgcttcatccaaagaagttgagcacaacaactcctagccgaaacgtattccgcttcggcggtggatagggtgacggagttttgcttcttggaagaccaagaaacaagggacctacccaaaaattggcaagtacctgatgtgcttttcctatccactttgcacccgacataatccgcatcggcatagccaatgagatcaaacctcgctcccttaggataccaaagacctagattaggagtgtgcactaaatatctaagaattctcttcatggccacaaggtgacactccttcagagcggcttgaaatcttgcacacatgcacactaatcataatatcgggcctagatgcacaaaggtaaaggagtgatccaataatggaacggtataccttttggtcgacgtcttttaatggccatttgatggcatgggagtgtggattggcttcgcattctccattccaaacttcttgagcatgtccttcaaatactttgtttggcaaatgaaacttcctaccttgagttgcttgatttgaaggccaaggaagaacttcaattcactcatcatcgacatctcaaaacgcttggtcatcatcctactaaactcttcactaaaagacttgttagtagaaccaaatataatgtcatcgacatatatttggcacataaaaatatcattatcatgtcttttagtaaaaagagttgaatcggctttcccgatctcaaagccgtttttcataagaaaattgcgaaaacactcataccaagctctaggggcttgcttaacccgcagagtgccttgtggagcttgtacatgtggttgggatattttgtatcctcgaagcttggtggttgctccacgtataccaactcgttgataggcctgttgaggaaggcgcttttgacatccatttgatataacttaaaattgaggctagtagcaaaagcaagcaatatgcgaattgactcaagtctagctactggctcaaaagtttcaccgaaatctaatccttcaatttgggtgaacccttgcgccactaacctcgccttgttccttatcatgaccccggcctcgtcttgcttgttgcggaagatccacttcgtgccaatcacattttgccaaggtcgctccaccaaagtccacacttcattccgggtgaaattgttcaactcctcttgcatcaccatcacccaatctggatcatttagagcttcttccacccttagaggctcaagagaagacacaagcgagtaatgctcacaaaaatttgcaatacgagagcgagtggatactcccttattgatgtctcctaagatattgtcggtggggtgatctcgttggatactttggtagattcttgggtgagctagatttatcggagagggtggcacttgctcgccttcttcaccttgatccaagcttgaagtagagggatcgtcggcttgggtcgatgtaggtggctccacttgtgttgaggaagaggccccttgttgtggctccctaggacgtacgtctccaagagccaacctcttgattgcttcgctagggacctcctcttcacctaacacatgcgagtcaacttgatctacttgagagccgttagtttcgtcaaatgtcacatcacgcgtgatctcaacaataccggaggttttgttgaaaacgtggtatgcacactcatttaacccatacccaagcaagaacccttcatccactttaggagcaaactttgaggatctagccttcttattaagaatgtagcacttactaccgaaaacacgaaagtaagagacatttggtttgttaccggtaagaagctcatagggactcttcttaagaagacggtgaagacagaggcggttgatgacgtgacatgcggtgttgatggcttcggcccaaaagcggtgcgatgtcttgtattcgtccaacattgtcctcgccatgtcgatgagagtccgattcttcctctcggctactccattttgttgaggtgagtatggagccgagaactcatgcttgatgccttcttcatcaaggaaactctcgatgcacgtgttcttgaactccttgccattgtcgcttcaaatgttcttaatcttgaggtcgaactcgttttgggctcttcttgcaaacttcttgaagatggcttgtgtctcactcttgtcatgcaagaacacccacgtgaagcgtgaaaagtcatcaacaataacaagaccatatttgttacctccaatgcttagataagcaattggcccgaagaggtccatgtgaagaagttccaacggtcttgtagtagtcattacgttcttgaccgggcgatgagctccaatttgtttcctggcttgacacacgctacacaccctatctttctcaaaaagtacatttgttagaccaaggatgtgatcgtgctttagaagcttgtgaagattcctcataccaacatgggctagcctccgatgccaaagccaccccatgtcggacttagccactaagcatgtctcatgtttggctttagttgaggaaaaatccacaagataaagcatccccttaagaacacccttaaagactaccgaggagtcatcccttctaaatacggtcacatcaacatcggtaaaaagacaattgtagcccatggaacataattgagaaatggacaagagattatagtttagagattttaccaagaggacgttagaaatggaaagatcattggagattgcaatcttacccaatcccattacttttccctttccatcgtacccgaagagtatgttctcttgcaaagtgccatttggatcaagggaagaaaacattgattcttctctggtcatgtgatttgtgcatccactatcaatcacccaacttcttccaccggagagatattcctacaagagatcaatttctagttttaggtacccacactttcttgggtcatcttatgttagtgacaagtgccttaggaacccaaagaactctcttgatggaaacatttttgcccctaggcccaacatatttagcaaccacacgaccactagcattcttcctaagaacatatgatacatcaaaaggacaatgtgaagcatgaccattaggaaggatacttttggccttaacaaagatgctaagaccttggggcttcttgatcaacacactcttgtccacctttccttttggtggaggaacatacccaaggccttcatggttgaagttgtccctttgatagcctaggtatttctttagtaccttactacccatatggcacttaagcaagccattgtgaaggagtcccataagcttctcattttgcttttgcaaagcacttaaggaagtagagttagtagcacaagcatcaatatcaatatccttacacctagcacatggttcattgcttggaacaattttggaacaaggtgcctcgctagggagagagacactattctttaaggtttcgaacttctcttcaagagagagataagcttttgttgatgtaaaacatgaggcctgggagatctgcttaactctagtgcaggtccaaagctcgccttcgggtgtgttagcgtgccagttgatttgatcctgcaatcaacaagaaatagagacaaagaaaccgcggttaaacctataaatgatagacgatcggctaagtgccgatgacatatcatttatctttgagccgatgtcatatgtaaatcgatcggcggttataaatagataataaagtactaaacctactcgatcggctgtagatatcaacaatatataattttatatctatacttaaattgagtgattgggatagatcggtcgccatgtcgagacagtataaatcacttagattgaaatatatattaataacagaactatatatgtttatagcatagccgatcggatagatctagtatgtatcggctaatactccaatacaacactatgttaagatgttgaaacaaacagaatataccaaacataagcttaatatacttagatgcaataatatcctgacataaagggcagatttaacatgtcaatgaaacatataaagcaaatataattaaatcagataagatcagctgaaactccgatactaccctaatcggcaaccagaaggcaggctagagattgatattctaagcatgacttaataaatcaaactcaactgatacaacattaagtatgaaaagaagaacaatatctagacaatcaagtcgctggaagtttcatagagtggtggatatcttatataatctaaaccaacatcgatatttaacctaatcggctgccctctattaacagatgttagccgattgtaggctagatggcgatatcgttagagattatgtaagatatatgataactcagcaaattacataaacaaaattagagtatcataaagatggaaggactaatcccgagaacacaagccgacataacaagttttacctcttgttgaagatcgaaaccgatgcagctcaacccgaaagcaagaactcatcgaaataaaactaaagcaaaaagggtggcgatgcgccgaaattgtattgaacgtgtgtgttaaaaattacatagggctcggggtctatttatacccgagaattacaagatatgtccataccggacacgactattatctctaacaaactctaagataccataagtccttgcggcagacttttgcccatatttatctgtaaaaaatttatataaaatatcataattaatagatacaattgccttcccaggactttatccatgtatggcaatcatcttgaagtacgtcaactcaaacccgatatcgaatacaagtcgtattgtcggaatcggctgcatcacttaacccagtctgacttggacttaaccgatactaatcgtagccgatctgggctccagccgattcttgctctgttctcgaatcgatctccgccatcggctccacttcgatctaatcctcttttccgatgctgatattaccaaatttggtcgttaacacatgccccccaagtccggaatatttggtaatgtttcggattttcttaacatcgactccgagcaagtttcgcactttaccgttttccgactgttattcaagcgctttaaatactagggaaaattggaaccatgccattataattttgcaaaatttgagatatgccatcctgacccacatgtcattgactcatgtgggtcctgcatgtcattgagataccgatggcatatctcaaactttgcaaaattataatggcatggtttcaatttaccgatgccgcagagaaatcttacaccattactcccgttttcaccgctcaagtgaaactctgccttctctctaacggcgattcttccaatgcacaaagcgatttccaggcgacttcacccttggcgagatctccgcccgcaacgatgtcgtcctccgccagcccgtttgctgcgccatcagctgagtatgccgaggtaagtccccatcggctagatcccctttctcaacagcagatcgattttccttacctcacattgctcttcttctttccggttgctttggatttgcagcatctttccaacctaattgcgattcccagcttgtcgcatgaaaaccactattttctgggtccaatcggcaatcttgactccactgatttttcattggtgaaaccaataggatcccctttaggctagccaaccctaactgagccactggaaaaacactttcaagtcttggccatctcttgagaaaaccacccctgagaaaagttggatcacatggtaccagcgcgtatcggctaataagaaagttcactgggatgagattggaatcggccaagcacttgacctaaccatagcaacttagctaaggacgagcccttaatggcagccgcctcttatttttggtccaacaccattaacgccttcttgttcaaccaagggccaatgactccaactttgatcgacattaccatgatcaccggtttagatgtaacttcatcggctaatcccatgagcatgaacaccaaaaatcagtttgatttcagaaccaaaagcataggtggctggtctggctatatggcggcatatatgggccaaggatctgttacccctcgagagcatgtagctttcttgctcatgtggctagaaaagttcctcttctgtggatccagttgtggccctacaaccaactagcaatttgtagccgaagccttagaatcaaagaaagaatttccattaggcaagatcctcctcggttacttataccaaacattgaacaacgcatcggccaaaatagccgttggctcagtagttggtgcaggtagaccatggtggctgctacaaacctggttgaacctgatggttaggaaagttttcaatcagccgcctgtgacagaagctgagttcccattgccagagccgattgtaggagacgatggagaagaacgcactcatcacatatgcacatcatacggagaatatacatccacacaaaccgatgctcgagcgaagctatcggctgagctactcaaggactggttctgcagcttctacgaaggttttaagaaagatgcacgggtgtggttttcttatgaagactcagcagatcttgaacttccatcagactttagatttcaagacattaatcatgaaaaattccaaaaatctagagaagttcttacagcttcaatcagtccatgcatccttcatgtcaacattcaccaagggagaaacatctaagtctcctacgaattttatcacccaatgagctcggccagacaacttggattgtgccaactcccaatcagcttattctttgccgacaagattcagtgccgaggagaaatcacatccactctaatgatggatcggctacttaacctaccaggaccccttctgggcagtattgataatattgagttggcaggatttagaagcaaaaatttcgacagatggtggggtgaatggaagttgcacttgtttcatcaatcagcttcgatgtatatgacagatctattccctgatgtcatacctcaggtaaacctcaccattgttagcttgaataattgttagccgattcattacttgactaatctcttgtttttgttctacagacaatcgactcttcggctaattactcatagactttgtggttgcagaagaagaaaactgctgtgaagaaaaaaccagcagcaacaattgtcaagtcggctccaccagtaagatgtctttaattcttttacttaatcaatctcaaccggctctatataacacttgtctattctacagcctcctcctcctccttctcctcctgtacagcaaccgtcaagtgaccagactccatcggctgtggagagtcatcacatcgaggaggaagaacaaccagctgctcctgctatcccaataagtttttctttgtctcaataattagatcagctacattttacccagctcttactctttccgaaattgtctctgcaggttttagccgatcttttctcttttgacatcagagattatcttgataaggcagaagaagatacttcaagcaaagctttagctcctctatctgacgatgtaaagataacacttgaagatatctctcaacggctagctagaagcctcttctttagatagcttggtagttgactgcggatcaattaggacacggctgcatgaagttcaagctctgattcccgaagaattggccgatgtcctaactccagccgcttatcttgaacaacatcagttcaagctggaaaaagccaagctaagactagccgaacgccgtgagcgcaaggagattgaagccacaatccaggtcaatcggcagcttgtgcatgaagaaaaagtcaaactcgatcagctatctgagggtccgattaagtccaatattgatcggctcgaagctcacaagatcgatctcttggcacagcttgaagaatgcaatgctgaactggatatggagcacaaaaagctagccgatctcccaaaatctatcaaagaacaaaaggcaaggctcaaatcgactatcaagaatgttgctgacctaaccaagtccctgaaggtcatctctggaactgatgctcaagatgcccaagccattgaagaagttgaacaaattaggctatccagcagtacttatctcaataactcttgtgtaataggacctagaaatttttgtaatcggctaagatgccttaataccccgctgttttaacactacctttgtgccgattaatacaacttctaaatttgctcaaaaattttcactttcatcatgcgatttttgaatatatgtgccccccctaattttataatgtcaacagcattaataaaattatacaagcaacttagggcgatatagtaataccggccattgcacatcggtaaaccataaccgattacaattggaaaaaaaaaactaagggcgatataacaatatcggccatctctaggcgatgaaaattcatcggctatcatgtatcggcaacatcagccgatcatgcattaacccaaacacttaggtaatatttcttcaaatacttgccatttagtaattccgttcttctagagccgattctaacctcccatggcaaaatagcctcatgtccataaacaagcttatagggagggacttggatcgatccatgacacgccatccgataagaccacaatgcttcgtccaaccgagtatgccattgccgaggataatcagaattttttctcttaatcaatttgattaagctcttgttagatgcctcggcttgcccattagcttgtgcataatatggtgaagaattcaacatttgatacccatgctatcgacaaactgaacaaactcatcggacacgaaaattgaaccttgatcggttgtaatagtttgaggaataccaaaccgatagattatatgttcttgaacaaattgaattgcatccccagaatcaacttttttcaaaggaatcgcctctaccaatttggtgaaataatcagtcgccaccaatataaacttatgtccttgactcgatggtcgacttatcataccgatcatatcaattccccaacctctgaatggccatggcttaataataggattcatagccgacgccggcgctcgctgaattgctccaaacttctgacaatcttgacaccctttataatatttgaaacaatcttccagcattgtcggccaaaaataccttgcacgccgaagtaaccacttcatcttatgagccgattgatgagtaccacaaattccttcatgaacttcgccgattgcaactttagcctgatcggcactcaaacacttaagtaacactccatcaatcgtccgatagtaaagctcatcatccaatagagtatacttcaacgccttatatctcaatttcctagaagctgattgagatggattatgtaaatattgatgcacatcatacctccaatcaccggctgttattgctgcaatttcagccttaacatctttgatcatcggcttataccccgatgccccctgggccaaatcattagcttcaatattttgttctcgagacacatgctttaaagtaaccagccgaaattcctgcatcagttcttggcacttctcattataaaccattaatgtatcactcttgcattcatattcccctgccaattgactgattaccagcaaagaatcccccatgatttcaatagcatcggcttcaacttccttgagtaattgcaaccctttgagcactgcctcatactcagcttgattattagtcgcataaggttttatagtataagcaaacttgaaacatgccccccgaggggaaattataaccaagcctataccacaatcatgagtacacaccgatccatcaaagaatgaagtccatggcacaacttcaaccgagccgattgaatcatcacaatgttccacaataaaatcggctatagcttgtcccttaatagccttcggcgactcataccttagatcaaactcagttaaggaaaatatccactttccaacccttccttttaaaatcggagccgataacatgtatttgataacatcggctttgcatatgacagtacactcgttagatagtagataatggctcaaccttgtacatgaaaaatacaaacacaagcacaacttctccataggggaatatctagtttcaacatccaagagccgacgactgagataaaatacaacgcgctcttttccatccaactcctgaatcaagactgagccgattgacttctcaccggccgatagatataatctgaaagatatccctttctgtggaggaatcaaaacaggaggagagctaagatattctttaatatcatccaaagccttctgttgctctgccccccaagtaaactgctgatcagcttttaatctcaacaatggtgtaaaaggctctaaccttccagacagataagaaataaatcttctaacaaaatttatcttgccgttcatctcttgtagttctgtcttgctctccggaggctgaatcttcttgattgcattaacactcctttgagtcacctcaatcccctctcatgaacaagaaatcccaaaaactggcccaccgatacaccaaaagcacattttgtcggattcatcttcaggccatattttctggttctctcgaaaaccttcctcaaatcggctatatggtcctctatttctttagacttaacaaccacatcatcaatgtagacttcaaccaaccagccgattagatcatgatatatgtaattcatggctctttgatatgtagctccagcactcttcaagccgaaagtcatcacaacccattcaaataagccgattgcaccaggacatctaaaagctgtcttatgtatatcttcttcggccataaagatttgattatatcctacgtttccatccatataactcaaaattttgttccctgacgcagcatcaaccagctgatcggctactggcattgggtattcatccttcggggtagctttattcaagtctcagaaatcaatgcacaccctgaccttaccattcttcttaataacaggaactatactagaaacccattcagcatatcggcaaggacgaataaaacaagcatcatataatcgtttaatttcaactttgacaggttcaagcatatcggctttgcatcttctcagaggttgctggtgtggtctaacccctggtttgataggtagccgatgttctacaatcgatcggctgagtccaggcatctcataatactcccaagcgaagcaatctctgaattctttcaacagctctatcaacttggctctaaattctgtagataaattcttacaaataaatgtcggccttggtcgatcacctggacctatatcaatttcttccaaatcatcggccgatataaaaccctgtccttgtttgtcatcgagatcatctaccgtgtccttgatgtagacatttgaaccctccacaacgccctcgaaataacagcttgggttctccatcttcaattggctgtatattagaatcggacacttttagaaaatctctatcccaaacttttccagataaacaatcgagaccatccatctcccaaagagctaaatcagcactagcaacattgactgacctgtcggctggcacaatctcaatcttgtcgtcttgccactgaatcaagcattgatgcatggttgaaggaatgcaacaattagcatgaatccaatcccttccaagcaacaagctataagaaccattcccatcgatgacaaagaatgttgtagggatagttttgttaccaactgtcagttccacattcgaaactcctttggtttctgatagattgccgccaaagtctatgagcaccatgtttgtcttgatgagatcttcaacgtttctgcccaactttctgaatgtagcataaggcatcaagttaacttcagccccaccgtcgaccatcatcttggacattggcttcccattgacataaccatttatatacaatggcttaagatgccgattctccgtcccctctggcttctcaaaaattgcctgctctggcaacaaaatcaatttggctgattcttcttcaacttcatcgacatcggcttgcttggtcccaatctcagcaggcaacgtgaaaccatgttgaccgaagcagttacgacacttttccccttagctaacctttttgcctcctcagctgtagcttcatcggctacaggaacctgattcttaacacgccactcctgcctcgactttgttttctgcagccgatggttaatttcctgttcaacctcctaaaagcactccctgttcctcaatctttgaacccttctcttttgattcttcgtgaaaataccagaaggacaccactgatttttcctgatttcattgtcctcttggccatgatcttgattcactggacccaatctttgatgaacaggaactcttgtctgccttagccgattgcccctaccatatgatcggcttgaattcttggcaatatcactgcacccaggacagtcttcaatagacggcagccttagaccttcatttcaacaaaatctaaagaactcacaacctcaatgaggatcaaaaccatcgtcatcttcttcatgatgcttctcctgctgcttgtcatacttcctctgatatttgttgataatcttagccgaattcacctgaaaaccccttgcacggcccctatcggctgttcagccagctgtatgcaccatattaacaggaaaaggattgccatcaaccttcatcagcctcttagagtcgtcaaacttgattttgcctccctcaatagccgcttggatctgctgcctgaagaccttgcaatcattagtcgtatgagatccagaattatgccacttgcaatatcttttcttccctaattcttcagccgatggaattgtgtgaccggcaggaagttgaatctgtttctctcggagtagcaagtcgaaaatcttatcagccttggatatatcaaagtcatacctttcctctttacctgagttctttacccattggcatggtataaccttcttactccttacccactcggctgcagctatctcagaatcatcatcttcatcatccgatccatatttataagggcaaacatgattaaccttcctagaatttttcctagcctctgcatacctttgttcatgcaaggctaccttctgtgtaagatgtgacaggctttcaaagtcttcagatgataacttctccctaattggagcaatcataccctgaaaagccaaatcggctaactgggcgtcagttaaactcaagctgtaacacttatttctcatctccctaaatctctggatatactcatgtactggctcatcatgcttttgcttgattgacgtcagatcggacagtttcatctcatgaatcccactatagaaatagctatgaaactgcttttctaaatcagcccaactgttaattgatccatatggtaaagaagaaaaccaagtaaaggttgacccagctaaagacaaccggaataacctaactttcaaagcatccacagccgatgcttcaccacattgagctaaaaatcggctaatgtgctcataagttgatgtactatcttgccatgagaactttgaaaaatctggaactttgaaccggttgggcaaaggaactctctcaaaccacttaggatatggctgccgatatagatttccagcatctttcggcctaagcctgaactgctccttcatgacatctgcaatcaaatcggcccatggccactattgaggtgtcccttgaggttgttgtggcatcggctcgaattggttgtattgaagaacaaattggggctgagccgatcctgcttgctggtattgaacatgaggtgatggtggctgatattgataattcaaattgccccctggtaattttgaagatccggctgaatattacgcaccaaatgttcaggaataactagcggaattaccgtgccatctggttgtacgtgatgtactaaatgctctgggacaacctaatttgtagcatgttgcacaggctgcccaccaggtgttgcaaaccctgccgatgaattcattgaaccttgctgttgaatcggctggacaacctgttgccttaatggagtttgctgaaccggtcgtacaactcattgagctaggggtgtttgctgcactggttgcacaatttgttggatttggggtgtttgctgaatcggctgttgcgggttggatcaacagtgttttggggaggcaaaaacatagatgcaacctggtcttgtgttagccgatccacattttgtccagcgtgttgtggctgttctcttatcagcaatcggggattgaccaattggcctggagccgaaggtggtacagtaggtgcgggagccgatgctggtgccatcggctgagccgatggtgcaatagaaggagctgcttgaacggatggatgactgttggtgatcaaaggccgataatttggaaatactcctccttgcaaataaactgggcctgcagcttggtattcagctattgtaccatcgaccattgacttcatcatatttgacaatgtattgactaacatcccagattgattgatcaaagcattgtgcacggcatagtcaacccgatcttggaagttattgaaaaactcctatgatgcattgccatcctgattaaaatttcctccacgcaacccctaagcaacatcaccttgaactccatgcaccccatcaccttgaaccccatggactccttgagaattgtcacgttgacctcctagagaaccgtctgtagcaccattgtcactcggttgagccgagccgtccggagcttgtttcccgtcttcacctttagaagaatggtcccaggatcatcggcaactacctttactttatacttctgaaccactgttcccttgctagtctgcatgaatgagttcaagaattgatcccgtgcctgctgcatcatcgcgtcgaaatctttcttctgatcaggtgtgaatttttctggatcgatgggcacgacgtttccttcattgacgtcggtcaatcccaacttctggatcttttccttaacagtgcttggactagccgaggatggcgatagcggtggtttctcggccatgaggaagaattgcttgctgacttcttcttggtcccactgggcatgccaaaagcgtgttgacgtaaaacacgaggcctgcgagatctgcttaactccagtgcaggtccaaagctcgccttcgggtatgttagcgtgccagttgatttgatcctgcaatcaacaagaaatagagacaaagaaaccgcggttaaacctataaatgatagacgatcggctaagtgccgatgacatatcatttatctttgagccgatgtcatatgtaaatctatcggcggttataaatagataataaagaactaaacctactcgatcgactgtagatatcaacaatatataattttatatcgatatatacataaatcgagtgattgggatagatcggtcgccatgccaagacagtataaatcacttagattgaaatatatattaataacagaactatatatgtttatagcatagccgatcggatagatctagcatgtatcggctaatactccgatacaactctatgttaagatgttgaaacaaacagaatataccaaacagaagcttaatatacttagatgcaataatatcctgacataaagggcagatttaacatgtcaatgaaacatataaagcaaatataattaaatcagataagatcggctgaaactccgatactaccctaattggcaaccagaaggcaggctagatattgatattctaagcacgacttaatagatcaaactcaactgatacagcattacgtatgaaaagaagaacaatatctagacaatcaagtcgctggaagtttcatatagtggtgggtatcttatataatctaaaccaacatcgatatttaacctaatcggctgccctctattaacagatgttagccgattgtaggctagatggcgatatcgttagagattatgtaagatatatgataactcggtgaattacataaacaagattagtgtatcataaagatggaagcactaatcccgagaacacaagccgtcataacaagttttacctcttgttgaagatcgaaaccgatgcaactcaacccgaaagcaagaaatcatcgaaataaaactaaagcaaaaagggtggcgatgcgccgaaattgtattgaacgtgtgtgttaaaaattacatagggctcggggtctatttatacccgagaattacaagatatgtccataccggacacgactattatctctaacaaactctaagataccataagtctttgtggcagacttttgcccatatttatctctaagaaatttacataaaatatcctaattaatagatacaattgccttcccaggactttatccatgtatggcaatcatcttgaagtacgtcaactcaaacccgatatcgaatacaagtcgtattgtcagaatcggctgcatcacttaacccagtcttactcggacttaaccgattctaatcgtagccgatctaggctccagccgattcttgctctattctcgaatcgatctccgccttcggctccacttcgatctaatcctcttttccgatgctgatattactaaatttggtcgttaacagctttgtccaagccatccactctctcttgaagttgagcatttgccacctcaagattagcgtgagactctttggtttgcttgtaaagccgtaccaaagcctcatttttctctctccttagcaagctcacccttgagttcatgagaccgctctttctcacgaatgagtaatgcctcttgcctcctctcaagggttgcatactgatcatcaattctcccaagcaactcactcaagtgtggtagagactccttggttatggacttgaacaattcctcatccataacctcatcctcaacatcatcctcctcatcacaaacaagatcaacattgattgacttgagggaggaaggtaccttaggctcttttgccatgaggcaaatgggagcatcctcatcacttgagtagttgaagagtcttggtggtgatgaaggcttgacggcaaacgtggcaactccttcatcacttgagcttgactcggagtcggagccgaaaatcatcccaaggtgagcttggccataacgttcccgcttgctatgcttgtgcttctccttcttctcatccttcttttcgcccttcttatcttccttgatgtgggaaccatccttgaggtaagggcaatccgcaatgaattgcccgggctctttgcacacgtagcacacccttgcagaatgtcttccacttgacttgttggagtggtgcttggaagaacttcccttgaagaagcagcttcacctcatcaacttgccgaacttcttgacgaagagagccatttcttcatcatcgatctcctccttgctcttgctcttgcggctctattcttcttcttcctttgccttcaatgccaaatcttccttcttgatgcttgtcgttgagctttggttgatgtattggatgacctccttggactcttgcacaagcatgtcatgggctaggatgcgcccgagcaaatcatgaggtgtgagagtcttgttgtccagacgctcacgaatgatagttactaaggtagagttccttggagtgattgctcgaaccatcttcttgaccacaacctcatcggtcatgtccttggagccaagtcccttgatctcattgacgatcttgctcaaacggtcatacatgtcgcttgggctctctccatccaacatcacaaacctctcaaattgccctttgaggatctccaccttggactcgcgaacactatccgtgccttcatgcaaattccgaagcgtgtcccaaatcaccttggcactctcaataccgtccacgcggttgaactcacttccactcaaggcgctaagtattgcattagcggcttgagcgttcttgtgctcgttctcgtcatcctccttggtgggatcctcaggtttttgcaaaacatagcccttttcgactattctccaaatagatgggttaataaacttcaaatgcatcttcatcttatgtttccaagcggcatagtccgtgccgttgaagtacgaagctttgccgctataggtactcacataagaggtagatgtggatggatagtcataaggaaacgtagatcccttatcaccatctttgccatcccccgtttggcccgacatgatctctccaagcggttaagcctaattagtagattaggctctgataccaattgaaagggtcaattaggcctagagggggtgaataggctaatttaaaactttatgcggaagctcacactgagttagggtcggaaagtctgatccacagtcagaccatctgaaaatatcagatagtctgatgttggatcagactgtctgatccactaaagaaacacaacaagtagatctagtgcacaaacaggagtatagcgcaaacagcgactagatctatagcggcacaattaagcaaagctaaagaagggatgaagagatatcaccaacaatgaagttcaccgagttgttcccggagttcaaatccttgaggggattctactctccgttgaggagctcactaagagcggggtctttgctaaccctttcctcaagaggttgcactaagcactcctccttccactaaggggtatctctttccttgcggaggcgagatccggccttcacaaacttctcccggccaaccacacgtagatcggtggctcgggagtaacacctagccgtctaggagtcctcaacctccaagagtaacaaacaccacacaactcttggtcaaaccctagtgctcaagatcgagtgaaacagacagtaggccctcaaacaccaaatccacaaccaccaagatccaccacacaaagaacgaggagggatttgagagagggagaaagagctcaaatatccaaagcaccttagcaccaagctcaacccaaagtgaatgtgaatgaatgagttgggtaaccctagaaaagggttaggtggggggtatttatagatcccccaaaatgtggccgttgggagaaaatattttcatcccacctcggaaagtccgaggtgacatcggatagtccgatgtttttgacccccaagcacgccagagacagagaacgaaattctggagaatttcggacaatccgatcgatcggatagtctgatgttatattggatattccgttatttttgaatcatgaatttcatcctctcacagagactcaagttccattgaatttcagagtctctgggtcatccgatactccgatcacatcggatagtctgatttgaaaaatcactcaagaggaataaaaagcaattcaagacagagagtgaagttctgagaaagttcagacagtccgatgtatcggacaatccgaccttatatcggattgtccgatattttttagccaacactcagaccaaagacagagggaaaagttctaagaaatttcggatagtctgagcatcggatagtcttatcaggatcggatagtccgacaggaataaaataggaacagtccaaataaaggattttgagcactagtgttctaccaattatatgcatgtggtagccctcttaatagtacggcatcctaatactcaagaacacaagatatacatggaatagaagataattaccacaaaagatgccgca

SEQ ID NO: 24210 - DNA, 724 bp, Oryza sativa
tagaatcttatgataggaacagcgcagaaacctgcaatggaaatgaaagatcaggcgagtgtggctgctacgcacagccgggtgcacggagcgccggcggtttcggcgggagaatccccctcggcagtagcgcatgatgggacagcaggctcgggatctggaatccagggggactagcagcagcgctctcctgcgcgtccgacgcgttcgccgatgggaggccagtcagaagctggcacgtcgcctgccgtcaactctccccgctagcccagcagcatcatcacgtgcccagagcaggacgtgcagcagtcccatccacctggatcatctgtgcaaatggaggccgcacaacagggtgtgtctactgaggtaatgagaccgaaaaccaggttacaaagtggcattagaaaggataaaatttatactgatggtactgttagatatagttgctttacatcttctggggaaccacaaactttggatgaggctctaggggataaacattggaaagaggcaatggatagtgaatatcatgctgttatgaaaaataaaacttggcatctagtacctcccaagagaggtttaaatgtgatagattgtaagtgggtatataaaattaagaggaaagctgatggcagtctagacagatataaggctagacttgtagcaaaagggttcaaacaaagatatggtatagactatgaagatacctttagtcctatag

SEQ ID NO: 24211 - DNA, 26026 bp, Oryza sativa
cttgggatcccccacacttcgccctcttccgtcacttgttcaacctcaagccccagccttcctgagcaaatccccaggtggttggaggcgtcgtccaccagctgtggcccaagaagaagaaggattacttcaatcttcccctcaaatcttctttgaaggggtggaattttgagtgttttttactactcaaacccctccccttctcttcctccgtatgctagtcatgcccctcttatcttctttcaacaagttgaaggaggcgaatctggccgacgtctacatcgctttgaacttcgtgcttcggcacatccaaacactcaagaacagggtgcatatgagttttgagtattgtggcccccacatatcccacttgggaattggatgagaggaatagggacaatgaggccaccacctggacaaaaatcttcaagctaggcgtagtggttactaccaaggggtgcccatactctttcaacatcgagaatccacatctttaggtaaagctcgcacattattgtctatgtccttcgttttacttccacccataactgttagtcatcatgctaagatctttatatccgagcccctaagatggtcggagaagggctcctgaaaaaggcccgccaaagatcccgccgagttcctaagctccaagcgtgcagggaaaaagctaagaagcaggctcccagagtagccgctttgcgtggccccaaagtcggtagcctttgggtaggcgtgaggccacccttatccctcattagggatacgtcaacaaaagcctactaccccgcaaagagagctatctgaaagttcaagtgacattgatttggttttgatgattaataacaaatccaattatgtgagactaatgtttttataagcatttctttgcctattctcatgtggatatgaaattggagtgttggtggacctaaatcacaaggatgaaatgcatggagatcaagctatatgtatcactctttctcttcatgtacatattgatatgttcgtatataatatttccacgtgattggcatatgcatgtgagactaatgttttgtttgagtattatctcttatttagtctatttacattgagaacgtggagatgatgaaggtatatttttattttaatatctatatttgagaaatgccttctattcttgtataggataagctctcaatgtttaatatcttgttatgcatgctcttgcttcacacaaatattttgtatgcatacatttagggggagcaaatcctatactttagttatgcatgtaatcaatccaagttattcaccttcatttaattgggatctttacatttgaacatatatttgagtatatgacacttgtggtgttgattaatactcatcatttattcatatccttttatacatgcgatcggttggtcaacatgtggaggttgacaaccggatcattgggactaataattttattgagttgaatgaaagaaataggtcccaaggattacaaaggtgttgatgctcaagtgatatcattacacctaacaataccaagaatgacaaagtgaagatattgaagatgtgtgatacgaagtggctattatggcaagatggtgaagggcaagcgatgctcggtcgcgatggaccatgcggcggtgaagggcaagcaaggggcttggcgccgaaggaccaaatccggtggtggtaaagggcgagtgacggctttgtcatgatggaccgtgagagaccatttgaagctacaagtaaccgcatcaatcatttgaagaatatatggtgaaacggtatcggcattggcgtccctctagacaatgaaagaaggatgaaaaaaaggcattcctaatggtataattatcttcttatttacatttgagtttaggaatgccgtactattaagagggatgcaacgtcgaggtgtttgtgtatgtctcggtgctcaaagtgacctatcatagtgctaccttgagagaagcccaagctttaacctatcctttgagtggttttagaccttgtttttggttgagttgggtagtcctctgagtgagctttctatagagtccaagttcatcgaaaacggactcccgagtgaaaagttatagtcgttttactctgtgcttttcggaaagtccgaaaaattaccggaaactccgaaaattttcggacattccgaaagtggctgcgaatatgagatttgcttctgtaagttttcggacttgtccgaaaatgcttttcggaaactccaaaaattacagtcttggcctccaacggctagtttttgaggggctcgggtatataaactcctccacccctcttttgaggggctgctgctcttggggagtattagacacatccaaagccaaatagccatccccatttccctacctttgtggtgcctctttgtgagggggatttgagaaggggagagagttggattgagagagtgaggagttgagagctagtgagcttcactccatcctttgtgtgcctctttgtgagagggatttgagaaggggaaagagttggattgagtgattgagaagttgagagctagtgagcttcactccatactttgagcactcgagttcatagcaagcaaatcttcgattgtgtttgttactcttggagactaaggtctcctagacggctaggcgttgccggtgagcacccaaggttgtggtgtgccatggaaagtttgtgaaggcttcgatttcgcctccgcaagggaagaaatcaatagtgaaaccgaggagtgcatttgtgcaccctcgtgaggaaagggttgaaataggcctggcccttgtggctcctcaacggagacgtaggatccgtggatccgaacttcgggaaacaaatcacgcatctcccctcttggtttgcccgttcttgcattctctcatattgtgcttgagcttgtttttacctgatctacttgcatgcttaattgatttagtaggtgaccttatatcttgcttagataccttatttgtcaccttttgattcatatacattttgtttgtttgagctacaagttcatagctagtgtttattccgttatccgccgaacttttcgattgagaccggaacttccaatcccataccggaagtttcgatttgaatcaaaagttatcatcactctgatatgctatgaagttgtgataatttttaggaacgcctattcacccaacctctaggcgacatcaaggtcctttcactatccactcaatcatgtgaaaacgccaaggtaggcacatctactctagcactcatcgccaagagatttgcatcgctcgaggctaggatatctactaccatcgatttatcactgtcctcaccacctgcacattcatctcataggctcgaggctaggatatctgtcgttgccgcacgcataggcaagagtaggggtgaaaacggtacagaaacggatagaaaccatctttatcgttttcattttcatattttttttcggaattggaattggaatcgaaaacctcggatacgaaagcggaatcgaatattatcgaaactgaaaacgaagcgaaaatgaatcggcgcaaatactgtaacgaaaatttatcggaataaaaaacccatcaaactgataaatccaattctcaagtctcaacggtcaacgatttatcataaaacataatcatataagtccaattgttaagtattaacagtacatcacaaaacacaatctatgaaaaaaattatctatgtttaagagagtaatgatgttgataaatcccaatgtaggaaaaaaatattcttatgtaattttagatttgcataaaaaatattttttaaaaaataacagtaaaacaccatggtattcactattaagtgctttaaaaaataacgcagggtatttcagttacaaaatttttggaaattccgaaaaaaattccaaaaattccgagaaaatttttggaaagtttccaaccgattccgagttgctacggaaacttcccttatcattttcgattccgtttacgagaaaatatttcctcgtttccgttttcgaaaaattccgaccgtcagattccgttttcaaaaataggtccggaatccggaaagtttccgtaccgtttttggccttaggcaagagacactggtcctttgcctccacatcatacagaggagcaaggtgaggcgtcgagactcagctatcgtggcgctcccaccataaagttgtcaacttcttgactttggcttgaacttgcatgtgatgtctttgagtgtatcttgtatagctgtgatctatgcaggtggtcatcgaaagaaattcccgctacaaatgttagcgaaccatccccaagtgatgttgcgtcctctcaagagggaggagagattccctagccgagcgccacctagccatctatcccgactcctcgatggtggaagagtagccaaccaagcctggcccgtgcatgggctctggtgaggaacaaggttctaatcttctgataggtatttataactcttgatttggcggacacttgacacacatgatccggcttccaatcaacacgatccaaaccctacaatcgcaacaccacgtctcctctggtaatcaaccgtgtgctacccgattggcctcttcgagaaggctaatccctgcatgcgaattgaagaactcaagcaagaacaaggtatattacaacttattttgcagatgaatgattaagaacttaaagttgggtttccacaaactgaacttgcagcgaaactgcaacgacataaataatataagaaaaatccggctataaaactatgacagctaatgtgaattccgcaaagaggactaggctgggggttagccctaggtcgtccaccccttggacttagcccacgatatatttacaaggcccaaaacccaaatcagattcagactggattatgtatgtgacttgttttacatattctctacagccgagttgaaactttaatgtgggaccaaaaccatctgaaagtatgccgagttggaactttaatgtgggaccaaaaccacatgaaagtatgcgcatatcacggggttaatctaacgggttaattaactatttgccatttttaagatgtgaaatttaacaaatttgccattggatccggtggtaaatcgttaaatactacattgaagaatgggaaatagttaaatacctctaatctaacggctgaaaaatggataaattttaagggaaaaacctttgaaaacaaaaccgcaaaaaatggcattgggttcagtttgggccgaattttcggggcactagcccatcactagtagtacgagtaggccgtacgactccgcgggcccacctaccagtaccagtccaatacctccaacccaagtcttcttcctcgtctcgtccgttcgtctcctcgcccagatccgccaatcgcccatggagtccccaccccaccccctcctcctccttctcacgctcctcgtcgccgccggcgccgcctccgccggcgccgatgacctggtcgccgagctgcaatccctgcggtcccgctccccgtcgggcgtgatccacctcaccgacacctccatcacccgcttcctatccgccccggcgccgcgcccctactccgtgctcgtcttcttcgacgccgcctcgctccactccaagaccgacctccacctcccccagctccgccgcgagttcgccctcctctccgcctccttcctcgcccacaaccccgcctccgccgacctcttcttcgccgacatcgagttctcggagtcgcagcactcgttcgcgcagttcggcgtcaactccctcccccacgtccgcctcgtccgccccgagcacacccgcctcgctggctccgagcagatggaccagtcccacttctcccgcctcgccgactccatggcggagttcgtggagtcccgcaccggcctcgaggtcggccccatcgtccgcccgcccctcgtctcccgcaaccagatgatcctactcgtcatcctcttcttggtctccattccgttcctcatcaagaggatcatggacggggagaccttgttccatgaccgacgggtttggatggctggggcgctgttcatttacttcttcagcgtgtccggggggatgtacgggatcatcaggcacacgccgatgttcatcaccgaccggtccgatccaaacaagctcgtgttcttctaccaggggtctgggatgcagctcggcgccgagggttttgcggttgggttcttgtacactctcgtggggctcatgatcgccatggtgacacacttgctggtgagggtggagagcctgcagatccagcgttttacgatgctggcggtcatgataattgggtggtgggcagtgaagaaggtgattcttttggataactggaagactggatatagcattcataccttctggcccagcagctggaggtaaatgcttgtacaatggcagacgatatggatggtttcttccttcggtttctgaggtatggaatttcaccttcctttcatgtctgtaattttggatgaaatattgtaacttgaacgtttggcatgactgtgctttttttagcaactacttgttatgtttggtgtagattttggtaattcagaaattcttcttcagtcaaacactactctgccccaacttctgagtgacataacagattcctaacataaatcgaacaacagaatcaaagatcattcaatattttgtgcaggacttgctagcctcgttatataacactagttgctcacccgtgcgttgcacttgacagtattgtaaaaaatgtaaatatctgtcaaattttaaactgatgaataagtggttgaatgttttttcttcaaaatccctttgaatgattgaacttaatatttaaacgctaagagccccatcggttggcctaataagccaaagcaaaagccaaaatttgaatttttgaacttgattttgagcttgattttaagatatttttagcgtaatttctttttagtgttggcttttaagtcgctacaaacaaatatattaaatttttacctataaattaattttttattccctaataagccgtttgggcttattaggaaatatgggcaaccgatgaggctctaaagcacttgctgcaattacaaactcataaagagtaaagtccatcaccggtccctaaacttgtaccgctgtgtcatcccggtccctaaactcgcaaatcgaccattcaggtcctcaaacttgttcgactgtgtcatcccggtccctaaatttgcagatcactcatttagatcctccaacttgttcagttgtgtcaccccggtccctaagctgccatgcatcgtatattcctcttcttgctttaatttgcttcaatgcatgcatggccaattaaaagacgcatagtggtatttgattggttcatggatagaccagaatgcttttatttgacactgtgatctcgctttgtcttctttgtcttcactgttgagttctgtgccttcatgaatcatgatttcatgcaaattagtacatcattctctatcttctaactcagggcctgtttactttgatgccattttcaaccttaccaaattttggtaaagttgccaaaaaagtggctacatttagtttgctgtcaaattttggtaactatataagaaatcctgccaaaattttggcaagttgccaaaattttggtaactatgccaaaattttggcaatgccaaaatttggtaaggttttttttggcaataaagtgaacaggccctcaatcccacctacattcatcattttggttctctactactgttgtccatcgaattccgcttttgatccaatttgtgtcttcacccccaccatctgctgcccgctgcctcaatgcaatacaaaatcacaatttattgacggctttttctccataaattcagtgccacctaactgctttgtcgccacaccagctacagcggtatgttgtgttttgcggcaatatgcagcaaccctgctgctttgcctctcccaggtgtaccgcgaagctaagaaggcgaaggagatcgatatgccatgtctcgcagtcctagagtggctgtcgacgatacagtcgcgggcagagccatgaatttctacgatactgagcctgatagagatatcaatgtcattatggatgtagagattgcatccaaagagtccacgatattttcaggtcgtgttttatttagcacaaatcctaaatccaatctacggttataagaagatgatccatctaattaacggttagatctttatggttaacgtgggagctcctaggaagtgcccaatttctataggtggatagataggcatatgcatccttagtagttggtactttgttgtagctatgaagttccacgtattttgctattggcttctctaatggaaaaagggaccatgtcctttctgaagagccttaggatatgtatactacagtgacgccttatatgtgcttaatatgcatgaatttgctgttgttctaattgtcttttgtataacgtactgctagatgataagagcatgtgcatcccttaagacctattttaggtatcacggtggatgctttagcactttctccctcaagatgcttgttagttttttgtgctccatcgaagatgctaaggtcaatggtagatcaaggaattttatactattgggtcaattcttacccatatttaagtgaagtcatatctaattctttctggatttacacatgaaaatgaagttttacaaggtggttctaaaaagctgcggggttgagctgaccccacaatttctatgtggacagagttgtggacctgtcactggctaaggttatcaaattttgacagtgttgactaaaatcacgttgaaaaaaatatgtttcttagcactaggtgttactgtgttaatcttagatggtaagcatttttagctttcaaacctttagccgcacctacctttacattccttttttcatgaatacatatcggctccacattgcttagacccatggtagctttttttttttaattcttcgttagcacctttgagcacctaggggtgcttatgttctcatcaatgaactcggatgaaatgtataattaggcatcaaagtgtttagtctaggattgatgctatattgtttcttttagggtacattatgtttcccatgtgctctctatattggctttgctgttccacatcaatgcttcagtttcatcctgcatttgtaaacaatatgtgatccgtcatatagaacatgtgatcagctttttgccattgaccttgtctattgaaacatcttgtgtggatatgattgatgttcttggattttgggtttcttgatgctaatgcatgaacagtttcaaagactcattcaccaaggtttgtgtatagatactactagatttggctgtctcaaccaatgcctacttaataacaaattcaagttctactagctagatgctttgaccgcagtcaaaatattatctaaacttgtatgtaaaagtagtggctacttgtagaagttactgtatgttcaaacatttttgttgacacgaaaggagaaaaatacagtgcaagcttgggtcagtcttttttcaacttccctcctgtcctatttacaattagtttgttattactaagtaactcagagtagatgtaacaatatattttctttgactgtgctactctgggtcatactgttgttcaactccaaggggcataatgatttggccatttgggtggtgtactactatactctccaatcacgaccaagtgtcagaattggaaatgtgcagttaaaccattttggctatatcattatgaatagttgtagcagtcaataggattgttgaaagccaacgcagttcagattttttttatcctgatgatctaatgataggcacagtaatctcattgttgagcatacagttaactaatactttttttcaaagaaaactgatatgctcaatagtattttggacattttagatatgttaatagtctagctgcaaaattgttttggattccagtgcattcagttgatgatttactattacctgattgcttctactctgaaaacatgtatttcaactgtttgtcaagcaaatgggactctgctgatggctcagttgcttggcctgaccttacccacttgaacgagcaactccaaagtgccatgtagctaaaaaattgccatgttattttatgtcttaatgaaaataaattacctgcaatccacactccacacttttagaaaagtcaaacatgtagggctaatgcggccataccatattgtagttggaaaacacaagaagctatagggtttaaccattctgttcctgagcaacaaaagcttaaagcctaaaaatcatgtgtgcagttgggaggaaggcttaggcttggttgtgggcgtttcctaatgggaagatggttggggtttaacataatgttagttctaatggaaactttgggatttattaattgtgtatgcaaaacattattttgcaaacaatcttcttttatagtatgtttttaatgttcgaagattaatatttcattactttagtcttcaaaatgttttcaatattctggtaaatactagaaaagcatgataaaataatttttcatgataaatggtattagcattttcatataatctacatacttacctgatatttttagcgaacatcaacatcctagaagtggattgaaaaaaaatacaaatgccatgcatgaaattgtttcatatgccctgccattgataaacataacaagtagccaatgaatgttgtgtgtgatattatgcctatcagtatttggttcatttcacagtgtctagtctactctattgccagacaataaaaatgcatttgttctgattagtatccatgatggagctataatgtgattagatctcttttaagttcacgatcaattcgctgtttagcctctcctttgtgaaggccgcaaaaaagtgaagttgtggttaacaagtagttcatttatgctccggaccttgcgtcttgaatatagtagattaataatgaagctgccatgtttattttcaaaaatgggtaggttaaactacaggtttcttaaaagaatgtacaaatagtactccctccatcccagattgatcatcctctaagtaaagggcactaaagccaatgacatcaaaatactccctccataccacaatatatggcgcgcacacatattaagattcaacttttaaaacatttgaccaacacttagtataatatgaaattaattttatttattaaaaattatatcattagattgagatttaaatttactttaatatggttataattttgttgctacaaaccttatagtatatgagaaattataagctaaagattagttttggagaccgtgccagctttgaccgcgtgttatattatgggatagagggtgggatggagggagtactgtttactaattgtcatcatttagtctttttacataacaattgctatgctacgttggacaactatttcattatttgcttatgttatttcaggttatggaattatccaactttgaccgtgctgagatagagcatattttggagtgttgggacttgccaagtttatttttgcaaatttctgatgctgtagtatgaaatatgtagacctcaagtcatgttagttatgcagaggaattatgacattgcacatctatcacttgaacaagaaagtttggcttttgaattattggtttggtttcttcgaatgatgtatcgtggttgatgtagcttgtcaggtgcattgtcattttggaaaattgcttaatggaaatcattagcattgaaggggccaataggtcagtgacctctgtaaatgttggatgcgatatgcttgcttccagaagcaatccccgtgttcttttcacccatgggtggtaccgcaatttggcagcataattaggcaactagacaactactatatactgttagattagattgtattttaggtgccagcgttatataaagttcttcacctattgagtcgcaagcatttgaagatcaatctacaatctggatcatattcaatgaaatttgttaattgttggatcatattcaacgaattttagttgatcttgagaaaaaaaaattattgggaacataaccggcttgcaaaatttgaattatcacaaaatcttgctgcacggttatggggcacattttcacacggccaccaatttgcaaatgcactaacgttgttcagcttatgcatattcttcctccgtttcatattataaataggtcgctttgattgttttcctcattaattttttcaagtttgactaagtttgcagaaaaatttagcatagaatcttctgggtccaattctatgcgtgacgtgaacgtcagggtgtggtcgaagacatgggcacggacagccatacttagggctccactgaagatggcgaaatctgttcttgggagagttcctagacaagtcaagccactctgcactcctgccgagcacctaactttcgtaaattccctactatgacaagctccgtttgatctagtaacccgctgaaatgcagaagcgtagttaaagtgaatggagtccactgtcgctaacctcaactccgccttagtggctgatgctgggcctccgccccctcaagaccctctccagaacgatgaggttctcgaggacgctaacgctgccaacggccctatgccaacaacagtgagcatcgcatccccgagaacgcatcgccacgacgacatactcatcaaccgcctccctatcaaaatgctcacgatctccgcgaccaattgaacggccgaaggcgggagcaacaagaccaacacgatgccggacaccgacaacctcgcgaccagaattgtagagacaatcgtcgagatgacaatcgtaactgcgaccgagatcgagatcgtcatgattgctagagccgacaagacgagaacgaacgaggtcatcgaagtcatcgcgatgatcgagaatgacaagactcacgatctccagctctaaggcaaggccgaagccatgactaccgataccccgccttcatcgtcctcgtcatcatccaaggcggttcacgtggacctcatagtcgccgaccacccctattacctagaggtggatgcagagcctttaaagtcaactagcccttaaaattccgtcctgcagcggtagagaagtacgacatgagcatagatctagaggagtttttgcacgtctattctactatcctatacaccgccagtgcagatgacaatgcactggcaaattacttgctggcaacattgaaaggatctgctcggtcatggctggtgcaccttcctccctcaatatcttcctgcgcggatctttggaagcatttcatcgcgaattttcaaggcacctacaagagacatgtggtctaagatgccttgcatgccctcaaacaaaagcacggtgaacctcttcgagattttatccgacaattcaacgaatgtcagaatatgatcccagagatcaccgatgcatatgtgatatgagcattcaaatcagatgtctaagattgctacacaatccaagaactggcgacatgacggataatatctacaatgaagctgtttgaggtcattgataggtgtgctcacgcagacaaggccgttcgaagaaatgatgggaaggggaagttagtcaatgaaaatagttggccaaacaagatgctatggaatcaagttggcaatctagtcgcaagaaaggaggaaagcaaaaggcacagtcggaggttcttgtcgcagaataagagaaaagcgctccccaacgacctcctcctcaagatgatggccttgtactgcaatggtgtccggtgcacaagaccaacgctcacatgttcaaggagtgcaatgtattttagaaagccatgactaggaagatagcccaagacaagggaaaacgagtttgcatggtagagtagggcaccaatgaccttccgttcgatgccgaactagattttcctgacttcgatcaacatgtggcgtatatcttcggcggttcaaccttctattcttctaagcgggaatacaagaacacgaagtatgctctacatctcgggtatcgacgtctaagatgaattggtcaaatcagaagatagagttctctgacatcgactacccttctctgacgacaacccctggacgatacccgatagtagtcaagcctactattcagaacgttctagtcgcgcgatttctcattgacggtggcagctcaatcaatctcctcttcctcagcgcgcttgacgcaatggggattcctagaagcgagctcatcccctcagaacagcccttccatggcattaccccagagtcatcatcaaggttgttgggggaagattacattgcccgtgacctttggcagagttgacaacttgcagacatagcatatcattttgatgtagcagagttcgatattgcctacaacactatattcagaataacaacactcaccaaattcatggcggcttcgcattacgcctaccagttgattaagattccgggacctaaaaggataatcacggtgccagggaacgcgaagatggccgtgcaatgtgacaagatgagccttgatatagtcgagcaaactaccgcagtcccgccacaatcgagcctcctgggaaagtgagcaaacccaacttggcacccaaaccagacgacgccataaagataatcccgctgtctagtagcacacttgacaaacacggccaagattggcgccgagctcgactgcaaattggaactcaagctcatcaccttcctctatgacaatgcagatgtatttacctagcagccgtccgacatgtccggagtcttcagggaggtgattgagaacaagttgatggtttgacccgacgcaaaacctgtcaagcagaagttgcgtcgcttcacgccagatcgcaaagaggctatccaagaagagctcaataaacttttcaaagtaggcttcatcagagaaatcctccatccagagtggcttgccaacccaatcatggtacgcaaatccaacgataagtggaggatgtgggtacacttcacaaatctcaacaaggcatgcccaaggactattttccccttccacggattgaccaaccgatagattctatcgcagggtgtgagctgttgagtttccttgacacctactccgggtaccattaaatcagcatggccaaggaagacgaggaaagggcaaccttcatcaccacttcggtgtattctgctacgtcaagacgccttttggcctgattagtgctagatcaacttatcagcgccaaatccaaggggctttccaatcccaactcagcaataacgtggaggcctacattgacgacatcatcgtcaagaaaaaaaaaatcgagatcgtctgatcgatgacctaagggaaacattcaacattcttcggagacatcggctcaagctatatccagagtagtgtatgttcagagtactattgggcaaactgctcggattcctagtctttggacgaggtagcgaagcaaaccccaacaaaatcaaggccatcgaggaaatgaaatcaccgatgaggctcgaggaagtccagaagcttgccagatgtatgacaatacttagtcgatttgtggccaagatgggagaacgaggactgcctttctttaatttattgaagaaacattgacaggttcgagtggacatcagaggctgaagaggcattccttgtactcaagcgatacctcgccgatccaccagcacttgttgccccacaaccataggtggaactcttcctctacatcgccaaaacgccgttctccataggtactgtcattgttgtcgagcacgacaaggtccaattcctagtctactatgtcagttaagtccttcatgatgccaagactagatatccgaagatctagaagctgctctttgccatggtcatgacatcccgaaagctgcgtcactgcttccaaacccacaaggtcatggttgtcttgtcatacccccttggtaaagttcttcgcaacaaagaagtcataggatgcattgccaaatgggtcatcgagcttggccaattcaatgtccacttcgtcccacaaacgactatcaagtctcaggtacccgcagatttcgtcaccgactggaccgccccaaggacggcaaagtcgatcgtatggacaacgagcgatggacaatggcctttgatggagcattcaacaaccaaggagcaagagctgcattcgttctcacgtcaccaaccggagatcaatttcgacacgctgtccaattagatttctgagcaaccaacaacactgcagagtacgaaggacttagagcagccgcatcacttgtggtcaaacgactagttcagaaaggcgactcagaaatagtcaccaaacaagtgcataaggattacaaatgctctaatcctgaattgtccaagtaccttgtagaagtcagaaaactggagcataggtttgacgggcctatagtacaccatgtctaaagcaaagacaacgccgacgtcgacaaacttgctcgacgagcttctagtagagagcaaatggaacctggcatgttcctagaagtattaatcagtccatctgttaagagttcgctggacgacgacatcaatatcaccaccgacattggctcgggggctagttgatcgatcttggcggccgtctgtggagaaagagaaaacctttgccgaagacagttcatgttcatctgcggtcacaaaatacggatgcacgcgagcacatgaccaccagcgaactgattggtccgacactctcttgcttgaggcttttgttgatccaatgagcggtgccaaccaggtcatcgcatgtactccacagccagcctagataacctgttatggatctcttaggagctagacgaaccacatgcaactcttggcatagctgatcaagcgatgtgcaacaaccttcagtataagcttccatctggacttctctttccttgagaagcttcgagttctagcctttcttgatattgtcggttgctcgctccggctctttcttttcgaacttagttctccagtactcggcccagcgtttcatctcctcgagagaatgtttaagatctagaatagacagcgacaccattagcatcctttgttctgagtacaggagcaatacactataatttcgggttttcgcaccttgatatttctcacgaaggagcgtgagttgatcatcttgagaggccaacgtgccatcagaagtgacgacgaccagagcacggtcgccatcactcggggttgacgaggcctagggcgtactaggatgtgcaattaagcctgacgagcgtccgccttgctggacgttctcattctcgacttcaaagcatctacagaatacaaaagacaagatggaaaccttaaaaggataacagaagggaagtgttctcgggcaacagacgaaatacttgtccttaaggttgcaatgaaactaaaattagcatattactcttcaaaaaaggggatcacagactcctcgacatcctccaattctgatatcatgtcctcgcgacgcttgttggctcctcccttggtcatcatttgttcaatgttgacctccgggcgtgtgagtttgaggcacataagaacgtggcatgcgtcggtctggatcctagacctcattcccttgtctacttggtctgcatgggagctcgcggcggtctccagcttggttatcagcgacccaagggacaccaggaccgtggtttcgtcaggaaactcgggatgaggaacgctcatccccaggcccttttgcggccacatcgaggcgcccgtagttctagtgcagagcttgccagagtgaagccaggttgtccttggacttggtgattcctccgcgctggcaatctcctcctgcagcttggcgttgtccgcacgctcttccgttagatgggcttccagggccacaatgcggtgtcaaccgaataggcgacttttgcaagttgtccaagctcagccacggcatctcaggcacttgcttccaacaatcgataagcttgtagcagcttgttggaggcagaggtcgagcctgagatgacaagggcgccggccgacggaggaagaaatgtagggacaacagtagcagcagcagtagcatgaggcgacttggagctcacctcctcacaagccttggcacattgtcccgaggccgcaggtgaagggctgcattcaaaacatcttgggttacaaaagctacacgacgtcaagtggaaacaaaaaaaggtcaagttggtactcatccgactttttgtttcatcggtagcattcccttcttgatggaggcggactttgtgctggaagttatttgcaaacaagaaaggttaagatcgagaaggctaccatgattgtcagacaaacctgaaatagaagcctcacctcagagctgctcgtcctaactagtgtctccaccccagtagtcttctcgagagagggcaaacgttttcttttggatccactgccctgggcacgagggtggcggctgcttgctccaacacagccagctccttcaaagaagcgaacgcctagtggttgacaagctggccgatcacatccgttagaggccatgctagtatgggtcaagattactacttctatagccaaatatatgatagatatggagaatagtccgagatgcttacgttcacgatgatgtccttcttggcctatgggaggttgcttatcggcatcgggatgtcagcagtggccgatggtggatcgaccactacctgccctacccacttcaccacggctgcatcagaaacagctataacaaagataacagtgaaagattagatgttagagacagttcatagtactagggttatcagaaaactttgggttctaccaaagtgcgatatccacgtcatgtcctttgcccccatgtactcgtatgcagggtgagcacgggcttggagagactggattagacgacgaacaaagtcttctctacaacttcgtacccagtcagaccgcgttcttagagatcatgaattttgtcattgaatcccttcagagcaggggtcagagaatgtttggaggtccatgaccccagaatatgagggattttcttcgggaatagcaagacaaggagtggtatcagtgacatgaagataaaaccagctatccctctagtattttctagaggatggacagttaaaggggatgtatctacccttcatcttgtccctcagatggagactacaacatccagagattctaaaggcctccatccatccaagcttataaaatatctaaatagagctatgaaaagctgtaccccaaggtaagcctcgcataaatgagtgaagatactaaggaatcaagggagttaggattcagatggagaaggtgcatatcatagaaatcaagaagaagtgaaagaaactcggaaggactccggaagatccatggagagtcgctgaggagatgagggaagtttgtggcttagggttttttttttgcttgttggagcagtgggaaggtgcgcgaaggggaagcaaaatgtttgtttaggaaaacgtaacccaaatggatctcataagtggaatttataacccacgtccgacggttcgaatttggaggaagacggagaaatcaccgtcggagtttttgtggatttgtttatagcagtttaaagtttctgacttcaatccaaattcaaatttgagttgaagtctcggacaaagagaatagaaggaccatgtcatgtactctaaacttactcagctgttcgagaatggttaggtgagttcgacaatgattttcttcaggatctttgctctggaacattaacctactcatttgcattagagtcgggtgttactgtcagtgtcagggcgttactgtcagtgtcaaggataagacatacctcctatacatgggtttgtgtaatacggcaataccatatactcgatagtatatgagaatgtatcctttaattaaggaaatacgattgataaagaatgaaattatcttcctggaatataaggtgtccgagtcttagttggggaagataaggtcttcttaggcccatatcctgttttatctcttcgaattatatttggagaatagaataatctacgctataaatacaaggcccccttgtccagggaggggaattgagttacaagccatagccaaagccacatcaagaagcaatccggaggaagccagagccatattcgctgagtagatttcgtcaggtcgttctcgacagcttctggtcagtggatcagtctagttgtcctatttcccattgtaatctttgtggtattcccatccatatatccatataaacttgagtaggcttattactcatcctaagggctcgaactagtatcaatccttatcccatgtttgtatatccgatctcgcgtacatcctggttccaacgatccccatactttatgaataccatatagggtataacctgttgaacccttatcaagcaaatgctatgaaataatcacgacgaaaaaaaaatcacaaaatcaacttcaaaatttaaagaacaaactatgataaaaaaacataaaatcaacttcaaaaatgaaaattttaaatttatattatggctataaaataaactatgatgaaaaaaccacaaaaccaatcccaaaattaaatttaaaaagtatcaaattttggcttaaaagcgtaagtgtaagcgagataataggatgtaaatcatgtccaaaaagtttggactatttcaaggcctctttatagtgcaaaagcaaattaagaaaatttaaatacaaactcttggttcatatttaggccccatttagtagagctcctaattcaaactcacaactctaaacttcaactccagtgagagctggctcctttaggagctgaggtaggtaaaaaagtgtttggctagattactcagctccacgttaccacatccctcatcgccatttcgtccaacaccttgtaggcgttaccctggcgttgccgccgccgggcagcccgcgagccgctggcaccggtcagcccgcgagccaccgccgccggttggcccacgcatctccgccaccgcccctggccaccgactgtcgacgccgccgcctccccggctgcctcgcgcacgccgccacctatgccgccacctgtcgacgctgccgcctgcgagccgcggccgccgcccgcgagccgacgccaacacgccgtggcccgtgctcgccacccccgcatgctggccaacgtagacccgccgccgcccgccacaaccagttgtggccatcggagaaggatggggaagatgatggagaggagagagaccgggaggagataggtagcaaggggtagttcaatggcatttttgtgtaaatatagtaaaaaaattaaagggtaatgggtcttttggtgtggagttatggagcagcaaaaaactagctccacccccatgtacaaatttctggagccactttactaagttcgcttccaaaaaaaagggaaatccgtactttttggcacagctccgcttcaaataagtgaattgggaattggaacttggcccaaccgagccttaatgggcttgggtgatgtaaatggatagtactgtgcatgcccgtcctttccacatcatgatttggtaggtgtaatggacatccagtaatttttacctttgtatatttgggtatggataattcaactaaatggataattagggggtgtggctaatgggcgatcgatcgcttggagagatcgatccccatgccccccctgtacacacctctcctcccttcctcctccccttcttctcttcctactacactacaaatttaaaaaaaaataaaaaacaaagttggaaaaatttatgtatagaaatactatatataaaaaatatttgaattcaaatttaaatttgaagagggtaattaaacttttgacttataaactttgggtctataaactttaggtgtataaactttagatgtatagaaatactatatacaaaaaatatttgaattcaaattcaaatttgaatgggatatataatttttgatttataaactttgggtctgtaaactttagatgtgtaaacttgaggtgtacaaactttaggtgtataaatttactaaaataggaaagtaaagcggtgcctaaaaaggaaaccacgtggaggagaggggggagacccgatcgcccctggcgatcaatccccattagagcaactccagcagagaccctaaactcagcccctaatcagtttttgagggtttagagataaaaactagattcagcagggaccctactagagcccccaaagtgaggaggaccctagattctcctcccaagcccccagtcctgggggttccgagtacggcccccatcgactttttttcctggcgtgaaaaaaaatccgcttcgcgcgatctcgcctcgcccgcgcggcactacgaccagatctcctccgacggccgccatcgactcccccacccacctccgccaagatcgccccaaaaaaggtgaggattttttcctacctttgttgtcgtcgtcgtccacagggccttcgacctccgcttgcacgcctggcctccgcctgcatgccagccgttcaaacgctcggccatcgtccgcctggccacacgctgcttgcctgcacactgtgttagagtccggatattctttgtacatgtgataatgctccatatagctgtcggacagagtttgttgtgttagttagaagcgatagaacttatccatgtaatctaggttctcacaacaaactctgaaccgaagctatatacctcattgtaatcctggcacccattttgtggcaatcatcaacacgtaatctcctcaccgtaggagttcctcgcttccacatggtatcagagcctgttgctagattagattagttcgtctttgtgtttctgcaaatggcgagctcttcctcagcagcggcgatctccaatcctctgttcgggattcaaatctcggataaactcaccaagaaaaatcaccccctctggtctgcgcaaatccttaccaccctatggggtgcgcagctggaagggcatgtcaccggcacagttgaagctccggcggccgagtgcgagaaggaagatggcgacaagaaagtcaagaccaccatctccaacccggaatacatcaagtgattcagtcaggatcaacaagtcctggggttcctcttctcctccctatcacgggagatcctgcagcaggtggctggcgcgcagacgacagcccaagcatggaacatgatcaacgacatattctcctgcaaatccaaggcgggcgccatcaacgtcctcctcgccttgacgactactcagaagggacccatgtccataagtgagtacattgccaagatgcgatcccttggcgatgagatggcggcggcagggaagctccttgacgatgaagagctgatagcgtacatcatcaacggcctcgactccgacttcgacgcagcggttgaaggattgatggcaacgacaagaattgctcctctcttaatctctcatgtgtattcccaacttttgagctatgaaaacaggatcagtattcgccaaacctacctccctacttcggcaaacactgcaaatcgtggcggtcgtggtggtcgcggtggaaatcgcgggcggtgctcctcgcggcggtcgcagtggcggccgtggtggcgcaggcggggccaacactgggcgagggcgcggtaacgacacccacccggtgtgtcaagcctgccataaacgaggtcacattgcaagtgactgctggcaccgctatgatgagaactacgtccccgacgagaagctaggcgacgcggccacatatgcctatggtgttgacaccaattggtatgtggacaccggggcaacagatcacatcacagggcagctagataagctgactacaagggagaagtacaagggaacagatcagatccacactgctagtggcgaaggtatgaatattaaacatattggtcataccattgttcctacccctagtcgtcccttacatcttaaaaatatacttcatgttccacaagcatcaaagaatttagtctctgttcatagactcattgcagataattatgcctttcttgagattcatggaaaatattttttgattaaggacaaggccacgaggaggacaattcttgaaggaccatgtcggcgggggtctctaccctcttcctgtcggcacccccttgagacaagcctttgctgttgcgccatcgtttgaacggtggcatggtcatcttggtcatccctccaagccggttgttcttcgagtccttagtcaaaataagttgccatgtcttagtaattcagttaatgagtctgtgtgtgatacttgtcaacaagcaaaatgtcatcaattaccttttcctagatcatctagtgtgtcgaataatcccttggaacttattcattctaatgtttggggaccttcttctacttctgtaggggtaaagaaatattatgttagctttattgattattacagtaaatttgtttggatttatttcctcaaacataaatctgaggttttctagaaatttcatgagtttcaaaaacttgttgaaagacaattagatcgaaaaatccttgccatgcaaaccgattggggaggtgaatatgtcaagttgaataccttttttaatgggataggcatatcccaccatgtgtctgtcctcatacacaccaacaaaatggagctgttgagcacaagcatcgccacatagttgaggtcggtctaactcttctagcccatgcttctatgccactcaagttctgggatgaggcatttttagcagcttgctacctcataaatcgcctcccaagtagagttataaattttgatactcctcttgagcgtttgtttaaataggctcctgattataaatctctcagaacctttggttatgcgtgttggccaaatctccgtccctataactcataagctccaattttgatccaaacagtgtgtctttcttggttttagcaatcttcacaaaggattcaaatgcttagatgtgtctaccggcaaggtgtatgtttctcgtgatgttacatttgatgaacaagtttttccctttgcaacccttcatccaaatgccggtgcccgtcttagagcagaaatatctttgcttccttcaaatcttatgaacactagcacattggatcaagggggagaggaacaaaatgatcaaatgtttaatattcacataccaaatgctactaatgatgcctgtacagacgcagggataaatgacaggtgcagtgctgaggacagtggtcaaatcagcaacgaaaatggtgaatcagagagctgtgctggtacacacagccgggtgcacggagcaccggaaatttggcgggagaatcctcctcggcagcagtgcatgacgagacgacggcggtctcgggatctggaactcagggggagcaggcaggctcccctgcacggctgccgcgctcgccggcgagggaccaatcgggagccggcgcgtcatctcctgtcgccagctctccccgacagcacagcagtaccagcacttcctcggcgccaggtgtgcagcagtcacatccgtcaggatcatctacacaaatggagccagcacagcacggtgtgtctactgaggtaatgagaccaaaaactaggctacaaagtggcattagaaaggaaaaagtttacactgatgaacctgttagatacagctgtgtttcacatattctggagagccacaaactttggatgaggccttaggagataaaaattggaaggcaaattttgctacaggacattgctattgtgtggttttatccctaggacactgcccaaactcacttttgggggaaaacactccataaacgtagtaatttgctagtgggcaccacgctgattaaaataataatttccggttgaagaggagagagaaatcgcgtgaaagttgtataatgtcttggcgcccacatgcaatatcatccatct

SEQ ID NO: 24212 - DNA, 2630 bp, Oryza sativa
ccacgacgacacgcggcgatggcggctgcggcaaatgcggcgtgtggtgtatacgctttcgccgcgtggggtggcagtggcggaggatgaggacgacaaccaggaggctgtggcgaagggtgaggacgacgacgaggaggcgacggcggacggccccgagatcaagatcctggcgcgcggcggtggcagtggtggcggtggcgatggcagtggtggcagtggcgcttagttgcagcggcaattgcgacggctttgatggcggcggtggcgctgcgtcggcatggcgacggtgaatgtggcagcggcggcggcgacgacgacgacggcacgaaaacggacagcggtgacggccggccggaggagatcgagagagatcggagagggtggtaggtcgcgatggggatcaggcggagatggaagagctggcatgtgggcccaagggcatttttggcatttcacgcgatttcaatctcctcctcaactggaaattattattttagtcggcgcaatgtccaccggcaaaatatcatgtttatggagtgttttccctcaaaagtgagtttgagcagtgtcctagggctaaaatcacacaatagaagtgtcatgtagcaaaatttttcaaattggacagaggcaatgaatagtgaatataatgccctcatgaaaaataaaacttggcatctagtacctcctagcagaggattaaatgtgatagactataaatgggtttacaaaattaagaggaaaactgatggtagtctagacagatataaagtcaggcttgtagcaaaggggtttaaacaaaggtatggcatagattattagtcctgtagtcaaggttgctactatcagaactgtactgtctatagcagcttctagagggtggatgcttcgtcagctagatgtatagaatgcttttcttcatggaatcctagaggaagaagtatacatgaggcaaccaccaggatatgaacaaggtaactaggtgtgcaaacttgataaggctttgtatggtttaaaacaggctcctagagcatggtactctaggctaagcacaaagttacatgagctagggttcaagtcatctaaatcagatacatccttgttcttttatagtaagggagatattacaatgtttatgttagtgtatgtagatgacattataatagctagctcctcaaataatgctactgatgttctgcttaagagtcttaatcaagagtttgcactaaaggatctaggtgagttgcattactttctagggattgaagtgaagaaggtaaatgatggtatagttttaacgcaagagaagtatgctaaggatgtgttaaaacgagttaatatgagtgactgtaaagcagttaatactccactgtctatctcagaaaagttgagtgcttatgaaggaacacctcttggaccagttgatagtacatggtacagaagtcttgttggtgccctgcattatttgactttgactagacctgatttatccttctcagtaaacaaagtttgtcagtatctgcatgctccaacaacagaacactgggctgctgccaagaggattctgagatatctaaaacatacagttaagcttggtttgaagattggtaaatctaattccttgcttgttagtgctttttctgatgcagattgggcaggatgtctggatgacaggcgttcaactggaggttttgccgtgtttataggacccaatcttgtatcatggagtgcacgtaaacaagctactgtgtctagatccagtacagaagcagaatataaagcactggaaaatgctactgctgagattatgtggatacaaactttgcttcatgaactggggattcaggtgcctaaaactgctaaggtatggtgtgacaatattggtgcaacttatatgatagctaaccctgtgttttatgctcgtacaaagcatattgaggtagactatcactttgttcgagaacgagttgcgcagaagctgttgcaggttgaatatatatctactaatgatcaagttgtagatggatttaccaaaactctgactgtcaaacaggtagagatgttcagaaataatctaaaccttacaggataagattgagggggagtgttagagtccggatattctttgtacatgtgataatgctccatatagctgccggatagagtttgttgtgttagttagaagagatagaacttatacctgtaatctaggttctcacaacaaactctgaaccgaagctatatacctcattgtaatcctggcgcccgttttgtggcaattatcaacacgtaatctcctcaccgtaggagttcctcgcttccacacactggtccccatccgcacgccgctcgcccctacactggtcgcccgtccacgcgccagccagccttcacaccgcccagtcactcaccgatcgatttttctggagaactcagaagtagttttgtggtaggaatactagttcatcttttctgaaagcacttcttgatcggagtacttgtggtactgtggttgtcctggtggatctttactttttttaatacgttttgagaattgtgctagactttgtagaccgtagaggagaacctgaattctgacctgtatcactagggatgaaaatggatcg

SEQ ID NO: 24213 - DNA, 3672 bp, Oryza sativa
ctgtccatcatggacgtagttcttacagaaaatttaagtagttcttacagaaagtttaaatgcaacttgacgtagtagttcattacagacatagtttagatgcaacctgcaaattaaattgacaaacatttcattcaaacactcattgtctcattggcactttgtcgtcgtcatcatcatcaacatagtccatctcaatattaccatcaccatcttggccgacggcgccgacgaagaggtggctgttggctgacggcctgacgcgacgacgctgacgaacaggcggcggctgttggccgaggcgacgacaccgacgaagaggcggcggctgtggtgatgggacgacgccgacgaagggacgagacgacgaggcggcggcggcgaaggggcgaggcggcggcggcggctgtggcgaaggggcaagatggcggcggcggcagcggcgaaggggcgcggcggcggtgggcggtggcggcggccgccgtcatgcgtggccgcgtggggcggctgttgtgtgagtgtcgcctgttgcttagctagctagggtttgtgttgcctgttgcatgttgggttgggttgggctgatgggctctttgggctgattattctgaatggttgatgacaactccggatatccgggaaaaaatcccggatagtttccgaccgttttccgattccgtcggatatcacccttactgtattcgttttcgtatccgagaaaaaatatccgaattcgtttccgaatccgagagattccgaatagttccgaccgaatttttccgaatccgaaaattagtccggacggacggaaactatccgaaccagtttcatccctatgtatcactgtacctatattagtagcactgcattgtgttggactgcactagtattgcaatggatcgatctgaaccattgacatatatacttcatcaagtttatcctaaaataattgcttgtcctatgcatatatataatcttgcacatatatatactatgtgctgtgcatatgcttctgtagttgcatttatattctctaattttgcaatgttgtgatggcagtgatttttgtacatggacttttccgacgatgacgatgatctccttgctgaatggtgggagcaagaggtgttgtccgatgatgacaactactatattgcagctgctcttcttacggacatagagcataagagaaccaaaagaaagtgttgtggttcagtcccaggtcgtgagataattcatagggacaggtttgactgtatgcattggaggtggaagaattgcccaacaggctggaaaggacagtactcagggcatgtggatgggccaaccatgattcttgaagctgttgcatctaaagatttgtggatttggcattccttctttggattaccaggttcccttaatgatatcaatgtcctacagagatcaccgctctttcaaaggcttactccagggacagcgcccgagttggagtttatggtgaatggtaagaaatacaccatagggtactatcttgctgatggcatatatccttcttgggctacttttgtgaagaccatttctaatccacaaggtaacaaaaagaatccattacgcaaaagttcaaggagtgaggaaggatgttgaaagagcatttggtgttttataagcccgctttgcaatggtgagaggtcctgctagattttgggatacagagaccctatggtacataatgatagcttgcgtaatcatgcacaacatgatcatcgacaatgagcgagatgaagatgtagactttgactatgatcagggggacagtgaggtgttgaggaaggaggattaccagcgacgcgataaacatgtgttggagaagtttctaaagatacataaagaaattgaagaccaacaagcacatgagcaacttcgagatgatcttgtgaaatatttgtgggcacttcatggtgctcggtagtttgtcatttgcattttctatcaactatgggttattttcaatatttgcttgtaagatttatcattttcatgttagaaaaatttgaactcaaatttgaatcgtgatgtttgaaattgtaaattcgaatatggttaaattctatgtgctagaattatttatgtttgaattattatggtgttaaactatatataaacataaattatatactaaaataaaagaggaaaagaaatagaggctaagatatgagggctactgctagagttgatgacatatttaggtccaaaagaattggggcagcccccatttgacatttaggagctctaaactagaggttactgctactggagatcctctcaggagtttcgtaattagggtggatgtttgttatccatacatgtattgtccaagtgcaaattattgtaatattcccttcgagaactaggtagctcgtggagtatctgatacgtatgtcaaattgccaactcttgaatcgtgcgaacactatatattgtttataagcttgtcaaaattaaacattttcattggacagaaacatgcggaaacttctgctctagtacattaactaaaacgaggaggacgacaaattaagcgcagtatgcgttggtctccagaagcattgataattaattgcgcatgttagcaacgattagaggcatgtttcaattccatctggacgagcagctatccatctaccccatgcaaaatcaacccccaaatatgcactttatttgtataacaacagtacaatgccgcaacttgacacgtctgaattatgattagccaagtctacggctgaacgtagtagcgacgactttcagaaggaattaggcagaaattaaacaggtacggcgtaataagtgagtacgtagctagcacacgttgcctcgcaaatcgcaaatgtgttaagcaattacacttgttaagctacaacctccgtcctaaatataaagatttgtaggatatttaagttttatatcataatgtaagtatttctatactaattttcataattccaatcattgcaatcattctaaagctaattagattgaaaatccaagcaattaaaaaatttaaaaattaacaactaaaccgacaaaaatgaatcttttaatttaactacttcctccataaaaaaagataaatctaaaattaaatatgacattgacggagcgtggggctcctcaccgggagaccgtgcaggcccccctttgccggttcggccgggggcgctaagtgaggttcttcgctctcgatctgaggaaagtcagcgagagaggaagtgcacaagacacgggcgacgtagacaggttcgggccgctgagaagcgtaacaccctactcctgtgttctggtggatctgtgcgtgaaggaatacagagagccggagagcgagagagagttcaggctctagaacccattcgccagagtcccaacccctttctcttttctctcctccttttttttttactaggcctgggcctcctttttatctggtcaggggtcaccacaagggcctccagctacctaagaaaagaaacatgctttttacaatgagggctagtctacatccggaagtgacctctgacaagcagagcacacgcctcctgccccgctcgcccgcttttccggtggacgcccatttcaaccttcatttaatggccagcgacttccttgccatacttgcgctgaagcctggaatgg

SEQ ID NO: 24214 - DNA, 1661 bp, Oryza sativa
ggggtcggggcgccccccccccggggcccaaacggaaacggcccgtcccctcggggagacagagggaggggtggccacgtcaccctcgggcccgacccccccgagggggtcaggccacgtgggtgaccgcggctacccaagcctctagtcacgataccaacggccccatgtcaccgacaggagcccccggcgttatgccagagcgatcgcccccctcgagggaagcgctcgggcgtgacgccactccttaggcccggtgacaggtggggccggtccctataggcgggcagaaacccagcggtcgcaaatcgcgcgcatcggcaagggaaaaccgaccgacaataatgagcggcctctttaagactgctacattactcgagcagcgcgcgaatcgggacgagccggttcgtttcgcctggagacatgatgatggcgcttttcacggttggcgggcgtagttaatgcgcgcacgatctgccccatctcaaccgctacggccgcacatctgccgcgtgcgccgcaaacgggcgagtggggttagtggaggcgtgggcgcgagaaacgagggggcgaggtagcgggcgcgggaagcgaggagccgggcatagcattggcaagggtgtaaagacgccgagaaagggattcgtttctttcctctcgccactcttccccttgccttcgccacttgtgctctaactcttcgtttcctgtgccctacccttgccgcactcgctcgctctcaagctcctcctccaccggcgtcatggcacggggctccgcaccgctcgatggtagcgtgctgccgccttcccgcatcgtgagcgagaggcaggccgggctgccgcgccgattcatgccggaatctgccaccggccgggaggtggtcgcgctgggcgagggacgcccggcgccacactacccggggcggtccgtcttcttcctctctttcgcaatggcggggctggtccggccattctctatttttttcatggatattctggagttgtatgatctccagatggcgcacctcacccccaacgcgataatgacgttggccatcttcgcgcacctgtgcgagatgtttatcggggtgcgcccatctctccggctgttccggtggttcttcaccgtacagccggtgtcgccgccgacggtagtcggtggctgctacttccagccgcgggggcaggtgctgaaccgctacattccctgcgtcctccgcaaaaagtgggacgactggaagagcgattggttctacacccccctcgccgacgaagcgcgcctccgacttccgagccagcccccggcgcaggcctccagctggcgggcggcggtagatctgggagacggttacaaccccgttcttgaccgcctggcgggtctgcgatcccaggggctcacgggggccatggtgttcggcgactaccttcgtcgccggatcgcgccgttccagctgcgcgcccggggcgcctgggatacaccgggcccgaggactacatgaggacccaccaggggcgcaaatgggactgggaccctgaggacttcaggatggtggtccaacgggtgctgaatctcagctccgtggaggcatccctcatcccccaaggggtcctccccctctgctgcgatccagagcgcgccaagatcctggtcatcatgca

SEQ ID NO: 24215 - DNA, 33920 bp, Oryza sativa
ccatctcccaaggcgagttttcactcacccgtttctttttgtgttctggcttttcttctgccttagcgagatcccgtcgcgccccccgccattccaagtccggccggtctgaggccgaggagacggcgaccgcggaggcccggaggcgggaagctgaccggcgagaagccgcggaccgcctccgggaagccgaggaggctgcccaggaggccgtccgggttcgccaggctgaggaggccgctcgggaggaggtcagactccgctgggccggggagtccgtccaggaggcagaggcggcgcgcgcacgccaggcggcctgccaaacccccgacccgactccgcccgaggcgatgacgacttccgaggccacccacgacgaggccgcgggcacgccgctcgggcccgacccctcgggcgacgcttgggacgagccagcttcgggggacgcccccgagtccggcacgtcgatcggcgggccgagccgcgcggcacccacaccgagggggctctcccctctgccttccgctgccccactgagcgcggagcccctcctgcaggccttggccgccgcgaacagcacggtgctggacgggttaagtgcccagatggaggccctacaggcggagcgggcggagctcaacgcggcgtgggcgtgcgttgaggaggggcggcgctcggtggaggccatggtggaggcgggccacaaggcacaccgccggcacgcctcacagctcgaggcccgtcgtaaggacctggcggagatcgccagggaggtggaggaggagcgggagactgccctcatcgccaccgccgtgctcgacgaggcgcgggacgacctccgcctccaatacgggagccgggcggtggagctagaggagaagcttgacgccacctggggagtccttgacgccgccgctgcccgggaacggcgggcggcggagaacgaggcggcgtcccggcagcgcgaagaggcccttgaggctcgcgccacggcgctggaggagcgcgcccgcgccctggacgcgaaggagagagacctggcggaccgcgaggccaccgtcgccacccgggaggcaacactggcggcgcacgaggccgcctgcgccgaagaggagtccgcactccgcctccgcgaggacgcgctcaccgagcgggggcgagctctcgaggaggccgaggccgcggcgcagcggctggcggacagcctgttcctccgcgaggcagcgcgggaggagcaggcgcgccgcaatctggaaggcgcccgcgccgagagggccgcactggatcagcgggccgctgagctcgaggcgcgggcgaaggagctggacgcgagagcgcacagcggcggggcggccacgggccacggcgacctagccgcccgcctcgcagccgccgaacacaccatcgccgagctgcagggcgcgctggactcgtccgccggggaggtcgaggccctccgcttggcgagcgaggtagggcccggcatgcttcgggacgccgtctcccgtctagaccgcgccgggcggcaggcgggcctctggggcgggcaatacgcgaagtacgccgccaaccaggggggcctcgcccagcgcctctcaaagatggccggggccctcgagcggctccccgaggagctcgaggagacgatcaagtcatcctcgagggacctcgcccggggggcggtggagctcgtactggcaagctaccaggacagggaccctgacttctctccgtgggcagcgctggaagagttccctcccggaaccgaggacggcgcgcgcgcgcaggtccgggacgccgccgaccacatcgtccacagcttcgagggtacggcccctcggctcgcgttcgtgctcgactccgacgaggagggcggtgacgacggtgcggacgacagtgacgacgaggccgacgacccgggcgcgtcggagtgagcccccaggcccccgccaatcttaataacttttccttcttcttccgaggccttcgggcccccttcttgtatagactgatttaatctgcaatcaagtaaagaggaaatttctgcgtcagttctgtttgttgtgtgtatgagacgagaatggtctgtgccgcggtccttctgtgtcttggcttgaacaagggctcgtgcccaggtcccagcctcaaacggcgcgggtcgaggctagtgcctggggagatcctcgtgtcgagactggctaggccgggagcgcggtgaccgagggttatggatgacccgattgtgggcctttgccgattcccccccggagttcaccacgccccggggcacggctcggttctaggccccgtttggcgattttagccggcccgggccaccgagggcagggtcgagcacgagcgtgctaattcaagccaagattcttcaaaaggaaacgatggcacagacacagtcctcaggaaatcgaaaatgcttttattgaaatgcggaagagaaaaagggtaagtatatgcatgtggtagcccccggctaaccctgcacgcccgggggggggggtgcggggttggcccgagcccgagacatgacacccgacccccgctaggggtagaagcgacgaaggtgttcgatgttccacgggttaggcagctctgtgccgtcgcccgtggccagccgaacggagcccggccgggggacgccgatcactcgatacggaccctcccacattggtgagagcttgctcagtccagaacgcgtttggacgcggcgtaggacgaggtcgtcgacgcagagtgatcgggcccggacgtggcgctgatggtagcgccgcaggctctgctggtagcgcgcggctcggagggccgcgcgccgccttcgctcttccaagtagtcgaggtcgtctcggcgaagctgatcttgatcagcctcgcaatacatggtgacccgaggggacctcagggtgagctcagatgggaggaccgcctccgcgccgtagacgaggaagaaaggcgtttccccggttgctcggcttggcatggttcggttcgccctgagcaccgctggcagctcctcgatccacgagtcgccgtgcttcttgaggatgttgaaggtcttggttttgaggcccttgaggatttccgcgttggtgcgctccacttggccattgcttctggggtgggcgggggaggcgaagcagagcttgatgcccatgtcttcgcagtagtcaccgaagagctcactagtgaactgggtgccgttatccgtaatgatacggttaggcaccccaaaccgagcagtgatgcccctgatgaatttaagcgcggagtgcttattgatcttgatgaccggataagcctcgggccacttagtgaacttgtcgacagcgacatacagatactcgaacccgcccggggcccgcctgaacggacccaggatatcgagcccccagacagcaaacggccacgaaagaggtatggtctgcaggcctgggccggctgatgggtttgcctggcgtgaaactggcacgccctgcaccgccggaccaggtcgaccgcatcgttgagagccgtcggccaatagaaaccctggcgaaaggccttgccaaccaaggtgcgtgaggcggagtgggctccgcactcgccttcatggacatcggcgagaagctcgacgccttgttcccgaggaatgcacttcaggaggactccgttagccgcgcgccgatagagggtcctttccaccagcacgtagcgcttggagatgcgccggacgcgttcattcccttcgcggtcctcgggtagagtcttatctgcgaggtacgcctggatctcagtgatccaagcaatcaatctaggggagctgggagcgctcccctcgggtcccgaggcctggactccgacgggcctcgggggccgttcaggcgcgtccgtctcccatagggggtcgggtcgcgccgacggctgggcaagcctttcttcaaaggcgcccggtggggtctgggctcgcgaggaagcgagccttgagagttcgtcggcgaccgcgttatcccttctgggcacgtgccgaagctctatcccgtcgaaatggcgctccatacgccgcacctggcgcacgtaagcgtccatctgcgggtcagagcactggtactccttacagacctggttaacgaccaactgggagtcgcctaacacccggaggcggcggatccccagtccagctgccactctgagtcccgcaaggagtccctcgtactccgccatattgttggtcgcccgaaagtcgaggcggaccaggtatctgaggacgtctccgctcggcgaggtcaacgtgacccccgcaccggcgccctgaagagacagggagccgtcgaactgcatcacccagtaggcggtgtgaggcagctgcgaggggcccgagctggcctcgggggcggagacgggctcgggagctggggtccactccgccacaaagtcggcgagggcctggctcttgatcgcgtggcgtggttcaaagcgcaaatcgaattcagagagttcgattgcccatctcaccacccgtccagtaccctctcggttatgcaagatttggccgagggggtaagacgtaaccaccgtgacccgatgcgcttggaaataatggcgcaacttcctcgaagtcatcagaatagcgtaaagcatcttctgggcctgagggtatcgggtcttggcgtcccggagggcctcgctaacgaagtagacgggccgctgcacctttcggcggggccgatcctcttcgccaggggccgcatctccagggcgctcttcgtccgagaggccacgcggggcgcactcggcttctgtgccgacgacctcggggttagagggcgacaggcgcggccttcccgcaatggccccggggccatcctgggggtcgggggcacctggcaccgtcggacaagcaggcggagggccagctccggccgtcgggggcctcgggccgccgttcggctcgggggcctctcctccctgctctctcccgggtcgagtcgacacagggtggggatgcgcggagtgagggttgtcctcgtcgcgctccacgaccaacgccgcgctgaccacctgcggggttgccgccaggtagagtagcaacggctcatctggctccggggcgaccaggactgggggagaactgaggtacgccttcaactgagtgaaggcccgctcagcctcctccgtctaggtaaacggcccggagcgtttgaggagcttaaataggggtagcgccttctctcccagcctcgatatgaaccgacttagggcggccatgcagccggtgacgcactgcacatccctaagcttgctgggggggcgcatccgctctatagctcgtatcttctcgaggttggcctcgatgcctcgggcagagaccaagaacccgacaagcttgcccgcaggcacgccgaacacgcacttatcggggttcagctttatgcgggcggagcggagactttcgaaagtttccgctagatccgagagtaaggtctcttggttgcgcgtcttcacaaccaagtcatcaacataggcctcaacattgcgtcttatctggctacccaaagaaattcgagtagtacgttgaaaagtaggatctgcattctttaacccgaaaggcattgtcgtataacaataagttcctatgggggtaatgaatgcagttttttcctcatcctccctagccatgcgaatctgatgataaccagagtatgcatctagaaaacacaaaaggtcgcaccccgcggtggagtcgacaatctgatctatgcgtggcagggggtaagggtccttaggacatgccttgttaaggtcggtgtagtcgatgcacatccgaagcttgccgttcgccttgggaacgacgaccgggttcgccagccacttcggatggatgacctcacggatgaatccggcctccagaagtcgcgccacctcctcgcggatgaaggcttgacgttccggggcctgccgccgcactttctgccggaccggccttgcgcccggccgcacggtgagacggtgctcaatcacctccctggggaccacgggcatgtccgccggtctccaggcgaagacgtcggcgtttgcccgcaggaaggagacgagcgcgtcttcctatttgtcgtccagaagaccaccgattcgtgtggtcttggacgggccgtcgcccagggtaacctccttgaccgggacctcgtcgcacgtgaccatctgctgccttggggcggccgggatggaggtgctgagtctctcgtcgccacccgcgggcttggacgccgcggcaaggtggtccgcgcgctgctccatacaagcaagcgcgactttgaggtcgccatggacggtgatggggccaccggggcccggcatcttcatctggagataggcgtagtggaccgccgccatgaacttcaccaacgcgggcctccccaggaccgcgttgtagggcagactgaggtccgccacatcgaagtccacccgctccgtgcggaagttggcggaaccaccgaaggtgaccgggaggtcgatatgacccagcggccaggtgtgccccggcgtcacaccgatgatcggctgggacggccggagcaccatccccgggaccttgatggcgtcaaaggctgcgagggaaaggatgttgagggctgcacccccgtctatgaggacacgccccaacttcacattgcaaacggtgggggaaaccaccatcgcgatctgtcctccccaggcaacgcacggcgggtggtcggtttggtcgaaggtgaggggcaactccgaccaccgcgcccgccgcgtcgcctcatgggtaggggccgcggccagaagctctcgcttcatggccttgaggctccggcgagaagcgtgagcgcacgctcccccatcgacggtggcgacggtggcctcaggctcctggaaccccaggtcatcgtcgccatcatcgatgtcctcggcggtggccttctgcttggcctcacctcgccggttgccggcgggagccgccggggtcttgccctcacggcgctcctgcctcttctcctcctcccacttcctcgtccgctcagccaaacttttgaccgcgcggcagtccgcgaggtcgtggagggaggtgttgtgcacggtacaccacttgctggtcgggcgctccctgctgggagcgccggcctccttctttttgtcgctcgcaggcctcccctttcggggggcccgcgaagcgccctcgacggcgaggacatgaccctcgtcgtcggaacgggccgaccccttcttcctcctcctgtcccgccgccctgaccgagcggcggacccgggggcggccggagctgccacaccagaaccggaggagttccaggaccaggcctcctccttgcgagccacacggtccgcgagctcaaaaagctgcgctgtggtctggggctccttggaggcgatcttctcgagcatgcggttgtgccgcacgcccctcctgaacgcgtagatcaccgcgtgtgcggggatgcacggtatggtgttgcggacttgacagaaccgctgaatgtacgagcgaagagactcgtcgtcccttcgcagctctcatcattccgacgggacggggcgaggcgtgtgacaggccgcctgttgccacctaacccgcgatctgaccggtctgtgaccggtcacacaccgtgaccggtcacggaccggataagcgtgcgctgcgccgcattaaatgcggcgtggcgcgctcgtccaacctgctataaatgcggttaggtgagcccgctgtgctcatctaacccacatacgtggcgccaaaaccacagggggtcggggcgctccagccctcggggccgaaacgggagcggcctgacccctcggggagacagagggaggggtggccacgtcaccctcgggcccgacccccccgagggggtcgggccacgtgggtgaccgcggctacccaagcctctagtcacgatacccccggccccatgtcaccgacagacatatctgagtataataaatctagataaaacgttgcatctaatcttaatttttcttttatggaggaagtatcttataacgggcgagtggtagaagcctgcatttggatagatgattgggttgatctctctgcacagtgtatgcgtccccagttgcagcctctgttttaaaaaaaaaagttgcagcctcttagaataattgctgcagcgaccggcagcagtaggtgggggcgtcacccttggtgattaggatcgggagttatccgggggaggtttccgaaacaaacataaaatatatatgtcgaggtcgattctttctcttttccctttcttaatatttagggactggtagcaacctactacttaggcatattctaatctcctatgctaatcacctaaaaagaataatgccctataataaagcgacagtagtgcacgcacacgcaactcaataataacagagaaatatttttactagctaccaaatcatttaggaaacaaaacttggcattactaacaagaaaaggacactgcgatctttttgtgaaaaataaaaaactgcaatcatgtttacaagagcgtggccaacagagtgcctatactgcccatgatcctaattcctagattattgaggttttaagtaaaaatgggtattgaatagtagccctaaacaaactcttaaaaaaaaatctcatctcatctcttaaaaagtttgaagtcgttgcatacgggagcacgggaggagacgaccgattcgtttaattttttatgtggcccacctttcaaagtttaattgtgttagaagggaggatatttttatcctttaaacggatttgctaaatctctggcgccataaaattccattgattacagtcggtttgcatacctatgcgctataccacacaactgcacagaggcctcccaactgtgttaccgtgagattgaagattattttctcacatacatcatgatgagtgatgactatatattaattacattatatgtaattttaggacttacatatgtaattttcgaacttacatatgtaattttgagacttatattgtaaatacactaaaattacatatgtatttttgggatttacatatgtaaatttaggacttacattataaatacactaaaattacatatgtaatttgtaaatttacaatgtaaatatataccgactattttttttttgaaaaatatggcgtcataaatgtagctactccccctttaaataccattagagattaaaaaaagaggattgaattttggtagtatgttgatgatgctttaattctatttcataagatactctgaggtgcaagtttaattttttcctattctcagccgtccaagtggtacgagctggacggtcatcatacaaatgataaattaagatgatacacagaaagtcaaaatgatcggtcttgattttgaggacaagaggattactaatacaaacaaatttaatatatattctctgttcttgatcgagatgtagcaacgatcatatatgtttagttcgatcgatagacgataataattttatgcttttctttttcataccctaacgtatatttaaattttattgatctaggttttactgccaaggaggaatcataaattggttaagtgagagattatgtacaaacaaaaatatcaattgcgagcattcacgaccaactttctccgttcatattatgagtcatttaaattttgttattagcaaatttctaaaattttgaccgggtttatagaaaaatatatcaacataacattaaattagtttaactaaattcaccatgaaatatatcttaatattgtattgactttttattgtagatattggtataatttttataaaagtaattaaaatgagacaaatttaacttaggacaaaactaaaatcggaacgggtaaaggatagaactcgaaagaaagtgacttcttggtaaatgatttttttaagctttgaaccaagatggcgtgtgacaagagattctgaaaatgaatgttaaaagcataaacaatgtcctagttcgttttcaaaccaaatgactcccgcttctcgtcgggtctaatgatggcgaaggagcaggtttttattcgggcatccacgatgtaatgaagtagtggttaataagtattgaatgcatccctactaccagctattatacattgtggaggtggtaaagaactactaccagggtataagcttactaccaggtatactttatggtgggtcccatctatttttttaattgtggcaattggcatgactcatgtttaaataactttttagatgggtcccaccgtactatccactctacacactattaccacctgacatgggcccaccttactacctagttttgcaataaacattgatgatgccttagttaattcatggcaaaatgtggcatacaaaccagattataagggcatcctcaatgtatgtgggacttacaaaattaggttatagttgtttctatctctcacaatgtgtgagtaagatatggcgcacatgtaaagcaatggttggatagaaaagagagagggcgagagaggtaatagtttaatgtcttttatggcatagttgctatctcctctattatccacctccacaatgataaagtaaagggtcttacaacccatttttcatccatattgtggatgccctaaaggccatgtttcgttagacaaaattccctcaaataccaatatccatctttaacgaaacataaattttctcaaataccaatatccatctttatacttttttatgcgtataataagaggcatacacattagacaattaatatggcaagagaaatttattatattacacgaacgagactaccgatcgggcgctcgatccaggcgtggaaaaatcgggcgctgacgtcagcatatacgcatacgtgcaaaaccactttaaactattttttctcttaaattatttatccaaatcatgatctggttcaccattaaattcgttgcaattaaatcttcaaaacaagaccacacatggatatattccgatgaaaatttttttagcttattattgaattattttaaaatgttgcacgatgttccaccaagtatatcggaattgtttcattaagtagattgaaaatgtttcaatcgtttaaatcggtcattgtttcaccttatataaaaataatgtttcagcaagtagcgaaagaatgtttcagttcactgcaacatttgatccatacataatgaaacattataaatacactaggtgaaacatttttggtggaacaaaaaataaaatgaattcccttaatagagggtttctaaaatatatgggtgatttgtttcaatggagtatgtgatggagacacatgacaggtgggggcagcggcacgtgggtgaggccccagggggcgcgcacatcgtggagggagggagtgctcgattttcctccctcccccccgagcgaccgacggggaggattctcaatattacacagtaccttattgtgtccaagccgtcaaaatgttatggcttgcttctgtctgttcattctctgtaattcactaaacaaaagaaatatattatattattggctaagagatgtcctgttaattgttgtaaaccttggcaaggtgggaataattaactatttgctactcttacaagtggttctaaaggatttgccagtggacccacatgtcatagacagcgagtggcaaatcgttaattgccatatcttaaaagtggcaaatagttaaatgttccggcaagttggcataagtcgacctattctattttgagctttgtttgaattaacatggtgaaagagaaagaagaaaagatcagcgacctaggtggctgagatctaactaggtccgtcgttactttcaattaggacaaacattttcaatatattatatttcttactattttttgagttgtaatcctcgactaaagttaagtttgcaaagcaccggtgatttgcatgcatataatttcaaaccactacacaagttagtcatatatttgtaatggtattccaagggctcgaaaaggtataatgtttcagtaatttaaagttgtacattgctaggactaaaattttaatgatatctaatatacaattttattttagttaagcattaattttgttaccaatggttttactttatttttatctaagtttaattacttgtgcacatattactgtcagttattataaatttattttatttttatcttagaacaattcattgttgaaccttttatctaaatgagttgtatcaagaaagtaaatatgtgatatgcatcacacaagttaactctcctcgcagataccatatactgcaaaccatatttttgagtgtctctgtttcgtgtcaggcggttgggaacccaactcccctgcacggaaaacagagcagtctattagcacgtgattaattaagtatttgttaattttttttcaaaaatagattattttgattttttaaacaactttcgtatagaaacttttttaaaaaaacgcaccatttagcaattcgaaaagcgtgcacgtagaagatgaggaataggagttgggaacctgcccaaacgaaatcgtatcctaaggtgtgaacctcttactaggtatatctcatactgctaaattttattcataacacaactaccaaagtccgagttgagtacgacaagacaagtagaagttttcgttaggatcaatacagagacatagtctatctatcccataaaaaactaacctaagactgaatgtgacacttctagtataacaaatctagatatactaggatttgtcacatccattcgttatttttgtgatggagggggctaagctcttttcacaaaagctaatccatcaggagcccttgccacaacccatcgagatcacaatctcaatgtattagtttgctaggcttccaccatatactcttgtacatgtcaacatctagtcaacacataaatatgaggaaggctatttcgtatgtttccatgagcccagacctatataaatctcatatcttttatgtgatgtgttcttcgtacgtacgtatcttcataccaggttgccctacacacccacaactattgtaattgtgtttcaaccattcgacaagttcgaatagagaatgagggttgtggtgagagcctttagatttttatccaaagaatgtgaagcataagccatttgaaatgtagatattccattcacaattggccttgtttaacataatgaaatttattttggactttgcttcaaggaaattacaactaatcaatacaaaggagaaatgacgagtgactacgaattatgaaaaccactacttactttcattattttatagttggggagaatcatcataacattgtttgttctcaacgacttacaagttatatgtagtcctattttccttaactcaaaagtaaaatctcagaatcaatgactgattactgtgttgatagaatttcatatacattaattaccactgacgactgacatcaaactaaaacgaaagataatatgagagaatcatccgtctaaactctaaatcatgtcatcgtaattggccggcggaggcataatgaagaagctaaacaaatctgactgaagtatgtactttgtgttgaccaatttggctctacttaaataaaacataattagcgatcaaaatgcactggtataatattagcagtcgtttttctacgacgggaggcagaccgatcgagtgtgttaggagttaggaataatccacagattaagacgacgcagatcctaaaacacacaacatttataatcaaaatcaaaaaacattcctcgcgttcgcgtaaagcacagcaaaccgtgttgccccgctgcgcgcgcgtgtgattggctggcttggtcagggtcaacgttggttgctactactacttgctaccaacatcaacaagaagaaaacctgcatgatttgcggctcctctccgtccatccaggctgccggcctgccgctgccgagtagtagtagtaagcgccgcgagtacgacctcgtccagtctctccctccctccctcccaccctgcgcgccttcctccttccatcttccaactacggtccaaccccaactactctaccacctccaacttttcagaccgcatagcatatcccccaccctttctacttctgtgccttcctccgctctcgccaccctcatgctctttataacccgcaccacctcatccgtcgcatcgatcctccctccctcaatcgctcaaactgcattctacaacctagctagcattcggaaatcgttccgtgctcaccacgtactcaccagcgcagcgcgccatgatgattcttgaggcggagcattccttcttctaaccgccgccgccgccgccggcggcgcgagcaccgtggtggagcctgtcgcgtcgtgctccgcacggacagcttcgccgccgacagctccttcgccggtaacctgggcgcctcgtctcgctcctggaggccaaggccccggccatcgggttcgacatcgccacggtcggggtcggcggcgatggggaggatcagcgcgtgcacggcctggcgctctgccgcggcgacgtcgcaagggcaacgtgcgccgagtgcatccgggcggcgggtgcgctggcgcggcgcgtgtgcccgtccaagaaggacgccgtcgtctggctcgacgcctgcatgctccgctactccggcgagccattcttcggcgaggtcgacgccgagcaccgcgccgtcgtcccgccggcccgcgtcctgcggggcgcggacaggtcggccgacctcgacagggaggtgtcccggctgatgaagcggctgacgaggacggcctacctgtcgccgctgctgttcgccgccggggaggccgtggcggtcggcggtgcgcagaggctgcacgggatggcacagtgcaccaaggacctctccggcggcgactgcaagatgtgcctggaatccgccattgatcaactgctggcgaggggttgcgccaaggagggaggcaaagtgttgggtggaagctgcagcttgagatacgacttctactccttgtctgattcctaggctaatttggattttgcaattttaaacttgtaattaaggtgaccacattgtgcatagagattcccatgtaatcacatactactactactactagtactcctacaagaaagagctctgctcataaatagagcagaatattgtctttcaattttgacaattttcaattttctttggacactaacatcgtgaaatgtgagcatcatcgatcgtcatgaatatgtgatttgaatcaaatttgaatcctttggcccggcagtaatttgcaaagagttcaaacagcgacgcgctacaacgaggcaacttggtaacttggcatggtacaaatttgattcgagattcatgactcataggattgagattttacgggagtttggcaacgcgcaggaccaagtacggatgaaccaagtgcgatgggcgacacattcaacaagatgaattcaatgtcctgcaataagcacggctgaccttttggataactaaatacttttgctgttttcaagtcaaaactcttgacaagatcctaaggacaacatgacttcccgcgtgttttcttgtcatgttggaacgaattctatctccagtcacagaatatgtgatgttttggacaacggcgtgatcactatgacactagctcaataaattgtactacatcgggtataaaccgcatcgtgtttcgttttgcactaggtttagcatatactttcactttacaccaggttatcttgaaataagtttcacttaagttcttaacaccaggatacatcatcaaacctataaaactatcatgaaatttcacagaatctgaaataaacattgtgaaacatggtatacattcaagaagtttcatatatttttcttcagttatagcttagtgaacatagatgttctaacccaacaaatcacatacacatgcattatattccctacgtgttctagagtacgataacatcgacttttaaatatacatttaaccatttatcttgttaaaaaaaatatgttattgccatttattttgttctgatttttttaatcattaaataatttaagcatgacttatgcttttaatatttgcaaaaaaatatgagacaaatggtagttcaaaaattaacgacattatccgtcaaaaaccagagggattatactaaatacaaagatatttagacagcattttggtgtacatgtttacgccatgaccgtgtgagtctagtgtttcgtgggttttatgcatcccattatacttttaaaatgtaataccattttatttttattctccataatttcctgaccgagagaaagagagaagaaaaaaaatgtgttgtttagatgtctgcacaatataccactatactacataaatgatcttttcatgccgacaaaaactaattttcacaggcgagtgagcactcgcctggagcgccaggtgtctgcaaaaatcggcattttgcatgcgggcaacacaattgcatgcataaaatcattttcgcggacagatgacctaagaaagccgcttgcaaagacccgatttttgcatgcgggcaaataaggatgcttgattgcaatgatttaaaaaataaaaaaagaaaaaaaaatccaaaacccaaacccttggtcgccgccgttgtgtgccgcgctacagcccttgcccccgctgcctgcggttgtggttgccgctcgcgatgtcgtgccgcccttccgcctcctccgtgcagcacgcgaggacggatccgccctcttccaagcactcacatcgccgtcgtggtcgtggtcgccactcctggtgttgcgccacccttccgcctcctctccacatgtgcaagggcggatccaccactctcgagcactccggcagcgaatccaccattcctaagcttgtcgacggtgggttgtccgctctcgatttagcccgcacgtacccgcaagttcgtggttgccgttcctggtgccacaccacccttccacctcctctccgccacgtgtgagggtggatccgccgctcctgagcccacacgcagccgctgtggtcctggtctccgcttccagtgcggcgctgcccttccgcctcctttccaccggacgcgaggacgtatccgccgctcccgaggttgctggcaatggatccaccgttcctaagcccgccggtggtggatccgccactctcgagcccgcacgtagctacggtgatcttggtcgctgctcccggtgcaaggccgccctttcgcctcctctccaccaagccccgagggtggatccatcgctctcgagcccgctggtggtggatctgcccttccgaagcctaccaatggccggtggatctgctactcccgagttcgccgacggcaaatccacccttcccgaggactgtcgtcgccagattcgccgcgcctgttgaccgccactagaagagccgatcgtcgcatccacctcagccgctgtgtaggagaggagaaggggggagcgaaggggaagatatgaggagagggagtgggagaggagtgatgggaggtggagcagatggggaggcagcggacgatggagaggaggagaagagaaaaaaaggaggcacattgagtgagaagggggatgaggagaaaaaaggtgcgggagaaaaaagagtagtgcgtggccagtgcgaggacacgtggagatagcccacttgctctccacgttgcctgcttgcgaaaatctatttttgtaggcccccttaagaggcccacatgcgataattggtgtattattgcattggacctcttaagaggtcgccttcaaaaatagattttcgtatgcaacccttgaactgcgtttgggaagcgatttttgcatgttgggtagttatgatccgcctgcaacttgaaagtgtctcgcctgtaaaatttgattttgtagtgtacaacacattccgtggtaggtagtttgttggtcaaaagaagattttgttaagtaaactcaagtacgcgctaatcaaccacagtattatacttatttctaagtgttcaattaagtcaagctatgatactaaatacaggtagccctgaatagttaagaaactagttgcactacaacttgtgtggcgttgataaaatatactactcgctagaaacaggagtctattgagctgtttcaggcttgcaacaaactcacagaatttcatacaatttaaatcacacatcaatgattctatgataatgatcgctagtatacatgaacccccataggtgccagttagaaaccggcaataggtgtcaggttcttaccctatgaccaacacctatagtattaagtgaaataacaaaaaagagcctaagaagccgtcattgccggatccggcagctgacggcgaggcgcatggcgaggccagggaagagctcggtgaggggaggagtgcgacggccttcacctccacctcctacccagccaacggcctccaccttgccctccgagccggccttctccaccgccaccgtcgtcgccagatctggaggaggagaagggaggaggtgaacagagaggagggccaccaggagagaggggggagcctccttttccacctccatcttcttcctagtcaccggccaccacctcgtgctctgcgccagcctttgctgctacctccgccaccaaatcgggaggaggaggaggagaagggagggccaccggaaaaaagtacgaattacccccctgaactatcgcggtcgaccgaattaccccccccaaacccgagaaccagagatcgttcaataccggacaaattagcccctcgactcaatctagagcgatcttatcctacgtagcgtatgcttgacaatccagtcagcattttctttttttaatggtagggcccacctgtcatatatactctctcacctcctctttccccttccactccgtcggtctctctctctctctccccctctctctcgggccgccggtctctctctcccccctctttttaggccatctggcataggtcgagcggcggcgggaggtcgacgtgcatggcggcgtgcaggggcgggtggtgggcggtggtggcaagtcaaaatggccgtgtctctctttgtcctcggcttctccctctgtgtgtcatctcctggctccgaattgtgggcggcgacgacgagcgtggcggtggcggcggcgttcatggtgacgttctcgttggggttcgggtcgtctagcgcaggtcgagcagcggtggacggtcggcgcccacggcattgcgcgggggcgggtgatgggcggcagcgtgggaggcgcaccgcgggccacggatgccagcgaggaggctgtggggctgtggcgtcacggactcacggagagggcgcgggaggcggcgggctgcggcgaggagggcgcaccctcgccggtgcatcctccaacctcattcgccccctcctggcggcagctggatgccgtccacctcatccgcctgtcctcttctttggaggccgccggtcaggatctgccgcctcctccttgctcggctctcctgacggcgccatagagagagagagaacgagggggagagagagacgcctaccatctccaatgtccttagcgccgcccgctactcgtctcgccctccccaccgggctcgccgctagcctgaggagagagagagagagggatgatgatgatgacgtagctggcctcctccaacaccctcctcagcgccgcacaccgtgccattcccgtgctctgccgccgccccccacacgccgaccgcccgtccgcacgtcgctgccgccgcccactgcccgtccacgcgcgcccgagagagagaagggggaaggggaagaggggagaggggtaatgacaggtgggccctattttttcttttatttctttttgctaattggatttccacgtcgacgccatgtgtatggcacgtaggagaaaaaccgctcaggattgagtcagtggggtaatttgtccggtatcaatagttcgaggtttaatatgtgtggttttgtggttcagggggtaattcgtactgtcgcaatagttcagagggataattcatacttttcctatggtaaatggcaggataatttgtctttagtactccctgctatctcataatataaagcatagttaaatttatcatggtcttcaagtaaaactaatttttagctttaattctcatatgctatatgaaagtaaattcaaacgttaatctaagggcatgtttggcacagctccaactccagttctccaactctcttggactgatgctcagccaaacagtttcagttacagctaaaatgggagctgcactaggtgaagatctctcacaaaataagctagagagttggagctggatttaggctactccacaactctactccagacccaactcctggagctaaatttaggagttggaactataccaaacttgccctaataatactatattacatcggtacagctagaaatacatgcaaatccattcaaaatttcagctctgcgttaaataggttgcacttttaattatttatgagaaaaggaacatgtcattggtacaaaaatatttactaggtaagtattgcctttgttttatattatatgtcactttattttttctagtaaaactcttttaaatttaacctaatctataggaaaatataataatatttttaacacaaaataaacatattattaaaaatatattcaatgttatatttaataaaactaatttagcgatgtagatgtatcatattagacagagggagtactacatacacaaattaattctttataaatttaatatatcaccaagctggtatatatcaccgggttaaatgtgatactgtttgttcacctatatcaaattttattcacatgagcatgatgtactttgatgtacctgcaaatgacatttgcagatgaaattttccactgatatatccctaaaccgagattcagaggatgcctttgttttttggcaagaggtgaacgacatatacaaattaattatggctgtgtttagttaaacacaaaatttagattttagttaaaattagagatgatgtgattgaaaagttatgtgtgtataacagattgatgtgatagaaaatgactgaagtttggatctttggatctaaacacagcctatgtattttgatggtctgacttggatagacaaatgggttgatcgagcaacctaatcagcttattttttagtgccagaacaattaataaactggatgaccataattgaccgatcgataccaattttaaaatgagaagttcattacgtgtgccatacgtatacggtaagtatactatgtgtgtgcgctgcagtatatgcgtgctacgtgcagttctgctgttcactcggtggcgtgacgtgggctgcggcgagggcaaaattgagaacacaacctgtaccattcaagtattcaacctaccaagacacaaccctatatagcagcttcacgggttaggaacatattgatgctcattagcgacatgatgaaacacatccgcactggagctatgcgtacacgcgtgcaagttttcaaaaagcgattggcatggaaaagaaaacattggaggaaagaaagaacaatgtttaatcctataaaaaagagtgatttgtccctaaaagacctcgtgcataattgagaactcatggaagtttaaatggaataacttgctgatacaaaattctcacaataaacgtactattggaaccatttgagaactaatcaatacttcaagtttgcaccctttttaacaggaattagagattatacagctatcattcttcacattaatttggtggggtgatcaaaaaataagattgtctcttggcatacagttaaggctactgaagaatatgcaatgatgtttataaatatgatgcatacaatatgtctgcccttactatgatccttggaatataccaggttcaacttcctggagatgttagatatggagcagtaatatttttgcatttttgcagctttttttacaaataactgcaaacttttgagcgtcctgtagcgaatttttcaaaacattataaagatcaagggaaaggtcacccttacacatcacgataaggggtctgctccatcaagtagactgcaggtgaaatcattgtttaccagaactattttctctgcctccttgataacagcgtctagttgaagaggtgcaaaactccgaccagggccatagaaatgaggaaaatagtttgaatcatcagctgcctcataaactaagccatctgaaagctacaacaaacaagaagagaaaatgctatgaatgtgaagtggcacaacgaacagatgaattctactgaaatacaaacaggcatgggcttgctacttgcctagttaccagggcaaaatacatgtatagtttttgttcatgaatagagataaaaaaaaacctggtgcgttctgaagtatccatctattatattattaaaacaactttgaaagaagacaccacgttcgctgtgggggctagaaatttccacattaatcggagaaaaagaaaagaagagtccaactagaaatacaattttaaaatagctgaaattcgaaattaaaaataagcaatattgaaacaagaggccctataagaacccaatacgagattaatcaaaattaaaaataaaaaaataaaatccaaaattagcaaaaaaaaaaaggaaaagaagagttcgagtagaaatacaatttaaaaataactaaaattcggaattaaaattaagcaatattaaaagaagagaccatataaaatcccaatacgagattataaaaattcagaataaaaaaaataaaaaaaatcaaaattagagtggtggcggttgatgtgacatctaaaaaactattaataaaacaccaaatgtaatcctaatgacgattaataggagggataacgcgtaggccgtgaagtaacaggtcaaggcggtcggcgggacttcttagagagtaaaaaagcataatgatataataatattcaatttttaaaatctcaatggcaataaaaagaagaggcggcgggcgggttgtacaagagtacaatggcagagccgtcgacggttggtgggacttctagaaagtaaaaaatgaattccaatgatagttatgttcaaattttacaatcccaatgacaacaaagagtaagcggcagacgagtcgtagagtagtatagtggcagtgtttgacaggacttctaaaagttataaaaaatgaaacccaacgagacaataaactttaaaaactacgaggtccaatttttaaaggttcaggacttctaaaaggtaaaagaataatcatgtttgattttaaaatcgcaatagcaataaagaagggagacagtgggtgagccgtagaggagtacagtggcaaagtcacttatggtttggtgggacttctagaaagtaaaaactgaacccaatcgataattacattcgacttttaaaatcccaatgacaataaacagaagaagcagtggatgagctgtagaggagtataatggcagcgtttgatgggacttctaaaaattataaaaacgaaacccaacgagacaataaactctaaaaactatacgatccaatttgtaaaggttctaaggagaatgaatagaaaaagtggtagatcgagttagcaaataaaaaaaagaaatgacaaaagaaagttgtagcaattggtatgacttttaaaaactataaaattaaaaacacagggataataaagtttggtctttcaaagtcttaagtcttaagacaacaagatagttatctaataagttttaagtaaaatcatattaaaaaaatatataattttatatgggtgctagccgcgcaactagtttaatttaaaatgatctattatgtgactacatccaatggagtttaaatacactgacacacgttaccttggaagtgtcaacttgtagtaggtatagatcattccttcctaggaaaaagttcttaagcgttttcctcacctaaaacaggttgagaatgagttctaaagaatacatatacagtgccaaaaaggaatggttggaggtcatatataaacaacgcccagatcaaattacaagacaaatatattattcagtgtatcacgaaaagtatataaattgaagtacttatatgcaatagtagtaacatacttttgcacaaaattgttttgtagaacttgagtgtaccaaacaataggtgtcacagtttagaaatgtatatgggattgttgagtaagcaaaaccatttccatatatcatatatgaaaacacagccaaagaacgcaatatgaatagcaggccctttcttaataggccacaatttctgaaatttaacatcctgatataatgagatgccatgttttcttttcgctagcatttacctacaacctgtttgcataaactacaaatgggcaccaatttgcatgtctgtcaaagcaatcaagggaaatagtatgtccttctaaagccaaacagaacgacttccgcacattatctattatattattaaaggaatagaaaaagaagcatccacgttcgctctcatggcctagaaattctcactttaatcggagaaaaagaaaaagtagagtccatatagaaatagaatgtagaaatagctgaaattcggaattaaaaaataaggaatattagaacatgagactaaagtccatatagaaatacaatttagaaatagttgaaattcggaattaaaaaataaggaatattagaagaggagactagagtccatgtagaaatacaattaggaaataactgaaattcggaattaaaaataaggaatattagaagtagagtatagagtccatacagaaataaaattaggaaataactgaaattcggaattaaaaataaggaatattagaagtagagtatagagtccatacagaaataaaattaggaaataactgaaatttggaattaaaaataaggaatattagaagtagagtatagagtccatatagaaatacaattaggaaataatagaaatatggaattaaaaataaggaatattagaagtagagtatagagtccatatataaatacaattaagaaaaaaatagaaattcagaattaaaaaaataaggaatattagaagtagagtatagagtccatataggaatttaaaactaactaaaatttggaataaacataataaaattaaaagtagagtttagagtccgtataaaaatacaatttacaaataactaaaattagaaattaagaaaacatgggaagaagagtttaaagtcaatataggaatacaatttagaagtaactaaaattcaaaattaaaaattaaagaatattgaaagatgagtttagagtccacatagaaatacaattagaaataataaaaattcagaaataaaaataaataatattggaagaagagcatagagtctatataaaaatacaatttacagaaaattcggaattaaaaaatattaaaagacgagtctagagtccatagaggaatttatataatttacaaataactaaaatttgatattaaaaataactaataactaacacgtatataaaatataatatgaatattatacattagtagttttgtaaagttattgcaaaatttaaattatgttgtaattttaatatatttgaataatataatgggaaaacatatatgctattatatgagagaaaatataatgatgctacccgcgcaatctgcacgggccaccatgctagttatagataatatagattattcttcactgctttgttacggtcactgctcagaaacatcctaagggcaacagcaatgtatcttacctaactaagtaataagtagcagggctaagtagtaggcctttgtaaagtgggtcgcatgagaaaaaaatattgctttttagttgctttttgtccaactcagcatgtagtagtagcacatcttgtgttggaaggagagagtgagagagattttaatgtttttttattcttatgagtgggtcataagcttagtaccgagcattagttactacccacttccacaatgcttattactaagtcataggaatagtatattgcctactacctgcttttttctaacattgtggatgccctaaatgaatcaaaagattccaaaggaaatggcatctaggatggccaattggacacacgcaagaagcaggagatctccacacgaagctctgtaggcaaacaaaagatgaaatcacacatgctgcgagaggcacctctaatagcattactgatttgcgtccaacctccaacctgggttgtaatatttggatggctttatccctaattttaaacagcaattttcagcaaagtagtctagcaccctagatccactgaaaaatcagagaaccaatgactaggcccaaatctccacttgaaatgtgcatatgataaatagagagatccatggggatcccgcgagtcggaagaaatcagacgtccctgctttctaattgggaattacctgactgaggtcgctgaggtggatacagccggtggagcggtcgaggtcaccgccaagggtgccgccggtgcgctgaagctgcgcccactcatccgccgtgctgatacggtatacgaacgcctgcggcgctggtttatccatttcggccgcccgctgacagtgctgagggttgaccatcagatacgtctcctctacgtttctgctccagaggacagaagatttcacttgttcctttttttttaggaagcactattggttctggccagcaataaagaattttatagaagaacggcagtccaagttacacgctacaaattacaaaaccaaatgtatgtaggccatgtttagattcactttaaaatttttcaccatgtcacatcgaatatttagatacatgtatagagtattaaatatagaaaaaaatagataaataattacacagattgcgtgtaaattatgagacgaattttttaaacctaattagtccatgatttgataatgtgatgctacagtaaatatttgctaataacagattaattaggcttaataaattcgtttctcagtttacaggcgaaatctgtaatttattttattattagtctacgtttaatacttcaaatgtgtgtccgtatatccgatatgacacgccaaaacttttcacccttggatctaacatagccataacctatctaaatttatttttgggtgtgttagtcccggcaaaatttaaaggttgggtggaaatgggacgaagggccgaaagttggaaatttgtgtgtgtagaaaaagtttggatgtgataaaaaaatggaaagtttgaaaaaaaagttggaaactaaacaagggcttccttgactcgttgtatattctgtaaatatgcaagagaattccattctatttacaccggcccatgaagaagccggcctaattagtaagatcaaataaaatgttgttacaaagttcaataggaaagttactgaaaagaaaatctaaaagtcacactgcttagaaccattaggaggagtgagtggcggaagctggattaaaaataagatttaacgaaaatgtttgtttcataaggccaactaagcacaacaaataccatatctatactataatcgcataaaaatatagtataattacagacaaaaccattttaaaataaagtaatattttttgcgccatacataattcatcatacaccaaaaattttataaaacatggtcgatagatatctttaatatatatatatatatgtatgtatgtatgtatgtatgtgcgtgaccacaccatgtccttatccctgttcctctatgtccatagaccatagcagcaggacgaaatcgattaggcgctagccgctaggcagctagccaccacaaatgacgatgtcctgcacgtgtctgcacgtgttgcttgcgcttggccctggcggctggcctgtcgggcgctaggctgctagctgctgcagtgttgcactgctgcggactgttggccgcacggcagcatggccgcacggggatggccggccggccggactagacggtggtggggctagcacggccggactgcgacagtgacagcatcgcattgtcagcttagcaccaagcaggaggagagaaggcgaggagcgagctattggctgcgaggagccagccgtcgctcaacgccggcaggccgtggctaggtgtcgcgtgcaccgtgcggtgcggagagttgtcgtaggctctcttgacctcccattatatagatgaagtgaataatttatatcatcaaataaatataatgaaacattcgacgtctcgagagaagaatattggaggcattgctgggtctttagcctgccagtcaacttcagcctgagatgtgcccgtcaaactactcgaaggcagcgaccagatgtgttacacatttaggagactggacaaaaaggctaaagatctatatcatctcaaacattcttaactcatactcatgtgaatttagttctcaggatgtgcactagattcacactttcatcttaagtatggacatacatagcaaacacatttcagatgaaagcgattaaaatttacaactactttagagatacataggccgatcggccaaatagatgtatgagggaacatcggaagcttgtctacccaatccccaagcacaccgactagacgtttaccccattaagtttaagtcctagaagaagcaatcgattacccgcatcactcaaaagactaagtttacaacctgcaagcaaaaggttaatccaatagcaagagtcagtacattattagaataatgtactggcaagcaccaagacaaaactaacaccctacttgcaaggcatataatcaaggaaggcataatatggatttttttagcataaagcaagttttatttgcataaaacacattcaaatcagatttgctttcaaataaatttcagcaagctagtacttagcatatgggcatcaaagtagacattaatcatgtataaatatacacctcattgccatccacggcagcaaggagatcattctcaaatctcatcataatttgaagataaaattcagcatttagaagaataaacacaagtctatactcaatacatatccacacaccgctcataaccgcgagcacggctaattgattagttttaactctgaagagtttgtacactttacccacatgatgcgaaataataatcatgcaagagcatggcacgcgatacataagtacccgatttattacccgcatcaacgtttttccaaaattcatgatttagccttacaccagcacgatatgtgttactccatcctaagccatacacgttatataacctagaaccgttaagtggcgggcccacgccttaaacttaacactgtggtggcggacacaacgggaacccaccacgtggcacaataccattgtattggacacgcttagtcacctaaactaccacatcggggtaaataggaagctcctttgaattattcgaactcatatacaccggcctaccagaatgtaaggctaaaccataaataatttactaatcttgggctatcccatactagcacatgtggttatactgtatacgaaatgaactgacattgagtgaagtccttaggtcggtttaggcgcactctccccctatcggtacacaactaatcaccatatgtgcaccacttaaggcccaaacctagaatctatgttttccatcattttatttatcaaaatcacaagtattaaaattctgtccagattatttcaaaatcaattttcatatttgtaatgagcccataatgacaaggaagatcattctaagcatggctaagcattatagtaacctagtgacatcaaaactcatatataaagtgttataattatattattcctaaggttaggaatggggatatggatatacgtggggttaaggtgataatgcaagtagtagaagtttgtctaacaagtttaacaaaattataatttattagtgtacaatcgacatgcaagatttgcaaacattttcaataacctctaaaacataggttcaaagtgatcaaagagagagggaggtgggacttgccttgtaacttggaaaaagttagcaccaaaatcacttcttcaccgtttaagcaatcatctatacaaagtacacgttatgtaattaaacaccgaattatgcgaaaaatccaaaatgctctaaaatgcatgatttgtgcacagtggataggtactggtctaagatgaatttaggtgaaagaattcctattttatctctttttatttgggagttatgaaatttagaagtttactcggtataatataggatttacttaggtactattctgaatttgttgtaaggtgattcttattaagtttatatttgctgaggtgaagatctgtatttttaagactaacacatttagtttcataacttttggagttaatatgaattctttatgtattttacaagttataacgtattgtaggcgtatagtgttctatatgcacatgcctttgatatttgaagtccaaaacttattctactttaattgtgatgaatgaagcaaataattttgttaactaatctatccctagttcacaagtttaggacttttattattttagttcatatttttataaacaagaggaattaatatatgattaaagtgtactaagttttggtggaagggatggatctatgccttcattggttcaacaagttttatttgggtttcattatagctagagtgtgtttctatatgcatttatatatatgtattgcttaatcaatactatgtgattagaacctatcctataaatttaaagtttagagttgaaacctgtacagaaggtgccatattttactctactatgttaaattatattacttgctggttctatagaaatttggttcactccatttggactaaagatgaattttctacaaattttacaaattaaaggttgctctatattggttattacttacataaatatttagaggcttttatcatacagtaagtatatacttttattttacaacttggaagtatatgttttggttattctacagaacttgggtttactcaaaaaggatctaagatgaattttatatgaatttctaaagttcagcttatataaaactagttattttaaaggtaatagttttagaggcatttgatgcaaagcaagtatacctttttattttattctacaggagagcataagtttgtgattctgtggaatttgagtttatcccaaaataggttgaagtcaattttccatatatttttataagtttgtgcatgctttatgtgtgatttaacttagatgaattttagaggtgaaatttgtactgtgagtgaaagtttttatttcataactttaaatttcataatctagtgagttcacagaaatttgaatcatctcaaaataatctatatttgattttatatggattttacaagttctaggtatttctcttgtatattctccgattttatctccaggggtccactgtcagtctcttactgttttgcagaaaggtccctagtttttccataaatgaactcgcagtactaggccccacatgtaagtctctagtgctttacgctttaaaccctaagcttttagtttactacaagacagggtccttgtcttcaacctccagccgccgatgtacagggaggagtggtcgtgagcttggcgagcttgccggcggcgataggtggctcggatgacgttggggtaaaaatagaaaatttagatgagttctttgcaaagccaatggtggtcttgttacaagccatagtggacagaatagatggtggcgatggtggaaacagcggcatgtctcgggttgcttgtgcatgtcgagttctagagcaatgtgatgtgagatagtgcatgcatgtggtcttaaggtactcaagggtgctcaccgaagcttgaaaatggcttacagaggcccgacgggatcttgacgatggacggacatgacggcagcggcaagaacctccgaggtaacggcgtcggttcaatctacttgaagagtggccatgctgttgacgtttttttatcaacatatgatcacctaacgatttgcggtgtaaataatagagtcctcaaaatcgatagatcggctaatgaaaccgatttcgagattaattcacttccgcggaatcacacgactaatttacaagcaaattagaaaaatgataaatatcataattacgtgacgacaaacgattagtttctgggcaaactagcaaagataactgtggtgaaaccatgtgtcttttagggacttaagcacatctgttaaagcagtgtgcgtgtggtgtatgcccaataatttggaagtttctttattcacaacagcaagctcttctttatagctgttatgctatgtgaattttcaaagatattgtcaactttaggttgcacgcatcatattctgcaaagcagtcggtatatcatctggatcatattattcggggattcacaccgcatatgctatatattggtatcaagtcacttggttgactataattatcaaaaaccactcagttggttggattatttattccttaactatatgcttggtttgttcaattaaccacatagtcgggagctacacctatttggtgcatctagtcgatgcacctgactttatttttcagccctccacagtcttcagatttggtaaaagtactcgggagaccatgacgaagatgattgaagcactcggctttggagtaatctgatttgagagaagattatcttttcgactgcgaaggtttcaggggctactatggagattatgggtaccccatacccacacggcgtggttatccgactggttataggggataacttatatctatgaaatatgtaacggatcataacttggatattacgtttccctgtatattatggaacggcctaaagtcctggtttgataagattgtaaagtagatttaggaaaccgataccgtattggttaaggtttctatcttgtaatcctgcccccatcctatataaggtgggcaggaggccctctaggcggcatgagacaactagatcgtcagatctataatacacccggcggacttaaatccccaaacaggagtagggtattacctctcattgagagggcctgaacctgtctaaatccttgtctccgcatccatccacttttaggtctcgtgcgctatccccttttcatattgccgaaaatttctttcgacaataacctcctcgctttcgtggagaagcacgaccgtttttcagcacaaaatggcaaaggttaaccaaatcctaggattgctagaatccagctatgaaaacaaaatagaaaataacggaaaagtaaagaatgagaaaaatagtagattgatagattgttgggggttctcccgttctactgttaccgatatactccctccgtttcgaaatgtttggcgccgttgactttttagcacatgtttgaccgttcgtcttattcaaaaaatttaagtaattattaattcttttcctatcatttgattcattgttaaatatatttttatgtaggcatataattttacatatttcacaaaagtttttaaataagatgaacagtcaaacatatgctaaaaagtcaacggtgtcaaacatttcgaaacggagggagtatataccggcaaaatgataatggtcccacacaaaataaacaaggaaataaactaataaaaatccattcttatctttaccgctgaacgcgctaactcaccggttcccatgatcccatctcctgccaaccgacgccaaaactccatatcgcacgcgggacgcagcggcacccaaatttgtctcggtcagcaacacgaactcctcaaggatctgcaaatttgcatgca

SEQ ID NO: 24216 - DNA, 1570 bp, Oryza sativa
atcataagataatttcaccatctattccaaaataatttggcctgcacaaatgaactaactataagccaaattatgatcaaacacatgcatgcatgtccaagaggttgattaggtcccatagatggtgcatgtgcaaagaatcgatgaggggctcccagcgaaggagaatttggtcatggcgacagtggccgaagttgaagccgatggaggccgatctccgtccatggtgctccattcttctcggttcttgaggggtttttaagaggatctcatggaggagttgatggcgcgatggctctgcttgatttggtccagaacgacgggaacagcgacgaggtcacaacggcgtcgcgcagagcacgccccaaggccggcgatgacacagtggcgttcccgttgattcgctgtacgaaagaggatgaaatcaaaaggagaatcttgggcatggtgaggagagtatggaacgtggaagagatagggttggcgaagactcgtcggcgacgacgagcatcgtctttgtcacggctggtggtgagatcgaaggcgaggagagcagcaagagctctctccctcggttctctcggcacaggactggaggatgaggcgaggcgatgcgactgtgggagagatggagagtgagctcggtgttagagttcggatatattgcatgtacatgtgataatgctcccgtatggctgaggatagagtttgttgtgttagttagacaagataggatcaatctctgtaatttagctgtacacaacaaactctcaccgaagctatttatctcttgtatcctgtcgcccggtttgtggcattattatcaacacgtaacctcctctctgtaggagttcctcgcttccacatggtatcagagcaccccgctagattagattagctcgtttctgcatctctgcaatggcgagttcttcctcagcggtggtgatctccaacccattgttcgggatccaaatcttggagaaattcaccaagcaaaatcactccctctggtctgcacaaatccttaccaccctacggggtgcgcagctagaagggtacatcaccggcacagctgaagctccggcggccgagtgtgagaaagaagatggcgacaagaaagtcaagaccaccatctccaatccagaatacatcaagtggttcacccaggaccaacaggtgctggggttcctcttctcctccctgtcacgggaggtcctgcagcaggtggctggcgcaaagacggcggcccaagcatggagcatgatcaacgacatgttcacctgcaagtccaaagctggtgccatcaacgttctccttgcactaacgacaactcagaagggacccatttccatctccgagtacatcgccaagatgcgatctcttggcgacgagatggcgggtgcagggaagcctcttgacgatgaagagctgatagcgtacatcatcaacggcctcaactcggactttgacgcaacagttgaaggattgatggcaacagcaagaatcgcacccctttcaatttctcatgtgtattctcaactcttgagatatgaaaacaggggctgcagga

SEQ ID NO: 24217 - DNA, 734 bp, Oryza sativa
ctgcagcccataagatatgagttgtgcaagattgtacaggaagctgaaaaattatatgaaaggaagggcattgtcggatgggtgaattatatctgatcgtccaaaatgggttaatagtgatcgttggcgtttgtacccgtctaacctttttggtctgaagtctaaaccgcagagcaccgctccaacaaggcgcccacataaggaaaggaaaacctgcaacaactccatggtctcctcccgtttcgatcaaacaaaagaccagaaaataaaagagaaaaaggtaatagtaagcctccgttcccaaactcccccaaaggcctccaagctcgagctcgaccccgaaccggaaacattcctcgtcggcgaggagcggcgagatcccccgggccccggccatggaggggctcctgtccaagctccggagcctggacgcctaccccaaggtgaacgaggacttctacagccgcacgctctccggcggcatcatcacgctcgcctcctccgtcgtcatgctcctcctcttcgtctccgagctccgtacgcctcctcgctctcccctccctccctccctctcacttccgatctagttccgctgctctcaaccctagcctccggatgggtgcctttggagatccgatggccatggatttgagtatttgaccatgggggatatgctggacgagggtttgcctgattgatttaattcggtgcgctagtgaggtgtgggccgttgt

SEQ ID NO: 24218 - DNA, 67408 bp, Oryza sativa
gcggcatcttttgtggtaattatcttctattccatgtatatcttgtgttcttgagtattaggatgccgtactattaagagggctaccacatgcatataattggtagaacactagtgctcaaaatcctttatttggactgttcctattttattcctgtcggactatccgatcctgataagactatccgatgctcagactatccgaaatttcttagaacttttccctctgtctttggtctgagtgttggctaaaaaatatcggacaatccgatataaggtcggattgtccgatacatcggactgtctgaactttctcagaacttcactctctgtcttgaattgctttttattcctcttgagtgatttttcaaatcagactatccgatgtgatcggagtatcggatgacccagagactctgaaattcaatggaacttgagtctctgtgagaggatgaaattcatgattcaaaaataacggaatatccaatataacatcagactatccgatcgatcggattgtccgaaattctccagaatttcgttctctgtctctggcgtgcttgggggtcaaaaacatcggactatccgatgtcacctcggactttccgaggtgggatgaaaatattttctcccaacggccacattttgggggatctataaataccccccacctaacccttttctagggttacccaactcattcattcacattcactttgggttgagcttggtgctaaggtgctttggatatttgagctctttctccctctctcaaatccctcctcattctttgtgtggtggatcttggtgattgtggatttggtgtttgagggcctactgtgtgtttcactcgatcttgagcactagggtttgaccaagagttgtgtggtgtttgtcactcttggaggttgaggactcctagacggctaggtgttactcccgagccaccgatctacgtgtggttggccgggagatgtttgtgaaggccggatctcgcctccgcaaggaaagagataccccttagtggaaggaggagtgcttagtgcaacctcttgaggaaagggttagcaaagaccccgctcttagtgagctcctcaacggagagtagaatcccctcaaggatttgaactccgggaacaactcggtgaacttcattgttggtgatatctcttcatcccttctttagctttgcttaattgtgccgctatagatctagtcgctgtttgcgctatactcctgtttgtgcactagatctacttgttgtgtttctttagtggatcagacagtctgatccaacatcagactatctgatattttcagatggtctgactgtggatcagactttccgaccctaactcagtgtgagcttccgcataaagttttaaattagcctattcaccccctctaggcctaattgaccctttcaattggtatcagagcctaatctactaattaggcttaaccgcttggagagatcatgtcgggccaaacgggggatggcaaagatggtgataagggatctacgtttccttatgactatccatccacatctacctcttatgtgagtacctatagcggcaaagcttcgtacttcaacggcacggactatgccgcttggaaacataagatgaagatgcatttgaagtttattaacccatctatttggagaatagtcgaaaagggctatgttttgcaaaaacctgaggatcccaccaaggaggatgacgagaacgagcacaagaacgctcaagccgctaatgcaatacttagcgccttgagtggaagtgagttcaaccgcgtggacggtattgagagtgccaaggtgatttgggacacgcttcggaatttgcatgaaggcacggatagtgttcgcgagtccaaggtggagatcctcaaagggcaatttgagaggtttgtgatgttggatggagagagcccaagcgacatgtatgaccgtttgagcaagatcgtcaatgagatcaagggacttggctccaaggacatgaccgatgaggttgtggtcaagaagatggttcgagcaatcactccaaggaactctaccttagtaactatcattcgtgagcgtctggacaacaagactctcacacctcatgatttgctcgggcgcatcctagcccatgacatgcttgtgcaagagtccaaggaggtcatccaatacatcaaccaaagctcaacgacaagcatcaagaaggaagatttggcattgaaggcaaaggaagaagaagaatagagccgcaagagcaagagcaaggaggagatcgatgatgaagaaatggctctcttcgtcaagaagttcggcaagttgatgaggtgaagctgcttcttcaagggaagttcttccaagcaccactccaacaagtcaagtggaagacattctgcaagggtgtgctacgtgtgcaaagagcccgggcaattcattgcggattgcccttacctcaaggatggttcccacatcaaggaagataagaagggcgaaaagaaggatgagaagaaggagaagcacaagcatagcaagcgggaacgttatggccaagctcaccttgggatgattttcggctccgactccgagtcaagctcaagtgatgaaggagttgccacgtttgccgtcaagccttcatcaccaccaagactcttcaactactcaagtgatgaggatgctcccatttgcctcatggcaaaagagcctaaggtaccttcctccctcaagtcaatcaatgttgatcttgtttgtgatgaggaggatgatgttgaggatgaggttatggatgaggaattgttcaagtccataaccaaggagtctctaccacacttgagtgagttgcttgggagaattgatgatcagtatgcaacccttgagaggaggcaagaggcattactcattcgtgagaaagagcggtctcatgaactcaagggtgagcttgctaaggagagagaaaaatgaggctttggtacggctttacaagcaaaccaaagagtctcacgctaatcttgaggtggcaaatgctcaacttcaagagagagtggatggcttggacaaagctgttaacgaccaaatttagtaatatcagcatcggaaaagaggattagatcgaagtggagccgaaggcggagatcgattcgagaatagagcaagaatcggctggagcctagatcggctacgattagaatcggttaagtccgagtaagactgggttaagtgatgcagccgattctgacaatacgacttgtattcgatatcgggtttgagttgacgtacttcaagatgattgccatacatggataaagtcctgggaaggcaattgtatctattaattaggatattttatgtaaatttcttagagataaatatgggcaaaagtctgccacaaagacttatggtatcttagagtttgttagagataatagtcgtgtcctgtatggacatatcttgtaattctcgggtataaatagaccccgagccctatgtaattttaacacacacgttcaatacaatttcggcgcatcgccacccttttgctttagttttatttcgatgatttctggctttcgggttgagctgcatcggtttcgatcttcaacaagaggtaaaacttgttatgtcggcttgtgttctcgggattagtgcttccatctttatgatactctaatcttgtttatgtaatttgctgagttatcatatatcttacataatctctaacgatatcgccatctagcctacaatcggctaacatctgttaatagagggcagccgattaggttaaatatcgatgttggtttagattatataagatacccaccactatatgaaacttccagcgacttgattgtctagatattgttcttcttttcatacgtaatgctgtatcagttgagtttgatctattaagtcgtgcttagaatatcaatatctagcctgccttctggttgccaattagggtagtatcggagtttcagccgatcttatctgatttaattatatttgctttatatgtttcattgacatgttaaatctgccctttatgtcaggatattattgcatctaagtatattaagcttctgtttggtatattctgtttgtttcaacatcttaacatagagttgtatcggagtattagccgatacatgctagatctatccgatcggctatgctataaacatatatagttctgttattaatatatatttcaatctaagtgatttatactgtcttggcatggcgaccgatctatcccaatcactcgatttatgtatatatcgatataaaattatatattgttgatatctacagtcgatcgagtaggtttagttctttattatctatttataaccgccgatagatttacatatgacatcggctcaaagataaatgatatgtcatcggcacttagccgatcgtctatcatttataggtttaaccgcggtttctttgtctctatttcttgttgattgcaggatcaaatcaactggcacgctaacatacccgaaggcgagctttggacctgcactggagttaagcagatctcgcaggcctcgtgttttacgtcaacacgcttttggcatgcccagtgggaccaagaagaagtcagcaagcaattcttcctcatggccgagaaaccaccgctatcgccatcctcggctagtccaagcactgttaaggaaaagatccagaagttgggattgaccgacgtcaatgaaggaaacgtcgtgcccatcgatccagaaaaattcacacctgatcagaagaaagatttcgacgcgatgatgcagcaggcacgggatcaattcttgaactcattcatgcagactagcaagggaacagtggttcagaagtataaagtaaaggtagttgccgatgatcctgggaccagttcttctaaaggtgaagacgggaaacaagctccggacggctcggctcaaccgagtgacaatggtgctacagacggttctctaggaggtcaacgtgacaattctcaaggagtccatggggttcaaggtgatggggtgcatggagttcaaggtgatgttgcttaggggttgcgtggaggaaattttaatcaggatggcaatgcatcataggagtttttcaataacttccaagatcgggttgactatgccgtgcacaatgctttgatcaatcaatctgggatgttagtcaatacattgtcaaatatgatgaagtcaatggtcgatggtacaatagctgaataccaagctgcaggcccagtttatttgcaaggaggagtatttccaaattatcggcctttgatcaccaacagtcatccatccgttcaagcagctccttctattgcaccatcggctcagccgatggcaccagcatcggctcccgcacctactgtaccaccttcggctccaggccaattggtcaatccccgattgctgataagagaacagccacaacacgctggacaaaatgtggatcggctaacacaagaccaggttgcatctatgtttttgcctccccaaaacactgttgatccaacccgcaacagccgattcagcaaacaccccaaatccaacaaattgtgcaaccagtgcagcaaacacccctagctcaatgagttgtacgaccggttcagcaaactccattaaggcaacaggttgtccagccgattcaacagcaaggttcaatgaattcatcggcagggtttgcaacacctggtgggcagcctgtgcaacatgctacaaattaggttgtcccagagcatttagtacatcacgtacaaccagatggcacggtaattccgctagttattcctgaacatttggtgcgtaatattcagccggatcttcaaaattaccagggggcaatttgaattatcaatatcagccaccatcacctcatgttcaataccagcaagcaggatcggctcagccccaatttgttcttcaatacaaccaattcgagccgatgccacaacaacctcaagggacacctcaatagtggccatgggccgatttgattgcagatgtcatgaaggagcagttcaggcttaggccgaaagatgctggaaatctatatcggcagccatatcctaagtggtttgagagagttcctttgcccaaccggttcaaagttccagatttttcaaagttctcatggcaagatagtacatcaacttatgagcacattagccgatttttagctcaatgtggtgaagcatcggctgtggatgctttgaaagttaggttattccggttgtctttagctgggtcaacctttacttggttttcttctttaccatatggatcaattaacagttgggctgatttagaaaagcagtttcatagctatttctatagtgggattcatgagatgaaactgtccgatctgacgtcaatcaagcaaaagcatgatgagccagtacatgagtatatccagagatttagggagatgagaaataagtgttacagcttgagtttaactgacgcccagttagccgatttggcttttcagggtatgattgctccaattagggagaagttatcatctgaagactttgaaagcctgtcacatcttacacagaaggtagccttgcatgaacaaaggtatgcagaggctaggaaaaattctaggaaggttaatcatgtttgcccttataaatatggatcggatgatgaagatgatgattctgagatagctgcagccgagtgggtaaggagtaagaaggttataccatgccaatgggtaaagaactcaggtaaagaggaaaggtatgactttgatatatccaaggctgataagattttcgacttgctactccgagagaaacagattcaacttcctgccggtcacacaattccatcggctgaagaattagggaagaaaagatattgcaagtggcataattctggatctcatacgactaatgattgcaaggtcttcaggcagcagatccaagcggctattgagggaggcaaaatcaagtttgacgactctaagaggctgatgaaggttgatggcaatccttttcctgttaatatggtgcatacagctggccgaacagccgataggggccgtgcaaggggttttcaggtgaattcggctaagattatcaacaaatatcagaggaagtatgacaagcagcaggagaagcatcatgaagaagatgacgatggttttgatcctcattgaggttgtgagttctttagattttgttgaaatgaaggtctaaggctgccgtctattgaagactgtcctgggtgcagtgatattgccaagaattcaagccgatcatatggtaggggcaatcggctaaggcagacaagagttcctgttcatcaaagattgggtccagtgaatcaagatcatggccaagaggacaatgaaatcaggaaaaatcagtggtgtccttctggtattttcacgaagaatcaaaagagaagggttcaaagattgaggaacagggagtgcttttaggaggttgaacaggaaattaaccatcggctgcagaaaacaaagtcgaggcaggagtggcgtgttaagaatcaggttcctgtagccgatgaagctacagctgaggaggcaaaaaggttagctaaggggaaaagtgtcgtaactgcttcggtcaacatggttttcacgttgcctgctgagattgggaccaagcaagccgatgtcgatgaagttgaagaagaatcagccaaattgattttgttgccagagcaggcaatttttgagaagccagaggggacggagaatcggcatcttaagccattgtatataaatggttatgtcaatgggaagccaatgtccaagatgatggtcgacggtggggctgaagttaacttgatgccttatgctacattcagaaagttgggcagaaacgttgaagatctcatcaagacaaacatggtgctcatagactttggcggcaatctatcagaaaccaaaggagtttcgaatgtggaactgacagttggtaacaaaactatccctacaacattctttgtcatcgatgggaatggttcttatagcttgttgcttggaagggattggattcatgctaattgttgcattccttcaaccatgcatcaatgcttgattcagtggcaagacgacaagattgagattgtgccagccgacaggtcagtcaatgttgctagtgctgatttagctctttgggagatggatggtctcgattgtttatctggaaaagtttgggatagagattttctaaaagtgtccgattctaatatacagccaattgaagatggagaacccaagctgttatttcgagggcgttgtggagggttcaaatgtctacatcaaggacacggtagatgatctcgatgacaaacaaggacagggttttatatcggccgatgatttggaagaaattgatataggtccaggtgatcgaccaaggccgacatttatttgtaagaatttatctacagaatttagagccaagttgatagagctgttgaaagaattcagagattgcttcgcttgggagtattatgagatgcctggactcagccgatcgattgtagaacatcggctacctatcaaaccaggggttagaccacaccagcaacctctgagaagatgcaaagccgatatgcttgaacctgtcaaagttgaaattaaacgattatatgatgcttgttttattcgtccttgccgatatgctgaatgggtttctagtatagttcctgttattaagaagaatggtaaggtcagggtgtgcattgatttctgagacttgaataaagctaccccgaaggatgaatacccaatgccagtagccgatcagctggttgatgctgcgtcagggaacaaaattttgagttatatggatggaaacgtaggatataatcaaatctttatggccgaagaagatatacataagacagcttttagatgtcctggtgcaatcggcttatttgaatgggttgtgatgactttcggcttgaagagtgctggagctacatatcaaagagccatgaattacatatatcatgatctaatcggctggttggttgaagtctacattgatgatgtggttgttaagtctaaagaaatagaggaccatatagccgatttgaggaaggttttcgagagaaccagaaaatatggcctgaagatgaatccgacaaaatgtgcttttggtgtatcggttggccagtttttgggatttcttgttcatgagagggggattgaggtgactcaaaggagtgttaatgcaatcaagaagattcagcctccggagaacaagacagaactacaagagatgaacggcaagataaattttgttagaagatttatttcttatctgtctggaaggttagagccttttacaccattgttgagattaaaagctgatcagcagtttacttggggggcagagcaacagaaggctttggatgatattaaagaatatcttagctctcctcctgttttgattcctccacagaaagggatatctttcagattatatctatcggccggtgagaagtcaatcggctcagtcttgattcaggagttggatggaaaagagcgcgttgtattttatctcagtcgtcggctcttggatgttgaaactagatattcccctatggagaagttgtgcttgtgtttgtatttttcatgtacaaggttgagccattatctactatctaacgagtgtactgtcatatgcaaagccgatgttatcaaatacatgttatcggctccgattttaaaaggaagggttggaaagtggatattttccttaactgagtttgatctaaggtatgagtcgccgaaggctattaagggacaagctatagccgattttattgtggaacattgtgatgattcaatcggctcggttgaagttgtgccatggacttcattctttgatggatcggtgtgtactcatgattgtggtataggcttggttataatttcccctcggggggcatgtttcaagtttgcttatactataaaaccttatgcgactaataatcaagctgagtatgaggcagtgctcaaagggttgcaattactcaaggaagttgaagccgatgctattgaaatcatgggggattctttgctggtaatcagtcaattggcaggggaatatgaatgcaagagtgatacattaatggtttataatgagaagtgccaagaactgatgcaggaatttcggctggttactttaaagcatgtgtctcgagaacaaaatattgaagctaatgatttggcccagggggcatcggggtataagccgatgatcaaagatgttaaggctgaaattgcagcaataacagccggtgattggaggtatgatgtgcatcaatatttacataatccatctcaatcagcttctaggaaattgagatataaggcgttgaagtatactctattggatgatgagctttactatcggacgattgatggagtgttacttaagtgtttgagtgccgatcaggctaaagttgcaatcggcgaagttcatgaaggaatttgtggtactcatcaatcggctcataagatgaagtggttacttcggcgtgcaaggtatttttggccgacaatgctggaagattgtttcaaatattataaagggtgtcaagattgtcagaagtttggagcaattcagcgagcgccggcgtcggctatgaatcctattattaagccatggccattcagaggttggggaattgatatgatcggtatgataagtcgaccatcgagtaaaggacataagtttatattggtggcgactgattatttcaccaaattggtagaggcgattcctttgaaaaaagttgattctggggatgcaattcaatttgttcaagaacatataatctatcggtttggtattcctcaaactattacaaccgatcaaggttcaattttcgtgtccgatgagtttgttcagtttgtcgatagcatgggtatcaaattgttgaattcttcaccatattatgcacaagctaatgggcaagccgaggcatctaacaagagcttaatcaaattgattaagagaaaaaattctgattatcctcggcaatggcatactcggttggacgaagcattgtggtcttatcggatggcgtgtcatggatcgatccaagtccctccctataagcttgtttatggacatgaggctattttgccatgggaggttagaatcggctctagaagaacggaattactaaatggcaagtatttgaagaaatattacctaagtgtttgggttaatgcatgatcggctgatgttgccgatacatgatagccgatgaattttcatcgcctagagatggccgatattgttatatcgcccttagttttttttttccaattgtaatcggttatggtttaccgatgtgcaatggccggtattactatatcgccctaagttgcttgtataattttattaatgctgttgacattataaaattagggggggcacatatattcaaaaatcgcatgatgaaagtgaaaatttttgagcaaatttagaagttgtattaatcggcacaaaggtagtgttaaaacagcggggtattaaggcatcttagccgattacaaaaatttctaggtcctattacacaagagttattgagataagtactgctggatagcctaatttgttcaacttcttcaatggcttgggcatcttgagcatcagttccagagatgaccttcagggacttggttaggtcagcaacattcttgatagtcgatttgagccttgccttttgttctttgatagattttgggagatcggctagctttttgtgctccatatccagttcagcattgcattcttcaagctgtgccaagagatcgatcttgtgagcttcgagccgatcaatattggacttaatcggaccctcagatagctgatcgagtttgactttttcttcatgcacaagctgccgattgacctggattgtggcttcaatctccttgcgctcacggcgttcggctagtcttagcttggctttttccagcttgaactgatgttgttcaagataagcggctggagttaggacatcggccaattcttcgggaatcagagcttgaacttcatgcagccgtgtcctaattgatccgcagtcaactaccaagctatctaaagaagaggcttctagctagccgttgagagatatcttcaagtgttatctttacatcgtcagatagaggagctaaagctttgcttgaagtatcttcttctgccttatcaagataatctctgatgtcaaaagagaaaagatcggctaaaacctgcagagacaatttcggaaagagtaagagctgggtaaaatgtagctgatctaattattgagacaaagaaaaacttattgggatagcaggagcagctggttgttcttcctcctcgatgtgatgactctccacagccgatggagtctggtcacttgacggttgctgtacaggaggagaaggaggaggaggaggctgtagaatagacaagtgttatatagagccggttgagattgattaagtaaaagaattaaagacatcttactggtggagccgacttgacaattgttgctgctggttttttcttcacagcagttttcttcttctgcaaccacaaagtctatgagtaattagccgaagagtcgattgtctgtagaacaaaaacaagagattagtcaagtaatgaatcggctaacaattattcaagctaacaatggtgaggtttacctgaggtatgacatcagggaatagatctgtcatatacatcgaagctgattgatgaaacaagtgcaacttccattcaccccaccatctgtcgaaatttttgcttctaaatcctgccaactcaatattatcaatactgcccagaaggggtcctggtaggttaagtagccgatccatcattagagtggatgtgatttctcctcggcactgaatcttgtcggcaaagaataagctgattgggagttggcacaatccaagttgtctggccgagctcattgggtgataaaattcgtaggagacttagatgtttctcccttggtgaatgttgacatgaaggatgcatggactgattgaagctgtaagaacttctctagatttttggaatttttcatgattaatgtcttgaaatctaaagtctgatggaagttcaagatctgctgagtcttcataagaaaaccacacccgtgcatctttcttaaaaccttcgtagaagctgcagaaccagtccttgagtagctcagccgatagcttcgctcgagcatcggtttgtgtggatgtatattctccgtatgatgtgcatatgtgatgagtgcgttcttctccatcgtctcctacaatcggctctggcaatgggaactcagcttctgtcacaggcggctgattgaaaactttcctaaccatcaggttcaaccaggtttgtagcagccaccatggtctacctgcaccaactactgagccaacggctattttggccgatgcgttgttcaatgtttggtataagtaaccgaggaggatcttgcctaatggaaattctttctttgattctaaggcttcggctacaaattgctagttggttgtagggccacaactggatccacagaagaggaacttttctagccacatgagcaagaaagctacatgctctcgaggggtaacagatccttggcccatatatgccgccatatagccagaccagccacctatgcttttggttctgaaatcaaactgatttttggtgttcatgctcatgggattagccgatgaagttacatctaaaccggtgatcatggtaatgtcgatcaaagttggagtcattggcccttggttgaacaagaaggcgttaatggtgttggaccaaaaataagaggcggctgccattaagggctcgtccttagctaagttggctatggttaggtcaagtgcttggccgattccaatctcatcccagtgaactttcttattagccgatacgcgctggtaccatgtgatccaacttttctcaggggtggttttctcaagagatggccaagacttgaaagtgtttttccagtggctcaggttagggttggctagcctaaaggggatcctattggtttcaccaatgataaaatcagtggagtcaagattgccgattggacccagaaaatagtggttttcatgcgacaagctgggaatcgcaattaggttggaaagatgctgcaaatccaaagcaaccggaaagaagaagagcaatgtgaggtaaggaaaatcgatctgctgttgagaaaggggatctagccgatggggacttacctcggcatactcagctgatggcgcagcagacgggctggcggaggacgacatcgttgcgggcggagatctcgccaagggtgaagtcgcctggaaatcgctttgtgcattggaagaatcgccgtagagagagaaggcagagtttcacttgagcggtgaaaacgggagtaatggtgtaagatttctctgcggcatcggtaaattgaaaccatgccattataattttgcaaagtttgagatatgccatcggtatctcaatgacatgtaggacccacatgagtcaatgacatgtgggtcaggatggcatatctcaaattttgcaaaattataatggcatggttccaattttccctagtatttaaagcgcttgaataacagtcggaaaacggtaaagtgcgaaacttgctcggagtcgatgttaagaaaatccgaaacattaccaaatattccggacttggggggcatgtgttaacgaccaaatttggtaatatcagcatcggaaaagaggattagatcgaagtggagccgatggcggagatcgattcgagaacagagcaagaatcggctggagcccagatcggctacgattagtatcggttaagtccaagtcagactgggttaagtgatgcagccgattccgacaatacgacttgtattcgatatcgggtttgagttgacgtacttcaagatgattgccatacatggataaagtcctgggaaggcaattgtatctattaattatgatattttatataaattttttacagataaatatgggcaaaagtctgccgcaaggacttatggtatcttagagtttgttagagataatagtcgtgtccggtatggacatatcttgtaattctcgggtataaatagaccccgagccctatgtaatttttaacacacacgttcaatacaatttcggcgcatcgccaccctttttgctttagttttatttcgatgagttcttgctttcgggttgagctgcatcggtttcgatcttcaacaagaggtaaaacttgttatgtcggcttgtgttctcgggattagtccttccatctttatgatactctaattttgtttatgtaatttgctgagttatcatatatcttacataatctctaacgatatcgccatctagcctacaatcggctaacatctgttaatagagggcagccgattaggttaaatatcgatgttggtttagattatataagatatccaccactctatgaaacttccagcgacttgattgtctagatattgttcttcttttcatacttaatgttgtatcagttgagtttgatttattaagtcatgcttagaatatcaatctctagcctgccttctggttgccgattagggtagtatcggagtttcagctgatcttatctgatttaattatatttgctttatatgtttcattgacatgttaaatctgccctttatgtcaggatattattgcatctaagtatattaagcttatgtttggtatattctgtttgtttcaacatcttaacatagtgttgtattggagtattagccgatacatactagatctatccgatcggctatgctataaacatatatagttctgttattaatatatatttcaatctaagtgatttatactgtctcgacatggcgaccgatctatcccaatcactcaatttaagtatagatataaaattatatattgttgatatctacagccgatcgagtaggtttagtactttattatctatttataaccgccgatcgatttacatatgacatcggctcaaagataaatgatatgtcatcggcacttagccgatcgtctatcatttataggtttaaccgcggtttctttgtctctatttcttgttgattgcaggatcaaatcaactggcacgctaacacacccgaaggcgagctttggacctgcactagagttaagcagatctcccaggcctcatgttttacatcaacaaaagcttatctctctcttgaagagaagttcgaaaccttaaagaatagtgtctctctccctagcgaggcaccttgttccaaaattgttccaagcaatgaaccatgtgctaggtgtaaggatattgatattgatgcttgtgctactaactctacttccttaagtgctttgcaaaagcaaaatgagaagcttatgggactccttcacaatggcttgcttaagtgccatatgggtagtaaggtactaaagaaatacctaggctatcaaagggacaacttcaaccatgaaggccttgggtatgttcctccaccaaaaggaaaggtggacaagagtgtgttgatcaagaagccccaaggtcttagcatctttgttaaggccaaaagtatccttcctaatggtcatgcttcacattgtccttttgatgtatcatatgttcttaggaagaatgctagtggtcgtgtggttgctaaatatgttgggcctaggggcaaaaatgtttccatcaagagagttctttgggttcctaaggcacttgtcactaacataagatgacccaagaaagtgtgggtacctaaaactagaaattgatctcttgtaggaatatctctccggtggaagaagttgggtgattgatagtggatgcacaaatcacatgaccagagaagaatcaatgttttcttcccttgatccaaatggcactttgcaagagaacatactcttcgggtacgatggaaagggaaaagtaatgggattgggtaagattgcaatctccaatgatctttccatttctaacgtcctcttggtaaaatctctaaactataatctcttgtccatttctcaattatgttccatgggctacaattgtctttttaccgatgttgatgtgaccgtatttagaagggatgactcctcggtagtctttaagggtgttcttaaggggatgctttatcttgtggatttttcctcaactaaagccaaacatgagacatgcttagtggctaagtccgacatggggtggctttggcatcggaggctagcccatgttggtatgaggaatcttcacaagcttctaaagcacgatcacatccttggtctaacaaatgtactttttgagaaagatagggtgtgtagcgtgtgtcaagccaggaaacaaattggagctcatcgcccggtcaagaacgtaatgactactacaagaccgttggaacttcttcacatggacctcttcgggccaattgcttatctaagcattggaggtaacaaatatggtcttgttattgttgatgacttttcacgcttcacgtgggtgttcttgcatgacaagagtgagacacaagccatcttcaagaagtttgcaagaagagcccaaaacgagttcgacctcaagattaagaacatttgaagcgacaatggcaaggagttcaagaacacgtgcatcgagagtttccttgatgaagaaggcatcaagcatgagttctcggctccatactcacctcaacaaaatggagtagccgagaggaagaatcggactctcatcgacatggcgaggacaatgttggacgaatacaagacatcgcaccgcttttgggccgaagccatcaacaccgcatgtcacgtcatcaaccgcctctgtcttcaccgtcttcttaagaagagtccctatgagcttcttaccggtaacaaaccaaatgtctcttactttcgtgttttcggtagtaagtgctacattcttaataagaaggctagatcctcaaagtttgctcctaaagtggatgaagggttcttgcttgggtatgggttaaatgagtgtgcataccacgttttcaacaaaacctccggtattgttgagatcacgcgtgatgtgacatttgacgaaactaacggctctcaagtagatcaagttgactcgcatgtgttaggtgaagaggaggtccctagcgaagcaatcaagaggttggctcttggagacgtacgtcctagggagccacaacaaggggcctcttcctcaacacaagtggagccacctacatcgacccaagccgacgatccctctacttcaagcttggatcaaggtgaagaaggcgagcaagtgccaccctctccgataaatctagctcacccaagaatctaccaaagtatccaacgagatcaccccaccgacaatatcttaggagacatcaataagggagtatccactcgctctcgtattgcaaatttttgtgagcattactcgcttgtgtcttctcttgagcctctaagggtggaagaagctctaaatgatccagattgggtgatggtgatgcaagaggagttgaacaatttcacccggaatgaagtgtggactttggtggagcgaccttggcaaaatgtgattggcacgaagtggatcttccgcaacaagcaagacgaggccggggtcatgataaggaacaaggcgaggttagtggcgcaagggttcacccaaattgaaggattagatttcggtgaaacttttgagccagtagctagacttgagtcaattcgcatattgcttgcttttgctactagcctcaattttaagttatatcaaatggatgtcaaaagcgccttcctcaacaggcctatcaacgagttggtatacgtggagcaaccaccaagcttcgaggatacaaaatatcccaaccacatgtacaagctccacaaggcactctgcgggttaagcaagcccctagagcttggtatgagtgttttcgcaattttcttatgaaaaacggctttgagatcgggaaagccgattcaactctttttactaaaagacatgataatgatatttttatgtgccaaatatatgtcgatgacattatatttggttctactaacaagtcttttagtgaagagtttagtaggatgatgaccaagcgttttgagatgtcgatgatgagtgaattgaagttcttccttggccttcaaatcaagcaactcaaggtaggaagtttcatttgccaaacaaagtatttgaaggacatgctcaagaagtttggaatggagaatgcgaagccaatccacactcccatgccatcaaatggccattaaaagacgtcgaccaaaaggtataccgttccattattggatcactcctttacctttgtgcatctaggcccgatattatgattagtgtgcatgtgtgcaagatttcaagccgctctgaaggagtgtcaccttgtggccatgaagagaattcttagatatttagtgcacactcctaatctaggtctttggtatcctaagggagcgaggtttgatctcattggctatgccgatgcggattatgtcgggtgcaaagtggataggaaaagcacatcaggtacttgccaatttttgggtaggtcccttgtttcttggtcttccaagaagcaaaactccgtcaccctatccaccgccgaagcggaatacgtttcggctaggagttgttgtgctcaacttctttggatgaagcaaaccttgagagactatggcctaaatgtgtccaaaatcccactcatatgtgacaatgagagcgccattaagatagccaataaccacgtccaacattcccgaaccaaacatatagatattcgccaccatttcttgagagaccattccacaagaggcgacatagacatccaacatgtgagaaccgacaaacaattggcggatatcttcaccaagcctctagatgaagctaggttttgtgagttgagaaatgaactaaatatcttggattctcggaatgtggcttgatcttttgcatacatttattttcatttactagaataagtttgcatgccacatcatgacaaagtgcacattcaattcatgaatggacactagtcataatctatgtggatagcttgaatctatgtgtacgggggtctcattctctaatgaatcttggtccttgcacaatttgctatagattcgtacattccctctctcgagggtgctaagttatttctcttgtgctgcttttgcccaagtaatagtctagccatcaagttcattctctttgtgccatcctttattgtctctgccaaaggatgtcggactgtctgacatgatgtcagacaatccgaccacatcggatagtctgatttcaaatcagactatccgacgtggggccgagggcaaggggacttaacctccccaggggtaattttttttaccccttcacccatttggagcagtcgttttctctctccactcaaaactctagttcttggccaccaaaaatcttcgtttcgaagtctccgactgctattccttcgctttggggtggtttccctccctcaactccttccaaatcactggttccctagtgattttcttggtggttcttgaggtatttccttgtttttcttcgatctccgtcatggtgcattatttctatattcccttcggtgaaccatcttgttttagtgcctagacctagttcctagaagatcatttgattccatcggatatttttgtgtgaatcgagatttgttggtctagggcaaatggctgtcggaatgtctgatatgccatcagatagtccaacggcaaatcagactatccgacctccttttggcctagatcaaagttcttttgattcatgcctaaatattctccttccaagttattcttaatcattatcctctgttctaaatcagtgtatcctcatgatcaagggtcagttcaagaatcaagtttactctcgccgtgttccaatgagttctcgaggtcgttctcccacttccaaagctcgccatgctatacgtcgaatgtccgaatcccgcaaagatgctattgacacgcaagctcaagcctctgaagatatagcagctcaagtggcaaatgtggagcgaggtgctcctcttcccccctcgccgcagccgagtcagtggagaaggctcaagtgctccaactagcaaagtgaggcgaggcaaccccacggcttcttctgatctggggcaagatagtggttctcatgctccatcctttgaggaagagattcagttagaagaggacattgccgctcagcaagccgctcatgaagaagggcctttctttgtcactgctccctctagagatcctaattatcatcggagagtcacaaggtggaaccgcaagtggactgaagtggagaaagagcgtaagaaagatccctacaaatatcaacagttgtccactgatcctcggttttggaacctttttcagcaggactactatgagacagtgattgcacctaagaagggggcgattctcatgcagtgggttgattggaagtatatggaggagttgcatgatccaattattaatgaagtcattgaagcttgtgctcggcaaaacttgaaggaactaatgggcttgcaatacccatggtgcaaagagatcatcgcacaattctatgctaccgtttactttgagccaaacaaagaaaagattatccattggatgacagatggcatcatatactcagtgacatatgccaagtttgctgccattttggggtttccggctcgctctcgcaccaatcgtgtcaagattcatgatgagaagcccatggacacaaattctcttcacttcttgtaccaagatgtggactatgagttaggcaccatcaaaggtctccttcctttctatgcctatctcaacaagctcttgcgcaaaactcttaatcctaaggaaggtgatgctagcaatgtccttgcctatacaagaaatttgctccacaagatgaaggcacacccacagctctttgatgcttttgacttcatctttgaaaaaatctggcttatctccatgatacctaagcgaggacatggctatgggccttacattatgaagatgattgagattgtgtccaagaagaagtttcacaaggaagtggctcacaccggttaccaagttcgtcccatcaaggctgtttccgtgccggctggtcgaaccactcgtgcttcttctcgtgctggtccctccgctactgtcacctcgtcggactccaactcttctttgcggttcttcaagtccatctttaacatgtgcaaaaccatctcagttcatcaagccaaggaacgcagagcaaggaagaaggacactcggcggatcaagaacctccttcacaacgcccatttgctgttgacggagcgtggggctcctcaccgggagaccgcgcaggcccccctttgccggttcggccgggggcgctaagtgaggttcttcgccctcgatctgaggaacgtcagcgagagaggaattgcacaagacacgggcgacgtagacaggttcgggccgctgagaagcgtaacaccctactcctgtgttctggtggatctgtgcgtgaaggaatacagagagccggagagcgagagagagttcaggctctagaacccattcgccagagtcccaacccctttctcttttctctcctccttttttttccctctaggcctgggcctcctttttatctggtccggggtcaccacacgggcctcctgctgcctaagaaaagaaacatgctttttacaatgagggctagtctacatccggaagtgacctctgacaagcagagcacacgcctcctgccccgctcgcccgcttttccggtggacgcccatttcaaccttcatttaatggccagcgacttccttgccatacttgcgctgaagcctggaatggatctgaccgggactgacataccaactccaggagttagcacgccggctccggctagggaagagagccaggaagctctcatcattccgacgggacggggcgaggtgtgtgacaggccgcctgttgccacctaacccgcgatctgaccggtctgtgaccggtcacacaccgtgaccggtcacggaccggataagcgtgcactgcgccgcattaaatgcggcgtggcgcgctcgtccaacctgctataaatgcggttaggtgagcccggtgggcccacctaacccacacacgtggcgccaaaaccacagggggtcggggcgccccagccctcggggccgaaacgggagtggcccgacccctcggggagacagagggaggggtggccacgtcaccctcgggcccgacccccccgagggggtcaggccacgtgggtgaccgcggctacccaagcctctagtcacgatacccccggccccatgtcaccgacagctgtgttctcccgatgggtttgaggttgaggacagtggggaggatgtatttgaggacccctttgcagctgaggcaagctcctctcgtgcagatcgtggcaaggctcctatggaagaagaagaagaagaagaggaggaagatgacaatgatgaggagtcaagtgaggaggacaaggattttgatgaggatgagtgatccactctcttttcccttttagtgccttgatgccaaagggggagaaccaacctacctatcaaaacttttaaaaaaaatctatctcgttttcgtggtggctagttgaacattgggcttttgtgtcatgtttaaagtctttattatgcatgtttatgtcttgttgaacctcgcagacttggatgatgttatgtgcatgttatatgaaattatctcttatccatgcttaaatgagtgatgtatcttgtcatatgcatatgcatgaggttatattgtgatttctaatcttttgcatagattaagggggagctctcatattcttttctagcttatctttagggggagctccacctaaatcctaatcttttattatttctaattgtgttgtcatcaatcaccaaaaagggggagattgaaagtgcatctaggacccctcatttattttggtgtttatgacaacacaattagaggttcactaatgctctttgttgagatggatgcaaggataaaaaggagtggaacttgaatttacaagctttgcggcatattttctggtaattgtcttctattccatgtatatcttgtgttttgtattaggatgccgtactattaagagggataccacatgcatataattggtagaacactagttctcaaaatcctttatttggactgttcctattttattcctgtcagactatccgatcctgatcagactatccgatgctcagactatccgaaatttcttagaactttgccctctatctttggtctgagtgttggctaaaaaatatcggactatccgatataaggtcggattgtccgatacatcggactgtctgaactttctcagaacttcactctctgtcttgaattgctttttattcctcttgagtgatttttcaaatcagacaatccaatgtgatcggagtatcggatgacccagagactccgaaattcaatggaacttgagtccctgtgagaggatgaaattcatgattcaaaaataacggaatatccgatatgacatcgaactatccgatctatcggattgtccgaaattctccagaatttcgttctctgtctctggcatgcttgggggtcaaaaacatcggactatccgatgtcacctcggactttccgaggtgggatgaaaatattctctcccaatggccacattttgggggatctataaataccccccacctaacccttttctagggttacccaactcattcattcacattcactttgggttgagcttggtgctaaggtgctttggatatttgagctctttctccctctctcaaatccctcctcgttctttgtgtggtggatcttggtggttgtggatttggtgtttgagggcctactgtctgtttcactcgatcttgagcactagggtttgaccaagagttgtgtggtgtttgttactcttggaggttgaggactcctagacggctaggtgttactcccgagccaccgatctacgtgtggttggccgggagaagtttgtgaaggccggatctcgcctccgcaaggaaagagataccccttagtggaaggaggagtgcttagtgcaacctcttgaggaaagggttagcaaagaccccgctcttagtgagctcctcaacggagagtagaatcccctcaaggatttgaactccgggaacaactcggtgaacttcattgttggtgatatctcttcatcccttctttagctttgcttaattgtgccgctatagatctagtcagtgtttgcgctatactcctgtttgtgcactagatctacttgtgtttctttagtggatcagacagtctgatccaacatcagactatctgatattttcggatagtctgactgtggatcaaactttctgaccctaactcagttttagcttccgcataaagttttaaattagcctattcatcacccctctaggcctatttgaccatttcacaccccccccccctctaggctacatctttgcgtgttcaggtgcttggatgtacgcgtgggcctagacaagcaagggaaggtcttcgacacggcctttcctatgttatactagatgatttgggaagagagaaatgcatggtgttcgaggcagttgaataaagagtgaagtagttgatgccctcacaaaagaatggtggacttggaggattggtttgcttgatgcgatgctcacgccacaatagacattgttcccttatcgtaatcacgcatgggtgctgagccgggacgccctagtccgtgcttacttggtaggtgactcaggggcggacgtacccattgagcggcatggggcgatcggcccagctatggcatgcgtcgccccaacccctcatattctccttgggccgcttaccaccacattttattcataattggcccataagtgagaagcccgactgtccaatttaggattttcaggaaattagggagtctatctataggcacacatgtgtgcgactcctcggtaacggcgccatcaacgcttcgtctccaccgtgaccgcgactctgcatgccgcgctcgtctcgctacttgcactcttgtaacatactcaaattctagaccttaaaaatttcatgtcaaaatagttggaagctaacttttccatttttgtggaccaaaattttccattttaaacctagttgaagttgatctaattcttgcatgaataaaaatttgagggcgaattaaaacattttttatttataacctatgacaaaaatgcaacacaagtgaaagcatgcaaacttgcataaaacatgttttgacttgagtccttcatgtgcatttggattttcgatttgtatttcataataggtctcatgaataataactcaaatctagataaacaactaaaccatcagagcctagtgctaactattggaaaataatacataggaaccatagtacaccttaaaatatatcaacaaggccgatgtcaagccccacaaaactaatttggtcatccatctaaagacaagtcatgaacatgaaagtgaataaataaattaactcatatagggtaaattctatcttaatcgtctctataagcattctcttaatttatactaaagtaaacttatacataaataggtaagaagcttatgacatgtgtaaggtaaactgtaattctaacatatcaacatcatctcaggttaagaagagtccaaatataacttttataaacatttacatacatttaggaaagggaaacacatataagagataagtcttgctaattatctaaaataatttgtgcaagataaaatcatgggaaaattcatgtacgctcacttaacatatacaacacacagtaattttgatacaatttaataactaaatttgatacctcaaataaatcaatcaaaccagtcgaataatagactattcctaatcggcaaaaaccatactttatttaaaagtgcatttaactgcatggaagtgtatagagaaaataatttattcaaatactagttcaattatcatgagtaaatataatttttccagaatttatttcctttgtttagctcttctaaaaattctaactagtttccaacgagcccatcgtctgctaatttctgtgagtaatctatccatatatttttagtgcaaccaaagaaaatggaatctaataaatggaatctgaggtatctttatctacctccactaaaatccacatgaattgatctgcgacacaaattaatgaatgaattaacaaagaagggaagagaaatatatcctggaaaatcgtccaaaaatcaagtctacctatgtttctacccttccctttctccctaaccttggtctcatcgttttgggcccactcatcagtggctgtggctcgcttcctctctgtgcaactcctccaaccgaccagcagacaagagagaacgtgagagggagatatcggcgccgacaactctcaggcgcgctcgacgcgtgtacatcgctgtggcaacgccgagtgtggaagcgaggaactcctacagagaggaggttacgtgttgataataatgccacaaaccaggcaacaggatacaagagataaatagcttcagtgagagtttgttgtgtacagctaaatttcagaaattgatcctatcttgtctaactaacacaacaaactctatcctcagccatacgggagcattatcacatgtacatgcaatatatccgaactctaacactccccctcaatcttatcctgtaaggtttagatttttcctaaacatctctaactgtttaacagttagagtcttggtgaatccatctgcaacttgatcatttgtggatatgtattctacctgtaacaacttccgtgcaactcgttctcgaacaaaatgatagtccacttcaatatgctttgtacgagcacgaaacataggattagctgtcatatatgttgcaccaatgttgtcacaccataccttagctgttttaggcgcttgaactcccaactcatgaagtaaggtctatatccacataatcttagcagttgcattagccaatgccttatattctgcttctgtacttgaactagacacagtagcttgcttacgtgcactccatgacacaagattgggtcctataaacacagcaaagcctccagttgatagcctgtcatccaaacatcctgcccaatctgcatcagaaaacgcactaacaagcaaggagttagatttactaatctttaaaccaagcttaactgtatgctttagatatctcagaatcctcttggcaacagcccaatgttctgttgttggagcatgcaaatactgacatactttgttcactgaaaaagatagatccggtctagtcagagtcagatattgcaaagcaccaacaaggtttctataccttgtactatccactggtccaagaggtgtcccttcatgagcacttaacttttatgagatagataaaggagtattaacagctttgcaatcactcatgttaacccgttttaacacatccttagcatatttttcttgtgccaaaactataccatcattttctttcttaacctcaattcctaggaagtaatgtaactcacctagatccttcagtgcaactcttgattaagattcttcaacaaggtgtcagtggcactgttagatgagctagctattataatatcatctatatacaccaacataaacattgtaacatctctcttgctataaaagaacaaagatgtatctgatttagatgacttgaaccctagctcacacaattttgtacttagcctagagtgccatgctctgggagcctgtttcaaaccatacaaggccttatcaagtttgcacacataattaccttgttcataaccaggtagttgcctcatgtaaaattcctcttctaaaattccatgaaagaaagcattctgcacatctagctgacgcagtgtccatcctctagagacagctatagacagtatggtcctgatagtagcagccttgactataggactaaaggtatcttcatagtctataccatatctttgtttgaacccttctgctacaagtctagccttatatctgtctagactgccatcagctttcctcttaattttatatacccacttacaatctatcacatttaaacctctcttgggaggtactagatgccaagttttatttttcataacagcatgatattcactatccattgcctctttccaatgtttatcccctagagcctcatccaaagtttgtggttccccagaagatgtaaagcaactatatctaacagtaccatcagtataaattttatcctttctaatgccactttgtaacctggttttcggtctcattacctcagtagacacaccctgttgtgcggcctccatttgcacagatgatccaggtggatgggactgctgcacgtcctgctctgggcacgtgatgatgctgctgggctagcggggagagttgacggcaggcgacgtgccagcttctgactggcctcccatcggcgaacgcgtcggacgcgcaggagagcgctgctgctagtccccctggattccagatcccgagcctgctgtcccatcatgcgctactgccgagggggattctcccgccgaaaccgccggcgctccgtgcacccggctgtgcgtagcagccacactcgcctgatctttcatttccattgcagttttctgcgctgttcctatcataagattctacagctatacaagcatcatcagtagcatttggtacatgaatattaaacatttgatcatactgttcctctcccccttgatccaatgtgttattcataagattagaaggaagcaaggagatttcagctctaagacgggcaccggcatttggatgaagtgttgcaaagggaaaaacttgttcatcgaacgtgacatcatgagaaacatacaccctgccggaagacacatctaggcacttgaaccccttgtggagattgctaaaaccaggaaacacacattgcttggatcgaaattagagtttatgagagttatagggacggagatttggccaacaagcacaaccaaaggttctgagggatttatagtcaggagcttgcttaaacaatcgctcaagaggagtatcgaaatttataactttactaggaagacgatttatgagatagcaagctgctagaaatgcttcatcccataatttaagtggcatagaagcatgggctaggagagctaaaccaacctctactatgtgacgatgtttacgctcaacagctccattttgttgatgtgtatgaggacaagacacatgatgtgatatgcctatctcattaaagaaggtgtttaacttgacatattcacctccccaatcggtttgcatagcaagaatcctcctatcaaattgtctttcaaaaagtttttgaaacttatgaaattcctggaaaacctcatatttgtgcttaaggaaatagatccaaacaaattcgtcgcaatcatcaataaaactgacataatatatctttgcccctacagaagtagaagcaggtccccatacatcggagtgaataagttccaaaggattatttgaaacactagatgatctaggaaaaggcaactgatgacattttgcctgttgacaggcatcacacacagactcattgactgaattgctaagacatggtaatttattttgactaaggattctaagaacgattggtttggaggagtgaccaagacgaccatgccaccgttcaaacgatggcgcagcagcgaaggcttgtctcaagggtgtgccgacaggaagagggtagagacccagctagcatggtccttcaagaattgtccttctcatggccttgtccttaatcaaaaaatattttccatgaatatcaagaaaagcataattatctgcaacaagtctatgaacaaagactagatttttcgatgcttgtggaacatgaagtatgtttttgagatgtaaaggacaactaggggtaggaacaatggtatgaacaatgtgtttaacattcataccttcgccactgaccgtgtggatcagatctgttcctttgtacttctcccttgtggtcagcttgtccagctgccctgtgatgtgatctgttgccctagtgtcaacataccagtttgtgtcgacaccataggcatatgtggccgcaccacccagcttctcgtcggggccgtagttctcatcgtagcgatgccagcagtcacttgcaacatgacctcttttgtgacagacttggcacaccgggcgagtgtcattgccacgccctcgcccaggattggcaccgcctgtgttcccacggccaccaccacggccgccgtgaggtgcgctgctgcgcccgccacgatttccaccacggccaccacgaccaccgcgatttgcagcgttcgccgacgtggtgaggtaggcttgacgaatccgaatcctgttttcataactcaagagttgagaatacacatgagaaattgaaaggggtgcgattcttgctgttgccatcaatccttcaactgttgcgtcgaagtcggagttgaggccgttgatgatgtacgctatcagctcttcatcgtcaagaggcttccctgcacccgccatctcgtcgccaagagatcgcatcttggcgatgtactcggagatggaaatgggtcccttctgagttgtcgttagtgcaaggagaacgttgatggcaccagctttggacttgcaggtgaacatgtcgttgatcatgctccatgcttgggccgccgtctttgcgccagccacctgctgcaggacctcccgtgacagggaggagaagaggaaccccagcacctgttggtcctgggtgaaccacttgatgtattctggattggagatggtggtcttgactttcttgtcgccatcttctttctcacactcggccgccggagcttcagctgtgccggtgatgtacccttctagctgcgcaccccgtagggtggtaaggatttgtgcagaccagagggagtgattttgcttggtgaatttctccaagatttggatcccgaacaatgggttggagatcaccaccgctgaggaagaactcgccattgcagagatgcagaaacgagctaatctaatctagcggggtgctctgataccatgtggaagcgaggaactcctacagagaggaggttacgtgttgataataatgccacaaaccgggcgacaggatacaagagataaatagcttcggtgagagtttgttgtgtacagctaaattacagagattgatcctatcttgtctaactaacacaacaaactctatcctcagccatacgggagcattatcacatgtacatgcaatatatccgaactctaacaccgagctcactctccatctctcccacagtcgcatcgcctcgcctcatcctccagtcctgtgccgagagaaccgagggagagagctcttgctgctctcctcgccttcgatctcaccaccagccgtgacaaagacgatgctcgtcgtcgccgacgagtcttcgccaaccctatctcttccacgttccatactctcctcaccatgcccaagattctccttttgatttcatcctctttcgtacagcgaatcaacgggaacgccactgtgtcatcgccggccttggggcgtgctctgcgcgacgccgttgtgacctcgtcgctgttcccgtcgttctggaccaaatcaagcagagccatcgcgccatcaactcctccatgagatcctcttaaaaacccctcaagaaccgagaagaatggagcaccatggacggagatcggcctccatcgtcttcaacttcggccactgtcgccatgaccaaattctccttcgctggtgagcccctcatcgattctttgcacatgcaccatctatgggacctaatcaacctcttggacatgcatgcatgtgtttgtatcataatttggcttatagttagttcatttgtgcaggccaaattattttggaatagatggtgaaattatcttatgatttgcttgaaatcaattcagtttacatgtgtagaatttgtgatgcaatagatggttccatgtaaattggagggtggctttatcatttgatcatgtgagggagttaaagttgcttgatgccagtctgaaagcagaagcagagcaggagtcagatgcatgcaaatttgcagatccttgaggagttcgtgttgctgaccgaacaaatttgggtgccgctgcgtcccgcgtgcgatatggagttttggcgtcggttggcaggagatgggatcatgggaaccggtgagttagcgcgttcagcggtaaagataagaatggatttttattagtttatttccttgtttattttgtgtgggaccattatcattttgccggtatatactccctccgtttcgaaatgtttgacaccgttgactttttagcatatgtttgactgttcatcttatttaaaaacttttgtgaaatatgtaaaattatatgcctacataaaaatatatttaacaatgaatcaaatgataggaaaagaattaataattacttaaattttttgaataagacgaacggtcaaacatgtgctaaaaagtcaacggcgccagacatttcgaaacggagggagtatatcggtaacagtagaacgggagaacccccaacaatctatcaatctactatttttctcattctttacttttccgttattttctattttgttttcatagctggattctagcaatcctaggatttggttaacctttgccattttgtgctgaaaaacggtcgtgcttctccacgaaagcgaggaggttattgtcgaaagaaattttcggcaatatgaaaaggggatagcgcacgagacctaaaagtggatggatgcggagacaaggatttagacaggttcaggccctctcaatgagaggtaataccctactcctgtttggggatttaagtccgccgggtgtattatagatctgacgatctagttgtctcatgccgcctagagggcctcctgcccaccttatataggatgggggcaggattacaagatagaaaccttaaccaatacggtatcggtttcctaaatctactttacaatcttatcaaaccaggactttaggccgttccataatatacagggaaacgtaatatccaagttatgatccgttacatatttcatagatataagttatcccctataaccagtcggataaccacgccgtgtgggtatggggtacccataatctccatagtagcccctgaaaccttcgcagtcgaaaagataatcttctctcaaatcagattactccaaagccgagtgcttcaatcatcttcgtcatggtctcccgagtacttttaccaaatctgaagactgtggagggctgaaaaataaagtcaggtgcatcgactagatgcaccaaataggtgtagctcccgactatgtggttaattgaacaaaccaagcatatagttaaggaataaataatccaaccaactgagtggtttttgataattatagtcaaccaagtgacttgataccaatatatagcatatgcggtgtgaatccccgaataatatgatccagatgatataccgactgctttgcagaatatgatgcgtgcaacctaaagttgacaatatctttgaaaattcacatagcataacagctataaagaagagcttgctgttgtgaataaagaaacttccaaattattgggcatacaccacacgcacactgctttaacagatgtgcttaagtccctaaaagacacatggtttcaccacagttatctttgctagtttgcccagaaactaatcgtttgtcgtcacgtaattatgatatttatcatttttctaatttgcttgtaaattagtcgtgtgattccgcggaagtgaattaatctcgaaatcggtttcattagccgatctatcgattttgaggactctattatttacaccgcaaatcgttaggtgatcatatgttgataaaaaaacgtcaacagcatggccactcttcaagtagattgaaccgacgccgttacctcggaggttcttgccgctgccgtcatgtccgtccatcgtcaagatcccgtcgggcctctgtaagccattttcaagcttcggtgagcacccttgagtaccttaagaccacatgcatgcactatctcacatcacattgctctagaactcgacatgcacaagcaacccgagacatgccgctgtttccaccatcgccaccatctattctgtccactatggcttgtaacaagaccaccattggctttgcaaagaactcatctaaattttctatttttaccccaacgtcatccgagccacctatcgccgccggcaagctcgccaagctcacgaccactcctccctgtacatcggcggctggaggttgaagacaaggaccctgtcttgtagtaaactaaaagcttagggtttaaagcgtaaagcactagagacttacatgtggggcctagtactgcgagttcatttatggaaaaactagggacctttctgcaaaacagtaagagactgacagtggacccctggagataaaatcggagaatatacaagagaaatacctagaacttgtaaaatccatataaaatcaaatatagattattttgagatgattcaaatttctgtgaactcactagattatgaaatttaaagttatgaaataaaaactttcactcacagtacaaatttcacctctaaaattcatctaagttaaatcacacataaagcatgcacaaacttataaaaatatatggaaaattgacttcaacctattttgggataaactcaaattccacagaatcacaaacttatgctctcctgtagaataaaataaaaaggtatacttgctttgcatcaaatgcctctaaaactattacctttaaaataactagttttatataagctgaactttagaaattcatataaaattcatcttagatcctttttgagtaaacccaagttctgtagaataaccaaaacatatacttccaagttgtaaaataaaagtatatacttactgtatgataaaagcctctaaatatttatgtaagtaataaccaatatagagcaacctttaatttgtaaaatttgtagaaaattcatctttagtccaaatggagtgaaccaaatttctatagaaccagcaagtaatataatttaacatagtagagtaaaatatggcaccttctgtacaggtttcaactctaaactttaaatttataggataggttctaatcacatagtattgattaagcaatacatatatataaatgcatatagaaacacactctagctataatgaaacccaaataaaacttgttgaaccaatgaaggcatagatccatcccttccaccaaaacttagtacactttaatcatatattaattcctcttgtttataaaaatatgaactaaaataataaaagtcctaaacttgtgaactagggatagattagttaacaaaattatttgcttcattcatcacaattaaagtagaataagttttggacttcaaatatcaaaggcatgtgcatatagaacactatacgcctacaatacgttataacttgtaaaatacataaagaattcatattaactccaaaagttatgaaactaaatgtgttagtcttaaaaatacagatcttcacctcagcaaatataaacttaataagaatcaccttacaacaaattcagaatagtacctaagtaaatcctatattataccgagtaaacttctaaatttcataactcccaaataaaaagagataaaataggaattctttcacctaaattcatcttagaccagtacctatccactgtgcacaaatcatgcattttagagcattttggatttttcgcataattcggtgtttaattacataacgtgtactttgtatagatgattgcttaaacggtgaagaagtgattttggtgctaactttttccaagttacaaggcaagtcccacctccctctctctttgatcactttgaacctatgttttagaggttattgaaaatgtttgcaaatcttgcatgtcgattgtacactaataaattataattttgttaaacttgttagacaaacttctactacttgcattatcaccttaaccccacgtatatccatatccccattcctaaccttaggaataatataattataacactttatatatgagttttgatgtcactaggttactataatgcttagccatgcttagaatgatcttccttgtcattatgggctcattacaaatatgaaaattgattttgaaataatctggacagaattttaatacttgtgattttgataaataaaatgatggaaaacatagattctaggtttgggccttaagtggtgcacatatggtgattagttgtgtaccgatagggggagagtgcgcctaaaccgacctaaggacttcactcaatgtcagttcatttcgtatacagtataaccacatgtgctagtatgggatagcccaagattagtaaattatttatggtttagccttacattctggtaggccggtgtatatgagttcgaataattcaaaggagcttcctatttaccccgatgtggtagtttaggtgactaagcgtgtccaatacaatggtattgtgccacgtggtgggttcccgttgtgtccgccaccacagtgttaagtttaaggcgtgggcccgccacttaacggttctaggttatataacgtgtatggcttaggatggagtaacacatatcgtgctggtgtaaggctaaatcatgaattttggaaaaacgttgatgcgggtaataaatcgggtacttatgtatcgcgtgccatgctcttgcatgattattatttcgcatcatgtgggtaaagtgtacaaactcttcagagttaaaactaatcaattagccgtgctcgcggttatgagcggtgtgtggatatgtattgagtatagacttgtgtttattcttctaaatgctgaattttatcttcaaattatgatgagatttgagaatgatctccttgctgccgtggatggcaatgaggtgtatatttatacatgattaatgtctactttgatgcccatatgctaagtactagcttgctgaaatttatttgaaagcaaatctgatttgaatgtgttttatgcaaataaaacttgctttatgctaaaaaaatccatattatgccttccttgattatatgccttgcaagtagggtgttagttttgtcttggtgcttgccagtacattattctaataatgtactgactcttgctattggattaaccttttgcttgcaggttgtaaacttagtcttttgagtgatgcgggtaatcgattgcttcttctaggacttaaacttaatggggtaaacgtctagtcggtgtgcttggggattgggtagacaagcttccgatgttccctcatacatctatttggccgatcggcctatgtatctctaaagtagttgtaaattttaatcgctttcatctgaaatgtgtttgctatgtatgtccatacttaagatgaaagtgtgaatctagtgcacatcctgagaactaaattcacatgagtatgagttaagaatgtttgagatgatatagatctttagcctttttttgtcaagtctcctaaatgtgtaacacatctggtcgctgccttcgagtagtttgacgggcacatctcaggctgaagttgactggcaggctaaagacccagcaatgcctccaatattcttctctcgagacgtcgaatgtttcattatatttatttgatgatataaattattcacttcatctatataatgggaggtcaagagagcctacgacaactctccgcaccgcacggtgcacgcgacacctagccacggcctgccggcgttgagcgacggctggctcctcgcagccaatagctcgctcctcgccttctctcctcctgcttggtgctaagctgacaatgcgatgctgtcactgtcgcagtccggccgtgctagccccaccaccgtctagtccggccggccggccatccccgtgcggccatgctgccgtgcggccaacagtccgcagcagtgcaacactgcagcagctagcagcctagcgcccgacaggccagccgccagggccaagcgcaagcaacacgtgcagacacgtgcaggacatcgtcatttgtggtggctagctgcctagcggctagcgcctaatcgatttcgtcctgctgctatggtctatggacatagaggaacagggataaggacatggtgtggtcacgcacatacatacatacatacatacatatatatatatatattaaagatatctatcgaccatgttttataaaatttttggtgtatgatgaattatgtatggcgcaaaaaatattactttattttaaaatggttttgtctgtaattatactatatttttatgcgattatagtatagatatggtatttgttgtgcttagttggccttatgaaacaaacattttcgttaaatcttatttttaatccagcttccgccactcactcctcctaatggttctaagcagtgtgacttttagattttcttttcagtaactttcctattgaactttgtaacaacattttatttgatcttactaaatctaggccggcttcttcatgggccggtgtaaatagaatggaattctcttgcatatttacagaatatacaacgagtcaaggaagcccttgtttagtttccaactttttcttcaaactttcaattttttcatcacatcaaaacttttctacacacacaaatttccaacttttccgtcacatcgttccaatttcaaccaaacttttaattttggcgtgaactaaacacacccgaagatagatttagataggttatggctatgtttagatccaagggtgaaaagttttggcgtgtcatatcggatatacggacacacatttgaagtattaaacgtagactaataataaaataaattacagatttcgcctgtaaactgagaaacgaatttattaagcctaattaatctgttattagcaaatatttactgtagcatcacattatcaaatcatggactaattaggtttaaaaaattcgtctcataatttacacgcaatctgtgtaattatttatctatttttttctatatttaatactctatacatgtatctaaatattcgatgtgacatggtgaaaaattttaaagtgaatctaaacatggcctacatacatttggttttgtaatttgtagcgtgtaacttggactgccgttcttctataaaattctttattgctggccagaaccaatagtgcttcctaaaaaaaaaggaacaagtgaaatcttctgtcctctggagcagaaacgtagaggagacgtatctgatggtcaaccctcagcactgtcagcgggcggccgaaatggataaaccagcgccgcaggcgttcgtataccgtatcagcacggcggatgagtgggcgcagcttcagcgcaccggcggcacccttggcggtgacctcgaccgctccaccggctgtatccacctcagcgacctcagtcaggtaattcccaattagaaagcagggacgtctgatttcttccgactcgcgggatccccatggatctctctatttatcatatgcacatttcaagtggagatttgggcctagtcattggttctctgatttttcagtggatctagggtgctagactactttgctgaaaattgctgtttaaaattagggataaagccatccaaatattacaacccaggcttggaggttggacgcaaatcagtaatgctattagaggtgcctctcgcagcatgtgtgatttcatcttttgtttgcctacagagcttcgtgtggagatctcctgcttcttgcgtgtgtccaattggccatcctagatgccatttcctttggaatcttttgattcatttagggcatccacaatgttagaaaaaagcaggtagtaggcaatatactattcctatgacttagtaataagcattgtggaagtgggtagtaactaatgctcggtactaagcttatgacccactcataagaataaaaaaacattaaaatctctctcactctctccttccaacacaagatgtgctactactacatgctgagttggacaaaaagcaactaaaaagcaatatttttttctcatgcgacccactttacaaaggcctactacttagccctgctacttattacttagttaggtaagatacattgctgttgcccttaggatgtttctgagcagtgaccgtaacaaagcagtgaagaataatctatattatctataactagcatggtggcccgtgcagattgcgcgggtagcatcattatattttctctcatataatagcatatatgttttcccattatattattcaaatatattaaaattacaacataatttaaattttgcaataactttacaaaactactaatgtataatattcatattatattttatatacgtgttagttattagttatttttaatatcaaattttagttatttgtaaattatataaattcctctatggactctagactcgtcttttaatattttttaattccgaattttctgtaaattgtatttttatatagactctatgctcttcttccaatattatttatttttatttctgaatttttattatttctaattgtatttctatgtggactctaaactcatctttcaatattctttaatttttaattttgaattttagttacttctaaattgtattcctatattgactttaaactcttcttcccatgttttcttaatttctaattttagttatttgtaaattgtatttttatacggactctaaactctacttttaattttattatgtttattccaaattttagttagttttaaattcctatatggactctatactctacttctaatattccttatttttttaattctgaatttctatttttttcttaattgtatttatatatggactctatactctacttctaatattccttatttttaattccatatttctattatttcctaattgtatttctatatggactctatactctacttctaatattccttatttttaattccaaatttcagttatttcctaattttatttctgtatggactctatactctacttctaatattccttatttttaattccgaatttcagttatttcctaattttatttctgtatggactctatactctacttctaatattccttatttttaattccgaatttcagttatttcctaattgtatttctacatggactctagtctcctcttctaatattccttattttttaattccgaatttcaactatttctaaattgtatttctatatggactttagtctcatgttctaatattccttattttttaattccgaatttcagctatttctacattctatttctatatggactctactttttctttttctccgattaaagtgagaatttctaggccatgagagcgaacgtggatgcttctttttctattcctttaataatataatagataatgtgcggaagtcgttctgtttggctttagaaggacatactatttcccttgattgctttgacagacatgcaaattggtgcccatttgtagtttatgcaaacaggttgtaggtaaatgctagcgaaaagaaaacatggcatctcattatatcaggatgttaaatttcagaaattgtggcctattaagaaagggcctgctattcatattgcgttctttggctgtgttttcatatatgatatatggaaatggttttgcttactcaacaatcccatatacatttctaaactgtgacacctattgtttggtacactcaagttctacaaaacaattttgtgcaaaagtatgttactactattgcatataagtacttcaatttatatacttttcgtgatacactgaataatatatttgtcttgtaatttgatctgggcgttgtttatatatgacctccaaccattcctttttggcactgtatatgtattctttagaactcattctcaacctgttttaggtgaggaaaacgcttaagaactttttcctaggaaggaatgatctatacctactacaagttgacacttccaaggtaacgtgtgtcagtgtatttaaactccattggatgtagtcacataatagatcattttaaattaaactagttgcgcggctagcacccatataaaattatatatttttttaatatgattttacttaaaacttattagataactatcttgttgtcttaagacttaagactttgaaagaccaaactttattatccctgtgtttttaattttatagtttttaaaagtcataccaattgctacaactttcttttgtcatttcttttttttatttgctaactcgatctaccactttttctattcattctccttagaacctttacaaattggatcgtatagtttttagagtttattgtctcgttgggtttcgtttttataatttttagaagtcccatcaaacgctgccattatactcctctacagctcatccactgcttcttctgtttattgtcattgggattttaaaagtcgaatgtaattatcgattgggttcagtttttactttctagaagtcccaccaaaccataagtgactttgccactgtactcctctacggctcacccactgtctcccttctttattgctattgcgattttaaaatcaaacatgattattcttttaccttttagaagtcctgaacctttaaaaattggacctcgtagtttttaaagtttattgtctcgttgggtttcattttttataacttttagaagtcctgtcaaacactgccactatactactctacgactcgtctgccgcttactctttgttgtcattgggattgtaaaatttgaacataactatcattggaattcattttttactttctagaagtcccaccaaccgtcgacggctctgccattgtactcttgtacaacccgcccgccgcctcttctttttattgccattgagattttaaaaattgaatattattatatcattatgcttttttactctctaagaagtcccgccgaccgccttgacctgttacttcacggcctacgcgttatccctcctattaatcgtcattaggattacatttggtgttttattaatagttttttagatgtcacatcaaccgccaccactctaattttgattttttttattttttttattctgaatttttataatctcgtattgggattttatatggtctcttcttttaatattgcttaattttaattccgaattttagttatttttaaattgtatttctactcgaactcttcttttcctttttttttttgctaattttggattttatttttttatttttaattttgattaatctcgtattgggttcttatagggcctcttgtttcaatattgcttatttttaatttcgaatttcagctattttaaaattgtatttctagttggactcttcttttctttttctccgattaatgtggaaatttctagcccccacagcgaacgtggtgtcttctttcaaagttgttttaataatataatagatggatacttcagaacgcaccaggtttttttttatctctattcatgaacaaaaactatacatgtattttgccctggtaactaggcaagtagcaagcccatgcctgtttgtatttcagtagaattcatctgttcgttttgccacttcacattcatagcattttctcttcttgtttgttgtagctttcagatggcttagtttatgaggcagctgatgattcaaactattttcctcatttctatggccctggtcggagttttgcacctcttcaactagacgctgttatcaaggaggcagagaaaatagttctggtaaacaatgatttcacctgcagtctacttgatggagcagaccccttatcgtgatgtgtaagggtgacctttcccttgatctttataatgttttgaaaaattcgctacaggacgctcaaaagtttgcagttatttgtaaaaaaagctgcaaaaatgcaaaaatattactgctccatatctaacatctccaggaagttgaacctggtatattccaaggatcatagtaagggcagacatattgtatgcatcatatttataaacatcattgcatattcttcagtagccttaactgtatgccaagagacaatcttattttttgatcaccccaccaaattaatgtgaagaatgatagctgtataatctctaattcctgttaaaaagggtgcaaacttgaagtattgattagttctcaaatggttccaatagtacgtttattgtgagaattttgtatcagcaagttattccatttaaacttccatgagttctcaattatgcacgaggtcttttagggacaaatcactcttttttataggattaaacattgttctttctttcctccaatgttttcttttccatgccaatcgctttttgaaaacttgcacgcgtgtacgcatagctccagtgcggatgtgtttcatcatgtcgctaatgagcatcaatatgttcctaacccgtgaagctgctatatagggttgtgtcttggtaggttgaatacttgaatggtacaggttgtgttctcaattttgccctcgccgcagcccacgtcacgccaccgagtgaacagcagaactgcacgtagcacgcatatactgcagcgcacacacatagtatacttaccgtatacgtatggcacacgtaatgaacttctcattttaaaattggtatcgatcggtcaattatggtcatccagtttattaattgttctggcactaaaaaataagctgattaggttgctcgatcaacccatttgtctatccaagtcagaccatcaaaatacataggctgtgtttagatccaaagatccaaacttcagtcattttctatcacatcaatctgttatacacacataacttttcaatcacatcatctctaattttaactaaaatctaaattttgtgtttaactaaacacagccataattaatttgtatatgtcgttcacctcttgccaaaaaacaaaggcatcctctgaatctcggtttagggatatatcagtggaaaatttcatctgcaaatgtcatttgcaggtacatcaaagtacatcatgctcatgtgaataaaatttgatataggtgaacaaacagtatcacatttaacccggtgatatataccagcttggtgatatattaaatttataaagaattaatttgtgtatgtagtactccctctgtctaatatgatacatctacatcgctaaattagttttattaaatataacattgaatatatttttaataatatgtttattttgtgttaaaaatattattatattttcctatagattaggttaaatttaaaagagttttactagaaaaaataaagtgacatataatataaaacaaaggcaatacttacctagtaaatatttttgtaccaatgacatgttccttttctcataaataattaaaagtgcaacctatttaacgcagagctgaaattttgaatggatttgcatgtatttctagctgtaccgatgtaatatagtattattagggcaagtttggtatagttccaactcctaaatttagctccaggagttgggtctggagtagagttgtggagtagcctaaatccagctccaactctctagcttattttgtgagagatcttcacctagtgcagctcccattttagctgtaactgaaactgtttggctgagcatcagtccaagagagttggagaactggagttggagctgtgccaaacatgcccttagattaacgtttgaatttactttcatatagcatatgagaattaaagctaaaaattagttttacttgaagaccatgataaatttaactatgctttatattatgagatagcagggagtactaaagacaaattatcctgccatttaccataggaaaagtatgaattatccctctgaactattgcgacagtacgaattaccccctgaaccacaaaaccacacatattaaacctcgaactattgataccggacaaattaccccactgactcaatcctgagcggtttttctcctacgtgccatacacatggcgtcgacgtggaaatccaattagcaaaaagaaataaaagaaaaaatagggcccacctgtcattacccctctcccctcttccccttcccccttctctctctcgggcgcgcgtggacgggcagtgggcggcggcagcgacgtgcggacgggcggtcggcgtgtggggggcggcggcagagcacgggaatggcacggtgtgcggcgctgaggagggtgttggaggaggccagctacgtcatcatcatcatccctctctctctctctcctcaggctagcggcgagcccggtggggagggcgagacgagtagcgggcggcgctaaggacattggagatggtaggcgtctctctctccccctcgttctctctctctctatggcgccgtcaggagagccgagcaaggaggaggcggcagatcctgaccggcggcctccaaagaagaggacaggcggatgaggtggacggcatccagctgccgccaggagggggcgaatgaggttggaggatgcaccggcgagggtgcgccctcctcgccgcagcccgccgcctcccgcgccctctccgtgagtccgtgacgccacagccccacagcctcctcgctggcatccgtggcccgcggtgcgcctcccacgctgccgcccatcacccgcccccgcgcaatgccgtgggcgccgaccgtccaccgctgctcgacctgcgctagacgacccgaaccccaacgagaacgtcaccatgaacgccgccgccaccgccacgctcgtcgtcgccgaccacaattcggagccaggagatgacacacagagggagaagccgaggacaaagagagacacggccattttgacttgccaccaccgcccaccacccgcccatgcacgccgccatgcacgttgacctcccgccgccgctcgacatatgccagatggcctagacagaggggggagagagagtccggcggcccgagagagagggggagagagagagagagaccgacggagtggaaggggaaagaggaggtgagagagtatatatgacaggtgggccctaccattaaaaaaagaaaatgctgactggattgtcaagcatacgctacgtaggataagatcgctctagattgagtcgaggggctaatttgtccggtattgaacgatctctggttctcgggtttggggggggtaattcggtcgaccgcgatagttcaggggggtaattcgtacttttttccggtggccctcccttctcctcctcctcctcccgatttggtggcggaggtagcagcaaaggctggcgcagagcacgaggtggtggccggtgactaggaagaagatggaggtggaaaaggaggctcccccctctctcctggtggccctcctctctgttcacctcctcccttctcctcctccagatctggcgacgacggtggcggtggagaaggccggctcggagggcaaggtggaggccgttggctgggtaggaggtggaggtgaaggccgtcgcactcctcccctcaccgagctcttccctggcctcgccatgcgcctcgccgtcagctgccggatccggcaatgacggcttcttaggctcttttttgttatttcacttaatactataggtgttggtcatagggtaagaacctgacacctattgccggtttctaactggcacctatgggggttcatgtatactagcgatcattatcatagaatcattgatgtgtgatttaaattgtatgaaattctgtgagtttgttgcaagcctgaaacagctcaatagactcctgtttctagcgagtagtatattttatcaacgccacacaagttgtagtgcaactagtttcttaactattcagggctacctgtatttagtatcatagcttgacttaattgaacacttagaaataagtataatactgtggttgattagcgcgtacttgagtttacttaacaaaatcttcttttgaccaacaaactacctaccacggaatgtgttgtacactacaaaatcaaattttacaggcgagacactttcaagttgcaggcggatcataactacccaacatgcaaaaatcgcttcccaaacgcagttcaagggttgcatacgaaaatctatttttgaaggcgacctcttaagaggtccaatgcaataatacaccaattatcgcatgtgggcctcttaagggggcctacaaaaatagattttcgcaagcaggcaacgtggagagcaagtgggctatctccacgtgtcctcgcactggccacgcactactcttttttctcccgcaccttttttctcctcatcccccttctcactcaatgtgcctcctttttttctcttctcctcctctccatcgtccgctgcctccccatctgctccacctcccatcactcctctcccactccctctcctcatatcttccccttcgctccccccttctcctctcctacacagcggctgaggtggatgcgacgatcggctcttctagtggcggtcaacaggcgcggcgaatctggcgacgacagtcctcgggaagggtggatttgccgtcggcgaactcgggagtagcagatccaccggccattggtaggcttcggaagggcagatccaccaccagcgggctcgagagcgatggatccaccctcgcgcgtggtggagaggaggcgaaagggcggccctgcaccgggagcagcgaccaagatcaccgtagctacgtgcgggctcgagagtggcggatccaccaccggcgggcttaggaacggtggatccattgccagcaacctcgggagcggcggatacgtcctcgcgtccggtggagaggaggcggaagggcagcgccgcactggaagcggagaccaggaccacagcggctgcgtgtgggctcaggagcggcggatccaccctcacacgtggcggagaggaggtggaagggtggtgtggcaccaggaacggcaaccacgaacttgcgggtacgtgcgggctaaatcgagagcggacaacccaccgtcgacaagcttaggaatggtggattcgctgccggagtgctcgagagtggtggatccgcccttgcacatgtggagaggaggcggaagggtggcgcaacaccaggagtggcgaccacgaccacgacggcgatgtgagtgcttggaagagggcggatccgtcctcgcgtgctgcacggaggaggcggaagggcggcacgacatcgcgagcggcaaccacaaccgcaggcagcgggggcaagggctgtagcgcggcacacaacggcggcgaccaagggtttgggttttggattttttttttctttttttattttttaaatcattgcaatcaagcatccttatttgcccgcatgcaaaaatcgggtctttgcaagcggctttcttaggtcatctgtccgcgaaaatgattttatgcatgcaattgtgttgcccgcatgcaaaatgccgatttttgcagacacctggcgctccaggcgagtgctcactcgcctgtgaaaattagtttttgtcggcatgaaaagatcatttatgtagtatagtggtatattgtgcagacatctaaacaacacattttttttcttctctctttctctcggtcaggaaattatggagaataaaaataaaatggtattacattttaaaagtataatgggatgcataaaacccacgaaacactagactcacacggtcatggcgtaaacatgtacaccaaaatgctgtctaaatatctttgtatttagtataatccctctggtttttgacggataatgtcgttaatttttgaactaccatttgtctcatatttttttgcaaatattaaaagcataagtcatgcttaaattatttaatgattaaaaaaatcagaacaaaataaatggcaataacatattttttttaacaagataaatggttaaatgtatatttaaaagtcgatgttatcgtactctagaacacgtagggaatataatgcatgtgtatgtgatttgttgggttagaacatctatgttcactaagctataactgaagaaaaatatatgaaacttcttgaatgtataccatgtttcacaatgtttatttcagattctgtgaaatttcatgatagttttataggtttgatgatgtatcctggtgttaagaacttaagtgaaacttatttcaagataacctggtgtaaagtgaaagtatatgctaaacctagtgcaaaacgaaacacgatgcggtttatacccgatgtagtacaatttattgagctagtgtcatagtgatcacgccgttgtccaaaacatcacatattctgtgactggagatagaattcgttccaacatgacaagaaaacacgcgggaagtcatgttgtccttaggatcttgtcaagagttttgacttgaaaacagcaaaagtatttagttatccaaaaggtcagccgtgcttattgcaggacattgaattcatcttgttgaatgtgtcgcccatcgcacttggttcatccgtacttggtcctgcgcgttgccaaactcccgtaaaatctcaatcctatgagtcatgaatctcgaatcaaatttgtaccatgccaagttaccaagttgcctcgttgtagcgcgtcgctgtttgaactctttgcaaattactgccgggccaaaggattcaaatttgattcaaatcacatattcatgacgatcgatgatgctcacatttcacgatgttagtgtccaaagaaaattgaaaattgtcaaaattgaaagacaatattctgctctatttatgagcagagctctttcttgtaggagtactagtagtagtagtagtatgtgattacatgggaatctctatgcacaatgtggtcaccttaattacaagtttaaaattgcaaaatccaaattagcctaggaatcagacaaggagtagaagtcgtatctcaagctgcagcttccacccaacactttgcctccctccttggcgcaacccctcgccagcagttgatcaatggcggattccaggcacatcttgcagtcgccgccggagaggtccttggtgcactgtgccatcccgtgcagcctctgcgcaccgccgaccgccacggcctccccggcggcgaacagcagcggcgacaggtaggccgtcctcgtcagccgcttcatcagccgggacacctccctgtcgaggtcggccgacctgtccgcgccccgcaggacgcgggccggcgggacgacggcgcggtgctggcgtgacctcgccgaagaatggctcgccggagtagcggagcatgcaggcgtcgagccagacgacggcgtccttcttggacgggcacacgcgccgcgccagcgcacccgccgcccggatgcactcggcgcacgttgcccttgcgacgtcgccgcggcagagcgccaggccgcgcacgcgctgatcctccccatcgccgccgaccccgaccgtggcgatgtcgaacccgatggccggggccttggcctccaggagcgagacgaggcgccccaggttaccggcgaaggagctgtcggcggcgaagctgtccgtggcggagcacgacgcgacaggctccaccacggtgctcgcgccgccggcggcggcggcggcggttagaagaaggaatgctgccgcctcaagaatcatcatggcgcgctgcgctggtgagtacgtggtgagcacggaaacgatttccgaatgctagctaggttgtagaatgcagtttgagcgattgagggagggaggatcgatgcggcggatgaggtggtgcgggttataaagagcatgagggtggcgagagcggaggaagggaagaagtagaaagggtgggggatatgctatgcggtctgaaaagttggaggtggtagagtagttggggttggaccgtagttggaagatggaaggaggaaggcgcgcagggtgggagggagggagggagagactggacgaggtcgtactcgcggcgcttactactactactcggcagcggcaggccggcagcctggatggacggaggaggagccgcaaatcatgcaggttttcttcttgttgatgttggtagcaagtagtagtagcaaccaacgttgaccctgaccaagccagccaatcacacgcgcgcgcagcggggcaacacggtttgctgtgctttacgcgaacgcgaggaatgttttttgattttgattataaatgttgtgtgttttaggatctgcgtcgtcttaatctgtggattattcctaactcctaacacactcgatcggtctgcctcccgtcgtagaaaaacgactgctaatattataccagtgcattttgatcgctaattatgttttatttaagtagagccaaattggtcaacacaaagtacatacttcagtcagatttgtttagcttcttcattatgcctccgccggccaattacgatgacatgatttagagtttagacggatgattctctcatattatctttcgttttagtttgatgtcagtcgtcagtggtaattaatgtatatgaaattctatcaacacagtaatcagtcattgattctgagattttacttttgagttaaggaaaataggactacatataacttgtaagtcgttgagaacaaacaatgttatgatgattctccccaactataaaataatgaaagtaagtagtggttttcataattcgtagtcactcgtcatttctcctttgtattgattagttgtaatttccttgaagcaaagtccaaaataaatttcattatgttaaacaaggccaattgtgaatggaatatctacatttcaaatggcttatgcttcacattctttggataaaaatctaaaggctctcaccacaaccctcattctctattcgaacttgtcgaatggttgaaacacaattacaatagttgtgggtgtgtagggcaacctggtatgaagatacgtacgtacgaagaacacatcacataaaagatatgagatttatataggtctgggctcatggaaacatacgaaatagccttcctcatatttatgtgttgactagatgttgacatgtacaagagtatatggtggaagcctagcaaactaatacattgagattgtgatctcgatgggttgtggcaagggctcctgatggattagcttttgtgaaaagagcttagccccctccatcacaaaaataacgaatggatgtgacaaatcctagtatatctagatttgttatactagaagtgtcacattcagtcttaggttagttttttatgggatagatagactatgtctctgtattgatcctaacgaaaacttctacttgtcttgtcgtactcaactcggactttggtagttgtgttatgaataaaatttagcagtatgagatatacctagtaagaggttcacaccttaggatacgatttcgtttgggcaggttcccaactcctcttcctcatcttctacgtgcacgcttttcgaattgctaaatggtgcgtttttttaaaaaagtttctatacgaaagttgtttaaaaaatcaaaataatctatttttgaaaaaaaattaacaaatacttaattaatcacgtgctaatagactgctctgttttccgtgcaggggagttgggttcccaaccgcctgacacgaaacagagacactcaaaaatatggtttgcagtatatggtatctgcgaggagagttaacttgtgtgatgcatatcacatatttactttcttgatacaactcatttagataaaaggttcaacaatgaattgttctaagataaaaataaaataaatttataataactgacagtaatatgtgcacaagtaattaaacttagataaaaataaagtaaaaccattggtaacaaaattaatgcttaactaaaataaaattgtatattagatatcattaaaattttagtcctagcaatgtacaactttaaattactgaaacattataccttttcgagcccttggaataccattacaaatatatgactaacttgtgtagtggtttgaaattatatgcatgcaaatcaccggtgctttgcaaacttaactttagtcgaggattacaactcaaaaaatagtaagaaatataatatattgaaaatgtttgtcctaattgaaagtaacgacggacctagtagatctcagccacctaggtcgctgatcttttcttctttctctttcaccatgttaattcaaacaaagctcaaaatagaataggtcgacttatgccaacttgccggaacatttaactatttgccacttttaagatatggcaattaacgatttgccactcgctgtctatgacatgtgggtccactggcaaatcctttagaaccacttgtaagagtagcaaatagttaattattcccaccttgccaaggtttacaacaattaacaggacatctcttagccaataatataatatatttcttttgtttagtgaattacagagaatgaacagacagaagcaagccataacattttgacggcttggacacaataaggtactgtgtaatattgagaatcctccccgtcggtcgctcgggggggagggaggaaaatcgagcactccctccctccacgatgtgcgcgccccctggggcctcacccacgtgccgctgcccccacctgtcatgtgtctccatcacatactccattgaaacaaatcacccatatattttagaaaccctctattaagggaattcattttattttttgttccaccaaaaatgtttcacctagtgtatttataatgtttcattatgtatggatcaaatgttgcagtgaactgaaacattctttcgctacttgtgaacattatttttatataaggtgaaacaatgaccgatttaaacgattgaaacattttcaatctacttaatgaaacaattccgatatacttggtggaacatcgtgcaacattttaaaataattcaataataagctaaaaaaattttcatcggaatatatccatgtgtggtcttgttttgaagatttaattgcaacgaatttaatggtgaaccagatcatgatttggataaataatttaagagaaaaaatagtttaaagtggttttgcacgtatgcgtatatgctgacgtcagcgcccgatttttccacgcctggatcgagcgcccgatcggtagtctcgttcgtgtaatataataaatttctcttgccatattaattgtctaatgtgtatgcctcttattatacgcataaaaaagtataaagatggatattggtatttgagaaaatttatgtttcgttaaagatggatattggtatttgagggaattttgtctaacgaaacatggcctttagggcatccacaatatggatgaaaaatgggttgtaagaccctttactttatcattgtggaggtggataatagaggagatagcaactatgccataaaagacattaaactattacctctctcgccctctctcttttctatccaaccattgctttacatgtgcgccatatcttactcacacattgtgagagatagaaacaactataacctaattttgtaagtcccacatacattgaggatgcccttataatctggtttgtatgccacattttgccatgaattaactaaggcatcatcaatgtttattgcaaaactaggtagtaaggtgggcccatgtcaggtggtaatagtgtgtagagtggatagtacggtgggacccatctaaaaagttatttaaacatgagtcatgccaattgccacaattaaaaaaatagatgggacccaccataaagtatacctggtagtaagcttataccctggtagtagttctttaccacctccacaatgtataatagctggtagtagggatgcattcaatacttattaaccactacttcattacatcgtggatgcccgaataaaaacctgctccttcgccatcattagacccgacgagaagcgggagtcatttggtttgaaaacgaactaggacattgtttatgcttttaacattcattttcagaatctcttgtcacacgccatcttggttcaaagcttaaaaaaatcatttaccaagaagtcactttctttcgagttctatcctttacccgtccgatttagttttgtcctaagttaaatttgtctcattttaattacttttataaaaattataccaatatctacaataaaaagtcaatacaatattaagatatatttcatggtgaatttagttaaactaatttaatgttatgttgatatatttttctataaacccggtcaaaattttagaaatttgctaataacaaaatttaaatgactcataatatgaacggagaaagttggtcgtgaatgctcgcaattgatatttttgtttgtacataatctctcacttaaccaatttatgattcctccttggcagtaaaacctagatcaataaaatttaaatatacgttagggtatgaaaaagaaaagcataaaattattatcgtctatcgatcgaactaaacatatatgatcgttgctacatctcgatcaagaacagagaatatatattaaatttgtttgtattagtaatcctcttgtcctcaaaatcaagaccgatcattttgactttctgtgtatcatcttaatttatcatttgtatgatgaccgtccagctcgtaccacttggacggctgagaataggaaaaaattaaacttgcacctcagagtatcttatgaaatagaattaaagcatcatcaacatactaccaaaattcaatcctctttttttaatctctaatggtatttaaagggggagtagctacatttatgacgccatatttttcaaaaaaaaaaatagtcggtatatatttacattgtaaatttacaaattacatatgtaattttagtgtatttataatgtaagtcctaaatttacatatgtaaatcccaaaaatacatatgtaattttagtgtatttacaatataagtctcaaaattacatatgtaagttcgaaaattacatatgtaagtcctaaaattacatataatgtaattaatatatagtcatcactcatcatgatgtatgtgagaaaataatcttcaatctcacggtaacacagttgggaggcctctgtgcagttgtgtggtatagcgcataggtatgcaaaccgactgtaatcaatggaattttatggcgccagagatttagcaaatccgtttaaaggataaaaatatcctcccttctaacacaattaaactttgaaaggtgggccacataaaaaattaaacgaatcggtcgtctcctcccgtgctcccgtatgcaacgacttcaaactttttaagagatgagatgagatttttttttaagagtttgtttagggctactattcaatacccatttttacttaaaacctcaataatctaggaattaggatcatgggcagtataggcactctgttggccacgctcttgtaaacatgattgcagttttttatttttcacaaaaagatcgcagtgtccttttcttgttagtaatgccaagttttgtttcctaaatgatttggtagctagtaaaaatatttctctgttattattgagttgcgtgtgcgtgcactactgtcgctttattatagggcattattctttttaggtgattagcataggagattagaatatgcctaagtagtaggttgctaccagtccctaaatattaagaaagggaaaagagaaaagaatcgacctcgacatatatattttatgtttgtttcggaaacttccccggataactcccgatcctaatcagcaagggtgacgcccccacctactgctgccggtcgctgcagcaattattctaagaggctgcaacttttttttttaaaacagaggctgcaactggggacgcatacactgtgcagagagatcaacccaatcatctatccaaatgcaggcttctaccactcgcccgttataagatacttcctccataaaagaaaaattaagattagatgcaacgttttatctagatttattatactcagatatgtctgtcggtgacatggggccgggggtatcgtgactagaggcttgggtagccgcggtcacccacgtggcccgaccccctcgggggggtcgggcccgagggtgacgtggccacccctccctctgtctccccgaggggtcaggccgctcccgtttcggccccgagggctggagcgccccgaccccctgtggttttggcgccacgtatgtgggttagatgagcacagcgggctcacctaaccgcatttatagcaggttggacgagcgcgccacgccgcatttaatgcggggcagcgcacgcttatccggtccgtgaccggtcacggtgtgtgaccggtcacagaccggtcagatcgcgggttaggtggcaacaggcggcctgtcacacgcctcgccccgtcccgtcggaatgatgagagctgcgaagggacgacgagtctcttcgctcgtacattcagcggttctgtcaagtccgcaacaccataccgtgcatccccgcacacgcggtgatctacgcgttcaggaggggcgtgcggcacaaccgcatgctcgagaagatcgcctccaaggagccccagaccacagcgcagctttttgagctcgcggaccgtgtggctcgcaaggaggaggcctggtcctggaactcctccggttctggtgtggcagctccggccgcccccgggtccgccgctcggtcagggcggcgggacaggaggaggaagaaggggtcggcccgttccgacgacgagggtcatgtcctcgccgtcgagggcgcttcgcgggccccccgaaaggggaggcctgcgagcgacaaaaagaaggaggccggcgctcccagcagggagcgcccgaccagcaagtggtgtaccgtgcacaacacctccctccacgacctcgcggactgccgcgcggtcaaaagtttggctgagcggacgaggaagtgggaggaggagaagaggcaggagcgccgtgagggcaagaccccggcggctcccgccggcaaccggcgaggtgaggccaagcagaaggccaccgccgaggacatcgatgatggcgacgatgacctggggttccaggagcctgaggccaccgtcgccaccgtcgatgggggagcgtgcgctcacgcttctcgccggagcctcaaggccatgaagcgagagcttctggccgcggcccctacccatgaggcgacgcggcgggcgcggtggtcggaggttgcccctcaccttcgaccaaaccgaccacccgccgtgcgttgcctggggaggacagatcgcgatggtggtttcccccaccgtttgcaatgtgaagttggggcgtgtcctcatagacgggggtgcagccctcaacatcctttccctcgcagcctttgacgccatcaaggtcccggggatggtgctccggccgtcccagccgatcatcggtgtgacgccggggcacacctggccgctgggtcatatcgacctcccggtcaccttcggtggttccgccaacttccgcacggagcgggtggacttcgatgtggcggacctcagtctgccctacaacgcggtcctggggaggcccgcgttggtgaagttcatggcggcggtccactacgcctatctccagatgaagatgccgggccccggtggccccatcaccgtccatggcgacctcaaagtcgcgcttgcttgtatggagcagcgcgcggaccaccttgccgcggcgtccaagcccgcgggtggcgacgagagactcagcacctccatcccggccgccccaaggcagcagatggtcacgtgcgacgaggtcccggtcaaggaggttaccctgggcgacggcccgtccaagaccacacgaatcggtggtcttctggacgacaaataggaagacgcgctcgtctccttcctgcgggcaaacgccgacgtcttcgcctggagaccggcggacatgcccgtggtccccagggaggtgattgagcaccgtctcaccgtgcggccgggcgcaaggccggtccggcagaaagtgcggcggcaggccccggaacgtcaagccttcatccgcgaggaggtggcgcgacttctggaggccggattcatccgtgaggtcatccatccgaagtggctggcgaacccggtcgtcgttcccaaggcgaacggcaagcttcggatgtgcatcgactacaccgaccttaacaaggcatgtcctaaggacccttaccccctgccacgcatagatcagattgtcgactccaccgcggggtgcgaccttttgtgttttctagatgcatactctggttatcatcagattcgcatggctagggaggatgaggaaaaaactgcattcattacccccataggaacttattgttatacgacaatgcctttcgggttaaagaatgcagatcctacttttcaacgtactactcgaatttctttgggtagccagataagacgcaatgttgaggcctatgttgatgacttggttgtgaagacgcgcaaccaagagaccttactctcggatctagcggaaactttcgaaagtctccgctccgcccgcataaagctgaaccccgataagtgcgtgttcggcgtgcctgcgggcaagcttgtcgggttcttggtctctgcccgaggcatcgaggccaacctcgagaagatacgagctatagagcggatgcgcccccccagcaagcttagggatgtgcagtgcgtcaccggctgcatggccgccctaagtcggttcatatcgaggctgggagagaaggcgctacccctatttaagctcctcaaacgctccgggccgtttacctagacggaggaggctgagcgggccttcactcagttgaaggcgtacctcagttctcccccagtcctggtcgccccggagccagatgagccgttgctactctacctggcggcaaccccgcaggtggtcagcgcggcgttggtcgtggagcgcgacgaggacaaccctcactccgcgcatccccaccctgtgtcgactcgacccgggagagagcagggaggagaggcccccgagccgaacggcggcccgaggcccccgacggccggagctggccctccgcctgcttgtccgacggtgccaggtgcccccgacccccaggatggccccggggccattgcgggaaggccgcgcctgtcgccctctaaccccgaggtcgtcggcacagaagccgagtgcgccccgcgtggcctctcggacgaagagcgccctggagatgcggcccctggcgaagaggatcggccccgccgaaaggtgcagcggcccgtctacttcgttagcgaggccctccgggacgccaagacccgataccctcaggcccagaagatgctttacgctattctgatgacttcgaggaagttgcgccattatttccaagcgcatcgggtcacggtggttacgtcttaccccctcggccaaatcttgcataaccgagagggtactggacgggtggtgagatgggcaatcgaactctctgaattcgatttgcgctttgaaccacgccacgcgatcaagagccaggccctcgccgactttgtggcggagtggaccccagctcccgagcccgtctccgcccccgaggccagctcgggcccctcgcagctgcctcacaccgcctactgggtgatgcagttcgacggctccctgtctcttcagggcgccggtgcgggggtcacgttgacctcgccgagcggagacgtcctcagatacctggtccgcctcgactttcgggcgaccaacaatatggcggagtacgagggactccttgcgggactcagagtggcagctggactggggatccgccgcctccgggtgttaggcgactcccagttggtcgttaaccaggtctgtaaggagtaccagtgctctgacccgcagatggacgcttacgtgcgccaggtgcggcgtatggagcgccatttcgacgggatagagcttcggcacgtgcccagaagggataacgcggtcgccgacgaactctcaaggctcgcttcctcgcgagcccagaccccaccgggcgcctttgaagaaaggcttgcccagccgtcggcgcgacccgaccccctatgggagacggacgcgcctgaacggcccccgaggcccgtcggagtccaggcctcgggacccgaggggagcgctcccagctcccctagattgattgcttggatcactgagatccaggcgtacctcgcagataagactctacccgaggaccgcgaagggaatgaacgcgtccggcgcatctccaagcgctacgtgctggtggaaaggaccctctatcggcgcgcggctaacggagtcctcctgaagtgcattcctcgggaacaaggcgtcgagcttctcgccgatgtccatgaaggcgagtgcggagcccactccgcctcacgcaccttggttggcaaggcctttcgccagggtttctattggccgacggctctcaacgatgcggtcgacctggtccggcggtgcagggcgtgccagtttcacgccaggcaaacccatcagccggcccaggccctgcagaccatacctctttcgtggccgtttgctgtctgggggctcgatatcctgggtccgttcaggcgggccccgggcgggttcgagtatctgtatgtcgctgtcgacaagttcactaagtggcccgaggcttatccggtcatcaagatcaataagcactccgcgcttaaattcatcaggggcatcactgctcggtttggggtgcctaaccgtatcattacggataacggcacccagttcactagtgagctcttcggtgactactgcgaagacatgggcatcaagctctgcttcgcctcccccgcccaccccagaagcaatggccaagtggagcgcaccaacgcggaaatcctcaagggcctcaaaaccaagaccttcaacatcctcaagaagcacggcgactcgtggatcgaggagctgccagcggtgctcagggcgaaccgaaccatgccaagccgagcaaccggggaaacgcctttcttcctcgtctacggcgcggaggcggtcctcccatctgagctcaccctgaggtcccctcgggtcaccatgtattgcgaggctgatcaagatcagcttcgccgagacgacctcgactacttggaagagcgaaggcggcgcgcggccctccgagccgcgcgctaccagcagagcctgcggcgctaccatcagcgccacgtccgggcccgatcactctgcgtcgacgacctcgtcctacgccgcgtccaaacgcgttctggactgagcaagctctcaccaatgtgggagggtccgtatcgagtgatcggcgtcccccggccgggctccgttcggctggccacgggcgacggcacagagctgcctaacccgtggaacatcgaacaccttcgtcgcttctacccctagcgggggtcgggtgtcatgtctcgggctcgggccaaccccgcaccccccccccgggcgtgcagggttagccgggggctaccacatgcatatacttaccctttttctcttccgcatttcaataaaagcattttcgatttcctgaggactgtgtctgtgccatcgtttccttttgaagaatcttggcttgaattagcacgctcgtgctcgaccctgccctcggtggcccgggccggctaaaatcgccaaacggggcccagaaccgagccgtgccccggggcgtggtgaactccgggggggaatcggcaaaggcccacaatcgggtcatccataaccctcggtcaccgcgctcccggcctagccagtctcgacacgaggatctccccaggcactagcctcgacccgcgccgtttgaggctgggacctgggcacgagcccttgttcaagccaagacacagaaggaccgcggcacagaccattctcgtctcatacacacaacaaacagaactgacgcagaaatttcctctttacttgattgcagattaaatcagtctatacaagaagggggcccgaaggcctcggaagaagaaggaaaagttattaagattggcgggggcctgggggctcactccgacgcgcccgggtcgtcggcctcgtcgtcactgtcgtccgcaccgtcgtcaccgccctcctcgtcggagtcgagcacgaacgcgagccgaggggccgtaccctcgaagctgtggacgatgtggtcggcggcgtcccggacctgcgcgcgcgcgccgtcctcggttccgggagggaactcttccagcgctgcccacggagagaagtcagggtccctgtcctggtagcttgccagtacgagctccaccgccccccgggcgaggtccctcgaggatgacttgatcgtctcctcgagctcctcggggagccgctcgagggccccggccatctttgagaggcgctgggcgaggcccccctggttggcggcgtacttcgcgtattgcccgccccagaggcccgcctgccgcccggcgcggtctagacgggagacggcgtcccgaagcatgccgggccctacctcgctcgccaagcggagggcctcgacctccccggcggacgagtccagcgcgccctgcagctcggcgatggtgtgttcggcggctgcgaggcgggcggctaggtcgccgtggcccgtggccgccccgccgctgtgcgctctcgcgtccagctccttcgcccgcgcctcgagctcagcggcccgctgatccagtgcggccctctcggcgcgggcgccttccagattgcggcgcgcctgctcctcccgcgctgcctcgcggaggaacaggctgtccgccagccgctgcgccgcggcctcggcctcctcgagagctcgcccccgctcggtgagcgcgtcctcgcggaggcggagtgcggactcctcttcggcgcaggcggcctcgtgcgccgccagtgttgcctcccgggtggcgacggtggcctcgcggtccgccaggtctctctccttcgcgtccagggcgcgggcgcgctcctccagcgccgtggcgcgagcctcaagggcctcttcgcgctgccgggacgccgcctcgttctccgccgcccgccgttcccgggcagcggcggcgtcaaggactccccaggtggcgtcaagcttctcctctagctccaccgcccggctcccgtattggaggcggaggtcgtcccgcgcctcgtcgagcacggcggtggcgatgagggcagtctcccgctcctcctccacctccctggcgatctccgccaggtccttacgacgggcctcgagctgtgaggcgtgccggcggtgtgccttgtggcccgcctccaccatggcctccaccgagcgccgcccctcctcgacgcacgcccacgccgcgttgagctccgcccgctccgcctgtagggcctccatctgggcacttaacccgtccagcaccgtgctgttcgcggcggccaaggcctgcaggaggggctccgcgctcagtggggcagcggaaggcagaggggagagccccctcggtgtgggtgccgcgcggctcggcccgccgatcgacgtgccggactcgggggcgtcccccgaagctggctcgtcccaagcgtcgcccgaggggtcgggcccgagcggcgtgcccgcggcctcgtcgtgggtggcctcggaagtcgtcatcgcctcgggcggagtcgggtcgggggtttggcaggccgcctggcgtgcgcgcgccgcctctgcctcctggacggactccccggcccagcggagtctgacctcctcccgagcggcctcctcagcctggcgaacccggacggcctcctgggcagcctcctcggcttcccggaggcggtccgcggcttctcgccggtcagcttcccgcctccgggcctccgcggtcgccgtctcctcggcctcagaccggccggacttggaatggcggggggcgcgacgggatctcgctaaggcagaagaaaagccagaacacaaaaagaaacgggtgagtgaaaactcgccttgggagatgggagaatgaatacggccgcggtgggcgcggggacgaacctgcggggaggtcggctaaacgaccacctcgggggcgagatgaggttcccccggcatggcacgatccccccatcttgcggagccgtttcttctttcgctccccctcgggctgcggcgtcggcacggcaccctccgggcgcctgctgctggcacgcaccgccccgccccctcggggaggagatgggggaggggtaccctcctgcttcctcttcccc

SEQ ID NO: 24219 - DNA, 1696 bp, Oryza sativa
cgccccgactacctgcatgatgaccaggatcttggcgcgctctggatcgcagcagagggggaggaccccttgggggatgagggatgcctccacggagctgagattcagcacccgttggaccaccatcctgaagtcctcagggtcccagtcccatttgcgcccctggtgggtcctcatgtagtcctcgggcccggtgtactcccaggcgccccgggcgcgccgctggagcggcgcgatccggcgacgaaggtagtcgccgaacaccatggcccccgtgagcccctgggatcgcagacccgccaggcggtcaagaacggcgtcgtagccgtctcccagatctaccgccgcccgccagctggaggcctgcgccgggggctggctcggaagtcggaggcgcgcttcgtcggcgaggggggtgtagaaccaatcgctcttccagtcgtcccactttttgcggaggacgcagggaatgtagcggttcagcacctgcccccgcggctggaagtagcagccaccgactaccgtcggcggcgacaccggctgtacggtgaagaaccaccggaacagccggagagatgggcgcaccccgataaacatctcgcacaggtgcgcgaagatggccaacgtcattatcgcgttgggggtgaggtgcgccatctggagatcatacaactccagaatatccatgaaaaaaatagagaatggccggaccagccccgccattgcgaaagagaggaagaagacggaccgccccgggtagtgtggcgccgggcgtccctcgcccagcgcgaccacctcccggccggtggcagattccggcatgaatcggcgcggcagcccggcctgcctctcgctcacgatgcgggaaggcggcagcacgctaccatcgagcggtgcggagccccgtgccatgacgccggcggaggaggagcttgagagcgagcgagtgcggcaagggtagggcacaggaaacgaagagttagagcacaagtggcgaaggcaaggggaagagtggcgagaggaaagaaacgaatccctttctcggcgtctttacacccttgccaatgctatgcccggctcctcgcttcccgcgcccgctacctcgccccctcgtttctcgcgcccacgcctccactaaccccactcgcccgtttgcggcgcacgcggcagatgtgcggccgtagcggttgagatggggcagatcgtgcgcgcattaactacgcccgccaaccgtgaaaagcgccatcatcatgtctccaggcgaaacgaaccggctcgtcccgattcgcgcgctgctcgagtaatgtagcagtcttaaagaggccgctcattattgtcggtcggttttcccttgccgatgcgcgcgatttgcgaccgctgggtttctgcccgcctatagggaccggccccacctgtcaccgggcctaaggagtggcgtcacgcccgagcgcttccctcgaggggggcgatcgctctggcataacgccgggggctcctgtcggtgacatggggccgttggtatcgtgactagaggcttgggtagccgcggtcacccacgtggctctgaccccctcgggggggtcgggcccgagggtgacgtggccacccctccctctgtctccccgaggggacgggccgctcccgtttcggccccgaggtgggggcgccccgaacccctgtggttttggcgccacgt

SEQ ID NO: 24220 - DNA, 33463 bp, Oryza sativa
catttaatgcggcgcagcgtacgcttatccggtccgtgaccggtcgcggtgtgtgaccggtcacagaccggtcagatcgcaggttaggtggcaataggcggcctgtcacacgcctcgccccgtcccgtcggaatgatgagagcttcctggctctcgtccctagccggagccggtgtgctaactcctggagttagtatgtcagtcccggtcagatccattccaggcttcagcgcaagtatggcaaggaagtcgctggccattaaatgaatgttgaaatgggcgtccaccggaaaagcgggcgagcggggcaggaggcgtgtgctctgcttgtcagaggtcacttccggctgtagactagccctcattgtaaaaagcatgtttcctttcttaggtagctggaggcccttgtggtgacccctgaccagataaaaaggaggcccaggcctagtaaaaaaaaaaggaggagagaaaagagaaaggggttgggactctggcgaatgggttctagagcctgaactctctctcgctctccggctctctgtattccttcacgcacagatccaccagaacacaggagtagggtgttacgcttctcagcggcccgaacctgtctacgtcgcccgtgtcttgtgcacttcctctctcgctgactttcctcagatcgagagcgaagaacctcacttagcgcccccggccgaaccggcaaaggggggcctgcacggtctcccggtgaggagccccacgctccgtcaatgtcatatttaattttagatttatctttttttatggaggaagtagttaaattaaaagattcatttttgtcggtttagttgttaatttttaaattttttaattgcttggattttcaatctaattagctttagaatgattgcaatgattggaattatgaaaattagtatagaaatacttacattatgatataaaacttaaatatcctacaaatctttatatttaggacggaggttgtagcttaacaagtgtaattgcttaacacatttgcgatttgcgaggcaacgtgtgctagctacgtactcacttattacgccgtacctgtttaatttctgcctaattccttctgaaagtcgtcgctactacgttcagccgtagacttggctaatcataattcagacgtgtcaagttgcggcattgtactgttgttatacaaataaagtgcatatttgggggttgattttgcatggggtagatggatagctgctcgtccagatggaattgaaacatgcctctaatcgttgctaacatgcgcaattaattatcaatgcttctggagaccaacgcatactgcgcttaatttgtcgtcctcctcgttttagttaatgtactagagcagaagtttccgcatgtttctgtccaatgaaaatgtttaattttgacaagcttataaacaatatatagtgttcgcacgattcaagagttggcaatttgacatacgtatcagatactccacgagctacctagttctcgaagggaatattacaataatttgcacttggacaatacatgtatggataacaaacatccaccctaattacgaaactcctgagaggatctccagtagcagtaacctctagtttagagctcctaaatgtcaaatgggggctgccccaattcttttggacctaaatatgtcatcaactctagcagtagccctcatatcttagcctctatttcttttcctcttttattttagtatataatttatgtttatatatagtttaacaccataataattcaaacataaataattctagcacatagaatttaaccatattcgaatttacaatttcaaacatcacgattcaaatttgagttcaaatttttctaacatgaaaatgataaatcttacaagcaaatattgaaaataacccatagttgatagaaaatgcaaatgaacaaactaccgagcaccatgaagtgcccacaaatatttcacaagatcatctcgaagttgctcatgtgcttgttggtcttcaatttctttatgtatctttagaaacttctccaacacatgtttatcgcgtcgctggtaatcctccttcctcaacacctcactgtccccctgatcatagtcaaagtctacatcttcatctcgctcattgtcgatgatcatgttgtgcatgattacgcaagctatcattatgtaccatagggtctctgtatcccaaaatctagcaggacctctcaccattgcaaagcgggcttataaaacaccaaatgctctttcaacatccttcctcactccttgaacttttgcgtaatggattctttttgttaccttgtggattagaaatggtcttcacaaaagtagcccaagaaggatatatgccatcagcaagatagtaccctatggtgtatttcttaccattcaccataaactccaactcgggcgctgtccctggagtaagcctttgaaagagcggtgatctctgtaggacattgatatcattaagggaacctggtaatccaaagaaggaatgccaaatccacaaatctttagatgcaacagcttcaagaatcatggttggcccatccacatgccctgagtactgtcctttccagcctgttgggcaattcttccacctccaatgcatacagtcaaacctgtccctatgaattatctcacgacctgggactgaaccacaacactttcttttggttctcttatgctctatgtccgtaagaagagcagctgcaatatagtagttgtcatcatcggacaacacctcttgctcccaccattcagcaaggagatcatcgtcatcgtcggaaaagtccatgtacaaaaatcactgccatcacaacattgcaaaattagagaatataaatgcaactacagaagcatatgcacagcacatagtatatatatgtgcaagattatatatatgcataggacaagcaattattttaggataaacttgatgaagtatatatgtcaatggttcagatcgatccattgcaatactagtgcagtccaacacaatgcagtgctactaatataggtacagtgatacatagggatgaaactggttcggatagtttccgtccgtccggactaattttcggattcggaaaaattcggtcggaactattcggaatctctcggattcggaaacgaattcggatattttttctcggatacgaaaacgaatacagtaagggtgatatccgacggaatcggaaaacggtcggaaactatccgggattttttcccggatatccggagttgtcatcaaccattcagaataatcagcccaaagagcccatcagcccaacccaacccaacatgcaacaggcaacacaaaccctagctagctaagcaacaggcgacactcacacaacagccgccccacgcggccacgcatgacggcggccgccgccaccgcccaccgccgccgcgccccttcgccgctgccgccgccgccatcttgccccttcgccacagccgccgccgccgcctcgccccttcgccgccgccgcctcgtcgtctcgtcccttcgtcggcgtcgtcccatcaccacagccgccgcctcttcgtcggtgtcgtcgcctcggccaacagccgccgcctgttcgtcagcgtcgtcgcgtcaggccgtcagccaacagccacctcttcgtcggcgccgtcggccaagatggtgatggtaatattgagatggactatgttgatgatgatgacgacgacaaagtgccaatgagacaatgagtgtttgaatgaaatgtttgtcaatttaatttgcaggttgcatctaaactatgtctgtaatgaactactacgtccaagttgcatttaaactttctgtaagaactacttaaattttctgtaagaactacgtccatgatggacagtccatcagtccatgttacatctaaattctaaactatgtactgtgacttttatgtgttaatgtgtgtgactatgcaaatgtgtgcaagtttgtggctgttatgtgttaatgcgtgtgactgtcagcatgtacaagtttgtaaccggtaatgtgtgtgacagtgtgactttgtcactatttgcaagtttgtggatgtttctagttatggtattattaatcgttgatctttggaaatgtaacattctctattagaaaaaacaataagttatatttctttgttgatttgtgaaggtcagtttgatgggcttttatgttccgattaatattcgttaccgtattcgtttcgattcgtattcgctccgtatctgtattcgataatattcgattccattttcgtatcccggtttccgtttccgatttcgatttcgagaaaaaaaatatgaaaacgaatatgataaagctagtttccgatcgtatccgatccattttcatccctagtgatacaggtcagaattcaggttctcctctacggtctacaaagtctagcacaattctcaaaacgtattaaaaaaaagtaaagatccaccaggacaaccacagtaccacaagtactccgatcaagaagtgctttcagaaaagatgaactagtattcctaccacaaaactacttctgagttctccagaaaaatcgatcggtgagtgactgggcggtgtgaaggctggctggcgcgtggacgggcgaccagtgtaggggcgagcggcgtgcggatggggaccagtgtgtggaagcgaggaactcctacggtgaggagattacgtgttgataattgccacaaaacgggcgccaggattacaatgaggtatatagcttcggttcagagtttgttgtgagaacctagattacaggtataagttctatctcttctaactaacacaacaaactctatccggcagctatatggagcattatcacatgtacaaagaatatccggactctaacactccccctcaatcttatcctgtaaggtttagattatttctgaacatctctacctgtttgacagtcagagttttggtaaatccatctacaacttgatcattagtagatatatattcaacctgcaacagcttctgcgcaactcgttctcgaacaaagtgatagtctacctcaatatgctttgtacgagcataaaacacagggttagctatcatataagttgcaccaatattgtcacaccataccttagcagttttaggcacctgaatccccagttcatgaagcaaagtttgtatccacataatctcagcagtagcattttccagtgctttatattctgcttctgtactggatctagacacagtagcttgtttacgtgcactccatgatacaagattgggtcctataaacacggcaaaacctccagttgaacgcctgtcatccagacatcctgcccaatctgcatcagaaaaagcactaacaagcaaggaattagatttaccaatcttcaaaccaagcttaactgtatgttttagatatctcagaatcctcttggcagcagcccagtgttctgttgttggagcatgcagatactgacaaactttgtttactgagaaggataaatcaggtctagtcaaagtcaaataatgcagggcaccaacaagacttctgtaccatgtactatcaactggtccaagaggtgttccttcataagcactcaacttttctgagatagacagtggagtattaactgctttacagtcactcatattaactcgttttaacacatccttagcatacttctcttgcgttaaaactataccatcatttaccttcttcacttcaatccctagaaagtaatgcaactcacctagatcctttagtgcaaactcttgattaagactcttaagcagaacatcagtagcattatttgaggagctagctattataatgtcatctacatacactaacataaacattgtaatatctcccttactataaaagaacaaggatgtatctgatttagatgacttgaaccctagctcatgtaactttgtgcttagcctagagtaccatgctctaggagcctgttttaaaccatacaaagccttatcaagtttgcacacctagttaccttgttcatatcctggtggttgcctcatgtatacttcttcctctaggattccatgaagaaaagcattctatacatctagctgacgaagcatccaccctctagaagctgctatagacagtacagttctgatagtagcaaccttgactacaggactaataatctatgccatacctttgtttaaacccctttgctacaagcctgactttatatctgtctagactaccatcagttttcctcttaattttgtaaacccatttatagtctatcacatttaatcctctgctaggaggtactagatgccaagttttatttttcatgagtgcattatattcactattcattgcctctgtccaatttgaaaaattttgctacatgacacttctattgtgtgattttagccctaggacactgctcaaactcacttttgagggaaaacactccataaacatgatattttgccggtggacattgcgccgactaaaataataatttccagttgaggaggagattgaaatcgcgtgaaatgccaaaaatgcccttgggcccacatgccagctcttccatctccgcctgatccccatcgcgacctaccaccctctccgatctctctcgatctcctccggccggccgtcaccgctgtccgttttcgtgccgtcgtcgtcgtcgccgccgccgctgccacattcaccgtcgccatgccgacgcagcgccaccgccgccatcaaagccgtcgcaattgccgctgcaactaagcgccactgccaccactgccatcgccaccgccaccactgccaccgccgcgcgccaggatcttgatctcggggccgtccgccgtcgcctcctcgtcgtcgtcctcacccttcgccacagcctcctggttgtcgtcctcatcctccgccactgccaccccacgcggcgaaggcgtagacaccacacgccgcatttgccgcagccgccatcgccgcgtgtcgtcgtggtcgtcgtcggcgtcgccgcccccacaaccgggacagtcgcagccaccgctgccaccgccacttccgccattgacgccgccgcacaactcccagtgctccggcgctacactccaccactgccggcggcggacaactcccaacgctcccgatgctccactctacggacgatggcgctcccggtggaagagagatggaagatatggcatgtgggcccaaggacattatagaactttcacgcgatttctctctcctcttcaaccggaaattattattttaatcagcgtggtgcccactagcaaattactacgtttatggagtgttttcccccaaaagtgagtttgggcagtgtcctagggataaaaccacacaatagcaatgtcctgtagcaaaatttgccttccaatttttatctcctaaggcctcatccaaagtttgtggctctccagaatatgtgaaacacagctgtatctaacaggttcatcagtgtaaactttttcctttctaatgccactttgtagcctagtttttggtctcattacctcagtagacacaccgtgctgtgctggctccatttgtgtagatgatcctgacggatgtgactgctgcacacctggcgccgaggaagtgctggtactgctgtgctgtcggggagagctggcgacaggagatgacgcgccggctcccgattggtccctcgccggcgagcgcggcagccgtgcaggggagcctgcctgctccccctgagttccagatcccgagaccgccgtcgtctcgtcatgcactgctgccgaggaggattctcccgccaaatttccggtgctccgtgcacccggctgtgtgtaccagcacagctctctgattcaccattttcgttgctgatttgaccactgtcctcagcactgcacctgtcatttatccctgcgtctgtacaggcatcattagtagcatttggtatgtgaatattaaacatttgatcattttgttcctctcccccttgatccaatgtgctagtgttcataagatttgaaggaagcaaagatatttctgctctaagacgggcaccggcatttggatgaagggttgcaaagggaaaaacttgttcatcaaatgtaacatcacgagaaacatacaccttgccggtagacacatctaagcatttgaatcctttgtgaagattgctaaaaccaagaaagacacactgtttggatcaaaattggagcttatgagagttatagggacggagatttggccaacacgcataaccaaaggttctgagagatttataatcaggagcctatttaaacaaacgctcaagaggagtatcaaaatttataactctacttgggaggcgatttatgaggtagcaagctgctaaaaatgcctcatcccagaacttgagtggcatagaagcatgggctagaagagttagaccgacctcaactatgtggcgatgcttgtgctcaacagctccattttgttggtgtgtatgaggacaagacacatggtgggatatgcctatcccattaaaaaaggtattcaacttgacatattcacctccccaatcggtttgcatggcaaggatttttcgatctaattgtctttcaacaagtttttgaaactcatgaaatttctagaaaacctcagatttatgtttgaggaaataaatccaaacaaatttactgtaataatcaataaagctaacataatatttctttacccctacagaagtagaagaaggtccccaaacattagaatgaataagttccaagggattattcgacacactagatgatctaggaaaaggtaattgatgacattttgcttgttgacaagtatcacacacagactcattaactgaattactaagacatggcaacttattttgactaaggactcgaagaacaaccggcttggagggatgaccaagatgaccatgccaccgttcaaacgatggcgcaacagcaaaggcttgtctcaagggggtgccgacaggaagagggtagagacccccgccgacatggtccttcaagaattgtcctcctcgtggccttgtccttaatcaaaaaatattttccatgaatctcaagaaaggcataattatctgcaatgagtctatgaacagagactaaattctttgatgcttgtggaacatgaagtatatttttaagatgtaagggacgactaggggtaggaacaatggtatgaccaatatgtttaatattcataccttcgccactagcagtgtggatctgatctgttcccttgtacttctcccttgtagtcagcttatctagctgccctgtgatgtgatctgttgccccggtgtccacataccaattggtgtcaacaccataggcatatgtggccgcgtcgcctagcttctcgtcggggacgtagttctcatcatagcggtgccagcagtcacttgcaatgtgacctcgtttatggcaggcttgacacaccgggtgggtgtcgttaccgcgccctcgcccagtgttggccccgcctgcgccaccacggccgccactgcgaccgccgcgaggagcaccgcccgcgatttccaccgcgaccaccacgaccgccacgatttgcagtgtttgccgaagtagggaggtaggtttggcgaatactgatcctgttttcatagctcaaaagttgggaatacacatgagagattaagagaggagcaattcttgtcgttgccatcaatccttcaaccgctgcgtcgaagtcggagtcgaggccgttgatgatgtacgctatcagctcttcatcgtcaaggagcttccctgccgccgccatctcatcgccaagggatcgcatcttggcaatgtactcacttatggacatgggtcccttctgagtagtcgtcaaggcgaggaggacgttgatggcgcccgccttggatttgcaggagaatatgtcgttgatcatgttccatgcttgggctgtcgtctgcgcgccagccacctgctgcaggatctcccgtgatagggaggagaagaggaaccccaggacttgttgatcctgactgaatcacttgatgtattccgggttggagatggtggtcttgactttcttgtcgccatcttccttctcgcactcggccgccggagcttcaactgtgccggtgacatgcccttccagctgcgcaccccatagggtggtaaggatttgcgcagaccagagggggtgatttttcttggtgagtttatccgagatttgaatcccgaacagaggattggagatcgccgctgctgaggaagagctcgccatttgcagaaacacaaagacgaactaatctaatctagcaacaggctctgataccatgtggaagcgaggaactcctacggtgaggagattacgtgttgatgattgccacaaaatgggtgccaggattacaatgaggtatatagcttcggttcagagtttgttgtgagaacctagattacatggataagttctatcgcttctaactaacacaacaaactctgtccgacagctatatggagcattatcacatgtacaaagaatatccggactctaacacagtgtgcaggcaagcagcgtgtggccaggcggacgatggccgagcgtttgaacggctggcatgcaggcggaggccaggcgtgcaagcggaggtcggaggccctgtggacgacgacgacaacaaaggtaggaaaaaatcctcaccttttttggggcgatcttggcggaggtgggtgggggagtcgatggcggccgtcggaggagatctggtcgtagtgccgcgcgggcgaggcgagatcgcgcgaagcggattttttttcacgccaggaaaaaaagtcgatgggggccgtactcggaacccccaggactgggggcttgggaggagaatctagggtcctcctcactttgggggctctagtagggtccctgctgaatctagtttttatctctaaaccctcaaaaactgattaggggctgagtttagggtctctgctggagttgctctaatggggattgatcgccaggggcgatcgggtctcccccctctcctccacgtggtttcctttttaggcaccgctttactttcctattttagtaaatttatacacctaaagtttgtacacctcaagtttacacatctaaagtttacagacccaaagtttataaatcaaaaattatatatcccattcaaatttgaatttgaattcaaatattttttgtatatagtatttctatacatctaaagtttatacacctaaagtttatagacccaaagtttataagtcaaaagtttaattaccctcttcaaatttaaatttgaattcaaatattttttatatatagtatttctatacataaatttttccaactttgttttttatttttttttaaatttgtagtgtagtaggaagagaagaaggggaggaggaagggaggagaggtgtgtacagggggggcatggggatcgatctctccaagcgatcgatcgcccattagccacaccccctaattatccatttagttgaattatccatacccaaatatacaaaggtaaaaattactggatgtccattacacctaccaaatcatgatgtggaaaggacgggcatgcacagtactatccatttacatcacccaagcccattaaggctccgtttggcacagctccaattcccaactccaacttacttcgagctggagctgtgccaaatagtaccgattctcctttttttttggagcgaagttagtagagttgctacagaaatttgtactatgggggtggagctagttttttgctgctccataactccacaccaaaagacccattaccctttaatttttttactatatttacacaaaaatgccattgaactaccccttcctacctctctcctcccgttctctctcctctccatcatcttccccatccttctccgatggccacaactggttgtggcggcggcggcggcgtctacgttggcagcatgcgggggtggcgagcgcgggccacggcgtgttggcgtcggctcgcgggcggcggccgcggctcgcaggcggcagcgtcgacaggtggcggcctaggtggcggcgtgcgcgaggcagccggggaggcggcggcgtcgacagtcggtggccaggggcggtggcggagatgcgtgggccaaccggcggcggtggctcgcgggctgaccggtgccagcggctcgcgggctgcccggcggcggcaacgccagggtaacgcctacaaggtgttggacgaaatggcgatgagggatgtggtaacgtggagctgagtaatctagccaaacacttttttacctacctcagctcctaaaggagccagctctcactggagttgaagtttagagttgtgagtttgaattaggagctctactaaatggggcctaaatatgaaccaagagtttgtatttaaattttcttaatttgcttttgcactataaagaggccttgaaatagtccaaactttttggacatgatttacatcctattatctcgcttacacttacgcttttaagccaaaatttgatactttttaaatttaattttgggattggttttgtggttttttcatcatagtttattttatagccataatataaatttaaaattttcatttttgaagttgattttatgtttttttatcatagtttgttctttaaattttgaagttgattttgtgatttttttttcgtcgtgattatttcatagcatttgcttgataagggttcaacaggttataccctatatggtattcataaagtatggggatcgttggaaccaggatgtacgcgagatcggatatacaaacatgggataaggattgatactagttcgagcccttaggatgagtaataagcctactcaagtttatatggatatatggatgggaataccacaaagattacaatgggaaataggacaactagactgatccactgaccagaagctgtcgagaacgacctgacgaaatctactcagcgaatatggctctggcttcctccggattgcttcttgatgtggctttggctatggcttgtaactcaattcccctccctggacaagggggccttgtatttatagcgtagattattctattctccaaatataattcgaagagataaaacaggatatgggcctaagaagaccttatcttccccaactaagactcggacaccttatattccaggaagataatttcattctttatcaatcgtatttccttaattaaaggatacattctcatatactatcgagtatatggtattgccgtattacacaaacccatgtataggaggtatgtcttatccttgacactgacagtaacgccctgacactgacagtaacacccgactctaatgcaaatgagtaggttaatgttccagagcaaagatcctgaagaaaatcattgtcgaactcacctaaccattctcgaacagctgagtaagtttagagtacatgacatggtccttctattctctttgtccgagacttcaactcaaatttgaatttggattgaagtcagaaactttaaactgctataaacaaatccacaaaaactccgacggtgatttctccgtcttcctccaaattcgaaccgtcggacgtgggttataaattccacttatgagatccatttgggttacgttttcctaaacaaacattttgcttccccttcgcgcaccttcccactgctccaacaagcaaaaaaaaaaccctaagccacaaacttccctcatctcctcagcgactctccatggatcttccggagtccttccgagtttctttcacttcttcttgatttctatgatatgcaccttctccatctgaatcctaactcccttgattccttagtatcttcactcatttatgcgaggcttaccttggggtacagcttttcatagctctatttagatattttataagcttggatggatggaggcctttagaatctctggatgttgtagtctccatctgagggacaagatgaagggtagatacatcccctttaactgtccatcctctagaaaatactagagggatagctggttttatcttcatgtcactgataccactccttgtcttgctattcccgaagaaaatccctcatattctggggtcatggacctccaaacattctctgacccctgctctgaagggattcaatgacaaaattcatgatctctaagaacgcggtctgactgggtacgaagttgtagagaagactttgttcgtcgtctaatccagtctctccaagcccgtgctcaccctgcatacgagtacatgggggcaaaggacatgacgtggatatcgcactttggtagaacccaaagttttctgataaccctagtactatgaactgtctctaacatctaatctttcactgttatctttgttatagctgtttctgatgcagccgtggtgaagtgggtagggcaggtagtggtcgatccaccatcggccactgctgacatcccgatgccgataagcaacctcccataggccaagaaggacatcatcgtgaacgtaagcatctcggactattctccatatctatcatatatttggctatagaagtagtaatcttgacccatactagcatggcctctaacggatgtgatcggccagcttgtcaaccactaggcgttcgcttctttgaaggagctggctgtgttggagcaagcagccgccaccctcgtgcccagggcagtggatccaaaagaaaacgtttgccctctctcgagaagactactggggtggagacactagttaggacgagcagctctgaggtgaggcttctatttcaggtttgtctgacaatcatggtagccttctcgatcttaacctttcttgtttgcaaataacttccagcacaaagtccgcctccatcaagaagggaatgctaccgatgaaacaaaaagtcggatgagtaccaacttgacctttttttgtttccacttgacgtcgtgtagcttttgtaacccaagatgttttgaatgcagcccttcacctgcggcctcgggacaatgtgccaaggcttgtgaggaggtgagctccaagtcgcctcatgctactgctgctgctactgttgtccctacatttcttcctccgtcggccggcgcccttgtcatctcaggctcgacctctgcctccaacaagctgctacaagcttatcgattgttggaagcaagtgcctgagatgctgtggctgagcttggacaacttgcaaaagtcgcctattcggttgacaccgcattgtggccctggaagcccatctaacggaagagcgtgcggacaacgccaagctgcaggaggagattgccagcgcggaggaatcaccaagtccaaggacaacctggcttcactctggcaagctctgcactagaactacgggcgcctcgatgtggccgcaaaagggcctggggatgagcgttcctcatcccgagtttcctgacgaaaccacggtcctggtgtcccttgggtcgctgataaccaagctggagaccgccgcgagctcccatgcagaccaagtagacaagggaatgaggtctaggatccagaccgacgcatgccacgttcttatgtgcctcaaactcacacgcccggaggtcaacattgaacaaatgatgaccaagggaggagccaacaagcgtcgcgaggacatgatatcagaattggaggatgtcgaggagtctgtgatccccttttttgaagagtaatatgctaattttagtttcattgcaaccttaaggacaagtatttcgtctgttgcccgagaacacttcccttctgttatccttttaaggtttccatcttgtcttttgtattctgtagatgctttgaagtcgagaatgagaacgtccagcaaggcggacgctcgtcaggcttaattgcacatcctagtacgccctaggcctcgtcaaccccgagtgatggcgaccgtgctctggtcgtcgtcacttctgatggcacgttggcctctcaagatgatcaactcacgctccttcgtgagaaatatcaaggtgcgaaaacccgaaattatagtgtattgctcctgtactcagaacaaaggatgctaatggtgtcgctgtctattctagatcttaaacattctctcgaggagatgaaacgctgggccgagtactggagaactaagttcgaaaagaaagagccggagcgagcaaccgacaatatcaagaaaggctagaactcgaagcttctcaaggaaagagaagtccagatggaagcttatactgaaggttgttgcacatcgcttgatcagctatgccaagagttgcatgtggttcgtctagctcctaagagatccataacaggttatctaggctggctgtggagtacatgcgatgacctggttggcaccgctcattggatcaacaaaagcctcaagcaagagagtgtcggaccaatcagttcgctggtggtcatgtgctcgcgtgcatccgtattttgtgaccgcagatgaacatgaactgtcttcggcaaaggttttctctttctccacagacggccgccaagatcgatcaactagcccccgagccaatgtcggtggtgatattgatgtcgtcgtccagcgaactcttaacagatggactgattaatacttctaggaacatgccaggttccatttgctctctactagaagctcgtcgagcaagtttgtcgacgtcggcgttgtctttgctttagacatggtgtactataggcccgtcaaacctatgctccagttttctgacttctacaaggtacttggacaattcaggattagagcatttgtaatccttatgcacttgtttggtgactatttctgagtcgcctttctgaactagtcgtttgaccacaagtgatgcggctgctctaagtccttcgtactctgcagtgttgttggttgctcagaaatctaattggacagcgtgtcgaaattgatctccggttggtgacgtgagaacgaatgcagctcttgctccttggttgttgaatgctccatcaaaggccattgtccatcgctcgttgtccatacgatcgactttgccgtccttggggcggtccagtcggtgacgaaatctgcgggtacctgagacttgatagtcgtttgtgggacgaagtggacattgaattggccaagctcgatgacccatttggcaatgcatcctatgacttctttgttgcgaagaactttaccaagggggtatgacaagacaaccatgaccttgtgggtttggaagcagtgacgcagctttcgggatgtcatgaccatggcaaagagcagcttctagatcttcggatatctagtcttggcatcatgaaggacttaactgacatagtagactaggaattggaccttgtcgtgctcgacaacaatgacagtacctatggagaacggcgttttggcgatgtagaggaagagttccacctatggttgtggggcaacaagtgctggtggatcggcgaggtatcgcttgagtacaaggaatgcctcttcagcctctgatgtccactcgaacctgtcaatgtttcttcaataaattaaagaaaggcagtcctcgttctcccatcttggccacaaatcgactaagtattgtcatacatctggcaagcttctggacttcctcgagcctcatcggtgatttcatttcctcgatggccttgattttgttggggtttgcttcgctacctcgtccaaagactaggaatccgagcagtttgcccaatagtactctgaacatacactactctggatatagcttgagccgatgtctccgaagaatgttgaatgtttcccttaggtcatcgatcagacgatctcgattttttttttcttgacgatgatgtcgtcaatgtaggcctccacgttattgctgagttgggattggaaagccccttggatttggcgctgataagttgatctagcactaatcaggccaaaaggcgtcttgacgtagcagaatacaccgaagtggtgatgaaggttgccctttcctcgtcttccttggccatgctgatttaatggtacccggagtaggtgtcaaggaaactcaacagctcacaccctgcgatagaatctatcggttggtcaatccgtggaaggggaaaatagtccttgggcatgccttgttgagatttgtgaagtgtacccacatcctccacttatcgttggatttgcgtaccatgattgggttggcaagccactctggatggaggatttctctgatgaagcctactttgaaaagtttattgagctcttcttggatagcctctttgcgatctggcgtgaagcgacgcaacttctgcttgacaggttttgcgtcgggtcaaaccatcaacttgttctcaatcacctccctgaagactccggacatgtcggacggctgctaggtaaatacatctgcattgtcatagaggaaggtgatgagcttgagttccaatttgcagtcgagctcggcgccaatcttggccgtgtttgtcaagtgtgctactagacagcgggattatctttatggcgtcgtctggtttgggtgccaagttgggtttgctcactttcccaggaggctcgattgtggcgggactgcggtagtttgctcgactatatcaaggctcatcttgtcacattgcacggccatcttcgcgttccctggcaccgtgattatccttttaggtcccggaatcttaatcaactggtaggcgtaatgcgaagccgccatgaatttggtgagtgttgttattctgaatatagtgttgtaggcaatatcgaactctgctacatcaaaatgatatgctatgtctgcaagttgtcaactctgccaaaggtcacgggcaatgtaatcttcccccaacaaccttgatgatgactctggggtaatgccatggaagggctgttctgaggggatgagctcgcttctaggaatccccattgcgtcaagcgcgctgaggaagaggagattgattgagctgccaccgtcaatgagaaatcgcgcgactagaacgttctgaatagtaggcttgactactatcgggtatcgtccaggggttgtcgtcagagaagggtagtcgatgtcagagaactctatcttctgatttgaccaattcatcttagacgtcgatacccgagatgtagagcatacttcgtgttcttgtattcccgcttagaagaatagaaggttgaaccgccgaagatatacgccacatgttgatcgaagtcaggaaaatctagttcggcatcgaacggaaggtcattggtgccctactctaccatgcaaactcgttttcccttgtcttgggctatcttcctagtcatggctttctaaaatacattgcactccttgaacatgtgagcgttggtcttgtgcaccggacaccattgcagtacaaggccatcatcttgaggaggaggtcgttggggagcgcttttctcttattctgcgacaagaacctccgactgtgccttttgctttcctcctttcttgcgactagattgccaacttgattccatagcatcttgtttggccaactattttcattgactaacttccccttcccatcatttcttcgaacggccttgtctgcgtgagcacacctatcaatgacctcaaacagcttcattgtagatattatccgtcatgtcgccagttcttggattgtgtagcaatcttagacatctgatttgaatgctcatatcacatatgcatcggtgatctctgggatcatattctgacattcgttgaattgtcggataaaatctcgaagaggttcaccgtgcttttgtttgagggcatgcaaggcatcttagaccacatgtctcttgtaggtgccttgaaaattcgcgatgaaatgcttccaaagatccgcgcaggaagatattgagggaggaaggtgcaccagccatgaccgagcagatcctttcaatgttgccagcaagtaatttgccagtgcattgtcatctgcactggcggtgtataggatagtagaatagacgtgcaaaaactcctctagatctatgctcatgtcgtacttctctaccgctgcaggacggaattttaagggctagttgactttaaaggctctgcatccacctctaggtaataggggtggtcggcgactatgaggtccacgtgaaccgccttggatgatgacgaggacgatgaaggcggggtatcggtagtcatggcttcggccttgccttagagctggagatcgtgagtcttgtcattctcgatcatcgcgatgacttcgatgacctcgttcgttctcgtcttgtcggctctagcaatcatgacgatctcgatctcggtcgcagttacgattgtcatctcgacgattgtctctacaattctggtcgcgaggttgtcggtgtccggcatcgtgttggtcttgttgctcccgccttcggccgttcaattggtcgcggagatcgtgagcattttgatagggaggcggttgatgagtatgtcgtcgtggcgatgcgttctcggggatgcgatgctcactgttgttggcatagggccgttggcagcgttagcgtcctcgagaacctcatcgttctggagagggtcttgagggggcggaggcccagcatcagccactaaggcggagttgaggttagcgacagtggactccattcactttaactacgcttctgcatttcagcgggttactagatcaaacggagcttgtcatagtagggaatttacgaaagttaggtgctcggcaggagtgcagagtggcttgacttgtctaggaactctcccaagaacagatttcgccatcttcagtggagccctaagtatggctgtccgtgcccatgtcttcgaccacaccctgacgttcacgtcacgcatagaattggacccagaagattctatgctaaatttttctgcaaacttagtcaaacttgaaaaaattaatgaggaaaacaatcaaagcgacctatttataatatgaaacggaggaagaatatgcataagctgaacaacgttagtgcatttgcaaattggtggccgtgtgaaaatgtgccccataaccgtgcagcaagattttgtgataattcaaattttgcaagccggttatgttcccaataatttttttttctcaagatcaactaaaattcgttgaatatgatccaacaaataacaaatttcattgaatatgatccagattgtagattgatcttcaaatgcttgcgactcaataggtgaagaactttatataacgctggcacctaaaatacaatctaatctaacagtatatagtagttgtctagttgcctaattatgctgccaaattgcggtaccacccatgggtgaaaagaacacggggattgcttctggaagcaagcatatcgcatccaacatttacagaggtcactgacctattggccccttcaatgctaatgatttccattaagcaattttccaaaatgacaatgcacctgacaagctacatcaaccacgatacatcattcgaagaaaccaaaccaataattcaaaagccaaactttcttgttcaagtgatagatgtgcaatgtcataattcctctgcataactaacatgacttgaggtctacatatttcatactacagcatcagaaatttgcaaaaataaacttggcaagtcccaacactccaaaatatgctctatctcagcacggtcaaagttggataattccataacctgaaataacataagcaaataatgaaatagttgtccaacgtagcatagcaattgttatgtaaaaagactaaatgatgacaattagtaaacagtactccctccatcccaccctctatcccataatataacacgcggtcaaagctggcacggtctccaaaactaatctttagcttataatttctcatatactataaggtttgtagcaacaaaattataaccatattaaagtaaatttaaatctcaatctaatgatataatttttaataaataaaattaatttcatattatactaagtgttggtcaaatgttttaaaagttgaatcttaatatgtgtgcgcgccatatattgtggtatggagggagtattttgatgtcattggctttagtgccctttacttagaggatgatcaatctgggatggagggagtactatttgtacattcttttaagaaacctgtagtttaacctacccatttttgaaaataaacatggcagcttcattattaatctactatattcaagacgcaaggtccggagcataaatgaactacttgttaaccacaacttcacttttttgcggccttcacaaaggagaggctaaacagcgaattgatcgtgaacttaaaagagatctaatcacattatagctccatcatggatactaatcagaacaaatgcatttttattgtctggcaatagagtagactagacactgtgaaatgaaccaaatactgataggcataatatcacacacaacattcattggctacttgttatgtttatcaatggcagggcatatgaaacaatttcatgcatggcatttgtattttttttcaatccacttctaggatgttgatgttcgctaaaaatatcaggtaagtatgtagattatatgaaaatgctaataccatttatcatgaaaaattattttatcatgcttttctagtatttaccagaatattgaaaacattttgaagactaaagtaatgaaatattaatcttcgaacattaaaaacatactataaaagaagattgtttgcaaaataatgttttgcatacacaattaataaatcccaaagtttccattagaactaacattatgttaaaccccaaccatcttcccattaggaaacgcccacaaccaagcctaagccttcctcccaactgcacacatgatttttaggctttaagcttttgttgctcaggaacagaatggttaaaccctatagcttcttgtgttttccaactacaatatggtatggccgcattagccctacatgtttgacttttctaaaagtgtggagtgtggattgcaggtaatttattttcattaagacataaaataacatggcaattttttagctacatggcactttggagttgctcgttcaagtgggtaaggtcaggccaagcaactgagccatcagcagagtcccatttgcttgacaaacagttgaaatacatgttttcagagtagaagcaatcaggtaatagtaaatcatcaactgaatgcactggaatccaaaacaattttgcagctagactattaacatatctaaaatgtccaaaatactattgagcatatcagttttctttgaaaaaaagtattagttaactgtatgctcaacaatgagattactgtgcctatcattagatcatcaggataaaaaaaatctgaactgcgttggctttcaacaatcctattgactgctacaactattcataatgatatagccaaaatggtttaactgcacatttccaattctgacacttggtcgtgattggagagtatagtagtacaccacccaaatggccaaatcattatgccccttggagttgaacaacagtatgacccagagtagcacagtcaaagaaaatatattgttacatctactctgagttacttagtaataacaaactaattgtaaataggacaggagggaagttgaaaaaagactgacccaagcttgcactgtatttttctcctttcgtgtcaacaaaaatgtttgaacatacagtaacttctacaagtagccactacttttacatacaagtttagataatattttgactgcggtcaaagcatctagctagtagaacttgaatttgttattaagtaggcattggttgagacagccaaatctagtagtatctatacacaaaccttggtgaatgagtctttgaaactgttcatgcattagcatcaagaaacccaaaatccaagaacatcaatcatatccacacaagatgtttcaatagacaaggtcaatggcaaaaagctgatcacatgttctatatgacggatcacatattgtttacaaatgcaggatgaaactgaagcattgatgtggaacagcaaagccaatatagagagcacatgggaaacataatgtaccctaaaagaaacaatatagcatcaatcctagactaaacactttgatgcctaattatacatttcatccgagttcattgatgagaacataagcacccctaggtgctcaaaggtgctaacgaagattaaaaaaaaaaagctaccatgggtctaagcaatgtggagccgatatgtattcatgaaaaaaggaatgtaaaggtaggtgcggctaaaggtttgaaagctaaaaatgcttaccatctaagattaacacagtaacacctagtgctaagaaacatatttttttcaacgtgattttagtcaacactgtcaaaatttgataaccttagccagtgacaggtccacaactctgtccacatagaaattgtggggtcagctcaaccccgcagctttttagaaccaccttgtaaaacttcattttcatgtgtaaatccagaaagaattagatatgacttcacttaaatatgggtaagaattgacccaatagtataaaattccttgatctaccattgaccttagcatcttcgatggagcacaaaaaactaacaagcatcttgagggagaaagtgctaaagcatccaccgtgatacctaaaataggtcttaagggatgcacatgctcttatcatctagcagtacgttatacaaaagacaattagaacaacagcaaattcatgcatattaagcacatataaggcgtcactgtagtatacatatcctaaggctcttcagaaaggacatggtccctttttccattagagaagccaatagcaaaatacgtggaacttcatagctacaacaaagtaccaactactaaggatgcatatgcctatctatccacctatagaaattgggcacttcctaggagctcccacgttaaccataaagatctaaccgttaattagatggatcatcttcttataaccgtagattggatttaggatttgtgctaaataaaacacgacctgaaaatatcgtggactctttggatgcaatctctacatccataatgacattgatatctctatcaggctcagtatcgtagaaattcatggctctgcccgcgactgtatcgtcgacagccactctaggactgcgagacatggcatatcgatctccttcgccttcttagcttcgcggtacacctgggagaggcaaagcagcagggttgctgcatattgccgcaaaacacaacataccgctgtagctggtgtggcgacaaagcagttaggtggcactgaatttatggagaaaaagccgtcaataaattgtgattttgtattgcattgaggcagcgggcagcagatggtgggggtgaagacacaaattggatcaaaagcggaattcgatggacaacagtagtagagaaccaaaatgatgaatgtaggtgggattgagggcctgttcactttattgccaaaaaaaaccttaccaaattttggcattgccaaaattttggcatagttaccaaaattttggcaacttgccaaaattttggcaggatttcttatatagttaccaaaatttgacagcaaactaaatgtagccacttttttggcaactttaccaaaatttggtaaggttgaaaatggcatcaaagtaaacaggccctgagttagaagatagagaatgatgtactaatttgcatgaaatcatgattcatgaaggcacagaactcaacagtgaagacaaagaagacaaagcgagatcacagtgtcaaataaaagcattctggtctatccatgaaccaatcaaataccactatgcgtcttttaattggccatgcatgcattgaagcaaattaaagcaagaagaggaatatacgatgcatggcagcttagggaccggggtgacacaactgaacaagttggaggatctaaatgagtgatctgcaaatttagggaccgggatgacacagtcgaacaagtttgaggacctgaatggtcgatttgcgagtttagggaccgggatgacacagcggtacaagtttagggaccggtgatggactttactctttatgagtttgtaattgcagcaagtgctttagagcctcatcggttgcccatatttcctaataagcccaaacggcttattagggaataaaaaattaatttataggtaaaaatttaatatatttgtttgtagcgacttaaaagccaacactaaaaagaaattacgctaaaaatatcttaaaatcaagctcaaaatcaagttcaaaaattcaaattttggcttttgctttggcttattaggccaaccgatggggctcttagcgtttaaatattaagttcaatcattcaaagggattttgaagaaaaaacattcaaccacttattcatcagtttaaaatttgacagatatttacattttttacaatactgtcaagtgcaacgcacgggtgagcaactagtgttatataacgaggctagcaagtcctgcacaaaatattgaatgatctttgattctgttgttcgatttatgttaggaatctgttatgtcactcagaagttggggcagagtagtgtttgactgaagaagaatttctgaattaccaaaatctacaccaaacataacaagtagttgctaaaaaaagcacagtcatgccaaacgttcaagttacaatatttcatccaaaattacagacatgaaaggaaggtgaaattccatacctcagaaaccgaaggaagaaaccatccatatcgtctgccattgtacaagcatttacctccagctgctgggccagaaggtatgaatgctatatccagtcttccagttatccaaaagaatcaccttcttcactgcccaccacccaattatcatgaccgccagcatcgtaaaacgctggatctgcaggctctccaccctcaccagcaagtgtgtcaccatggcgatcatgagccccacgagagtgtacaagaacccaaccgcaaaaccctcggcgccgagctgcatcccagacccctggtagaagaacacgagcttgtttggatcggaccggtcggtgatgaacatcggcgtgtgcctgatgatcccgtacatccccccggacacgctgaagaagtaaatgaacagcgccccagccatccaaacccgtcggtcatggaacaaggtctccccgtccatgatcctcttgatgaggaacggaatggagaccaagaagaggatgacgagtaggatcatctggttgcgggagacgaggggcgggcggacgatggggccgacctcgaggccggtgcgggactccacgaactccgccatggagtcggcgaggcgggagaagtgggactggtccatctgctcggagccagcgaggcgggtgtgctcggggcggacgaggcggacgtgggggagggagttgacgccgaactgcgcgaacgagtgctgcgactccgagaactcgatgtcggcgaagaagaggtcggcggaggcggggttgtgggcgaggaaggaggcggagaggagggcgaactcgcggcggagctgggggaggtggaggtcggtcttggagtggagcgaggcggcgtcgaagaagacgagcacggagtaggggcgcggcgccggggcggataggaagcgggtgatggaggtgtcggtgaggtggatcacgcccgacggggagcgggaccgcagggattgcagctcggcgaccaggtcatcggcgccggcggaggcggcgccggcggcgacgaggagcgtgagaaggaggaggagggggtggggtggggactccatgggcgattggcggatctgggcgaggagacgaacggacgagacgaggaagaagacttgggttggaggtattggactggtactggtaggtgggcccgcggagtcgtacggcctactcgtactactagtgatgggctagtgccccgaaaattcggcccaaactgaacccaatgccattttttgcggttttgttttcaaaggtttttcccttaaaatttatccatttttcagccgttagattagaggtatttaactatttcccattcttcaatgtagtatttaacgatttaccaccggatccaatggcaaatttgttaaatttcacatcttaaaaatggcaaatagttaattaacccgttagattaaccccgtgatatgcgcatactttcatgtggttttggtcccacattaaagttccaactcggcatactttcagatggttttggtcccacattaaagtttcaactcggctgtagagaatatgtaaaacaagtcacatacataatccagtctgaatctgatttgggttttgggccttgtaaatatatcgtgggctaagtccaaggggtggacgacctagggctaacccccagcctagtcctctttgcggaattcacattagctgtcatagttttatagccggatttttcttatattatttatgtcgttgcagtttcgctgcaagttcagtttgtggaaacccaactttaagttcttaatcattcatctgcaaaataagttgtaatataccttgttcttgcttgagttcttcaattcgcatgcagggattagccttctcgaagaggccaatcgggtagcacacggttgattaccagaggagacgtggtgttgcgattgtagggtttggatcgtgttgattggaagccggatcatgtgtgtcaagtgtccgccaaatcaagagttataaatacctatcagaagattagaaccttgttcctcaccagagcccatgcacgggccaggcttggttggctactcttccaccatcgaggagtcgggatagatggctaggtggcgctcggctagggaatctctcctccctcttgagaggacgcaacatcacttggggatggttcgctaacatttgtagcgggaatttctttcgatgaccacctgcatagatcacagctatacaagatacactcaaagacatcacatgcaagttcaagccaaagtcaagaagttgacaactttatggtgggagcgccacgatagctgagtctcgacgcctcaccttgctcctctgtatgatgtggaggcaaaggaccagtgtctcttgcctaaggccaaaaacggtacggaaactttccggattccggacctatttttgaaaacggaatctgacggtcggaatttttcgaaaacggaaacgaggaaatattttctcgtaaacggaatcgaaaatgataagggaagtttccgtagcaactcggaatcggttggaaactttccaaaaattttctcggaatttttggaatttttttcggaatttccaaaaattttgtaactgaaataccctgcgttattttttaaagcacttaatagtgaataccatggtgttttactgttattttttaaaaaatattttttatgcaaatctaaaattacataagaatatttttttcctacattgggatttatcaacatcattactctcttaaacatagataatttttttcatagattgtgttttgtgatgtactgttaatacttaacaattggacttatatgattatgttttatgataaatcgttgaccgttgagacttgagaattggatttatcagtttgatgggttttttattccgataaattttcgttacagtatttgcgccgattcattttcgcttcgttttcagtttcgataatattcgattccgctttcgtatccgaggttttcgattccaattccaattccgaaaaaaaatatgaaaatgaaaacgataaagatggtttctatccgtttctgtaccgttttcacccctactcttgcctatgcgtgcggcaacgacagatatcctagcctcgagcctatgagatgaatgtgcaggtggtgaggacagtgataaatcgatggtagtagatatcctagcctcgagcgatgcaaatctcttggcgatgagtgctagagtagatgtgcctaccttggcgttttcacatgattgagtggatagtgaaaggaccttgatgtcgcctagaggttgggtgaataggcgttcctaaaaattatcacaacttcatagcatatcagagtgatgataacttttgattcaaatcgaaacttccggtatgggattggaagttccggtctcaatcgaaaagttcggcggataacggaataaacactagctatgaacttgtagctcaaacaaacaaaatgtatatgaatcaaaaggtgacaaataaggtatctaagcaagatataaggtcacctactaaatcaattaagcatgcaagtagatcaggtaaaaacaagctcaagcacaatatgagagaatgcaagaacgggcaaaccaagaggggagatgcgtgatttgtttcccgaagttcggatccacggatcctacgtctccgttgaggagccacaagggccaggcctatttcaaccctttcctcacgagggtgcacaaatgcactcctcggtttcactattgatttcttcccttgcggaggcgaaatcgaagccttcacaaactttccatggcacaccacaaccttgggtgctcaccggcaacgcctagccgtctaggagaccttagtctccaagagtaacaaacacaatcgaagatttgcttgctatgaactcgagtgctcaaagtatggagtgaagctcactagctctcaacttctcaatcactcaatccaactctttccccttctcaaatccctctcacaaagaggcacacaaaggatggagtgaagctcactagctctcaactcctcactctctcaatccaactctctccccttctcaaatccccctcacaaagaggcaccacaaaggtagggaaatggggatggctatttggctttggatgtgtctaatactccccaagagcagcagcccctcaaaagaggggtggaggagtttatatacccgagcccctcaaaaactagccgttggaggccaagactgtaatttttggagtttccgaaaagcattttcggacaagtccgaaaacttacagaagcaaatctcatattcgcagccactttcggaatgtccgaaaattttcggagtttccggtaatttttcggactttccgaaaagcacagagtaaaacgactataacttttcactcgggagtccgttttcgatgaacttggactctatagaaagctcactcagaggactacccaactcaaccaaaaacaaggtctaaaaccactcaaaggataggttaaagcttgggcttctctcaaggtagcactatgataggtcactttgagcaccgagacatacacaaacacctcgacgttgcatccctcttaatagtacggcattcctaaactcaaatgtaaataagaagataattataccattaggaatgcctttttttcatccttctttcattgtctagagggacgccaatgccgataccgtttcaccatatattcttcaaatgattgatgcggttacttgtagcttcaaatggtctctcacggtccatcatgacaaagccgtcactcgccctttaccaccaccggatttggtccttcggcgccaagccccttgcttgcccttcaccgccgcatggtccatcgcgaccgagcatcgcttgcccttcaccatcttgccataatagccacttcgtatcacacatcttcaatatcttcactttgtcattcttggtattgttaggtgtaatgatatcacttgagcatcaacacctttgtaatccttgggacctatttctttcattcaactcaataaaattattagtcccaatgatccggttgtcaacctccacatgttgaccaaccgatcgcatgtataaaaggatatgaataaatgatgagtattaatcaacaccacaagtgtcatatactcaaatatatgttcaaatgtaaagatcccaattaaatgaaggtgaataacttggattgattacatgcataactaaagtataggatttgctccccctaaatgtatgcatacaaaatatttgtgtgaagcaagagcatgcataacaagatattaaacattgagagcttatcctatacaagaatagaaggcatttctcaaatatagatattaaaataaaaatataccttcatcatctccacgttctcaatgtaaatagactaaataagagataatactcaaacaaaacattagtctcacatgcatatgccaatcacgtggaaatattatatacgaacatatcaatatgtacatgaagagaaagagtgatacatatagcttgatctccatgcatttcatccttgtgatttaggtccaccaacactccaatttcatatccacatgagaataggcaaagaaatgcttataaaaacattagtctcacataattggatttgttattaatcatcaaaaccaaatcaatgtcacttgaactttcagatagctctctttgcggggtagtaggcttttgttgacgtatccctaatgagggataagggtggcctcacgcctacccaaaggctaccgactttggggccacgcaaagcggctactctgggagcctgcttcttagctttttccctgcacgcttggagcttaggaactcggcgggatctttggcgggcctttttcaggagcccttctccgaccatcttaggggctcggatataaagatcttagcatgatgactaacagttatgggtggaagtaaaacgaaggacatagacaataatgtgcgagctttacctaaagatgtggattctcgatgttgaaagagtatgggcaccccttggtagtaaccactacgcctagcttgaagatttttgtccaggtggtggcctcattgtccctattcctctcatccaattcccaagtgggatatgtgggggccacaatactcaaaactcatatgcaccctgttcttgagtgtttggatgtgccgaagcacgaagttcaaagcgatgtagacgtcggccagattcgcctccttcaacttgttgaaagaagataagaggggcatgactagcatacggaggaagagaaggggaggggtttgagtagtaaaaaacactcaaaattccaccccttcaaagaagatttgaggggaagattgaagtaatccttcttcttcttgggccacagctggtggacgacgcctccaaccacctggggatttgctcaggaaggctggggcttgaggttgaacaagtgacggaagagggcgaagtgtgggggatcccaagaaagcttcacaaaggttgatgaagatagcaatctggagaatagagttaggtttacatgaataagctcgattccatagaaatcagaggttgcaagagcaaagccatggtggaagaagggctctaatcctataatctcactcgtattaggggtggggaagagctccgtgatggctaggcgccagccgatgatctcttgtgctggcaatagcttgtcctccaccagatcatctagtttgctcccattgatg

SEQ ID NO: 24221 - DNA, 753 bp, Oryza sativa
cacaggactgaggaagatataagaaccagatcagctttacaagaacaatcaccttaaaacttacaaagaacctaagtataaacatgtgatgaacaatgcgtgcaaccgtgcaagggagaaaaaccaagtatattcaacattcttcgtgtcctgaatatccggttatacagcagaagaattatacagtgctcgtgtgctagtacattttgggggtggaaacgtaccttctacctcgagcctgcttaaataattgttacaaaatgagaagtatgagaagacatcgacacaagattaccatttacacccaactcagcttttctaaggcagatcccagcagccaatttgcaaacaacaaagcaaatgggatatacagagtagagacatgcgaaagttatatgcccttcgtccaaaagaccatgcgtaaacagaagcagcagcaatacagttgtcaaggtctgccggcgatcctcttggctcctgcaatgtgccgatatttcaaagttgcatttaatgctgaataacagtaaggattcacaaaggagtacttgtgtaacaaaaagacctaagtgaatagtacgggagaaaatccattaatccatttatgctggtataaatatctctcaaataaaaaaatggaggtggtttcaaaatctcagaatctaagcccattactaacatcaaaatgttcttgagaaggacatcagaaaagataagccccttacaggctagtggttgattaattgatacagtaac

SEQ ID NO: 24222 - DNA, 695 bp, Oryza sativa
cagcaagagtacccgcaagagcatgcccatctaaactgtcatccattgagtgcacaaccggaatgcatctttctgctcctctacattctggatatcttttgtcaactcctctctttcagccaaagcagctgcaacagatgttggaaggaagtcttttccacgatatattacaatgtagtacttatttcgaagaagcaaggtgccccctgttagattgtgaaataatgttaaaaagataaggcttcactgattcagaaatcctatacaggttaaatcaaatatagtgcatgaacagttgaacacagttgattcatggaaacacacctttggaactctatgaaagttcgacaaggaatagaactaaactatatgaagctgtctccatcatgatcttggtaaagcatgattgtctatgatggtgtttagacaaataaaagcattacattaagcaagttatattcattagagcaagcagtgcagcacaattttgttattattttccgaaaccctggtgttgctttggatgattaacaaatcatggattttgtaatattcacaggacaaatatggacttcatcaaaacctactgctgagtaagtgagtactgagtattccttatagttgccccttttttatcaggatttttagttgaatttcttcatgcctcaaattcgactagatatatgggctgcagg

SEQ ID NO: 24223 - DNA, 705 bp, Oryza sativa
agacagaagcttcacacgagtttcagaagcagaaaaggttttcttttcttttttccagggagtagtggatgggtgcggaattgcagatgcagcctgaaatttgtccgttcaaaatggatgcaggaacggcggtggtatttggagtgtcgtctgctttagttttgtcctgtttcagttgagtgtgatgccatgtagtgtagctgctatggtcacgactcacaacttacaaaaacaatgctgaaaaataaattataacaaaaaagaacatcagcatcaattctaaacgagttttatagtttaatgacatattttgaatcgcaataatggaaaagcatataaaaaaacacaggattctaacagtaattcaagtgtaaaataaatgattgtagaacacataaaaaaacataagaatgtttgtctgatttaaccacatgaaaaacatataaatttgagtagacataaagactcgacggaaagctttctagagattatacctcatgttaaatttactttaaaacttgtatggaatgagatattctgtaggattccataatattcattcttctgattttaaaatccatataagaaaattcctatagaaacgaaattcttataatttttcagtgaatcgaagagggcctaaatttccgctagctgaaaaacaattagtgttgtcccgtgttgaattgagtgtgatgccatgta
